United States Patent Application Publication US 2011/0183924 A1 - sequence listing, part 171

SEQ ID NO: 431024 - DNA, 936 bp, Homo sapiens
ggaaggagctagacggcggtcgggtaggtgacggcttggttggggtcgctgcgaggggactactaggagcgccgaggcgtgagtcgtagcctgtggcttggggtcgggagtgcaggaggcgaaaatgtttgccattcttttgaaagtctggcctgggtgtgggagttcggtcatcgaacacttactgagagccagatacctgccaggcactgccctgggctccagggacacatcagtcaacgaacggaagggccctgctctcaagcagtgcgaaaagcagattataaacaagtcaacaaacgggattatctaaggtggtagttctctactcacatcttttaatcttgaagactagaaaatataactggatctgccacttgtttggaaaatatctctaccaagcaataaattacccgctgtgcttttgttgtagtgtagaagtttttgagttctccaaatctaaacaagattttgtcccattttcccatgaagctacattgttgcttattcactttagtggcaagtattattgtgccagctgcttttgttttggaagatgtggacttcgaccaaatggtttcactggaagcaaatcgtagttcttacaatgcatcctttccctcaagctttgaactctcagcaagttcccactcggatgatgacgtcatcatagccaaagagggaactagcgtttcaattgagtgtcttctcacagccagtcactatgaagatgtccattggcacaattcaaaaggacagcaactggatggcagaagcagaggattgagataagtttggatgatgatgaaaatggacaaaatccagagtgcttactaatttatgtgccactaaaataatccagaaccatagaatcttggggatgaaagagattttgaagattgggcactcaagtaatgcttaacaagcagtccgcta

SEQ ID NO: 431025 - DNA, 470 bp, Homo sapiens
gtttttgtctttacaaattattttcagaaatggctaaaagtgtacagaaaacagtaaatcccttctttactcagaataacttcttaatagttgaagcatccaaaatatgtaaaagcaagggtgggcgtagtggctcttgcctgtaatcccagcattctgggaggccgaggcgggcagatcacttgagatcaggagttcgagaccaccctggccaacgtggtgaaaccccgtctctactaaaaatacaaaaactagctgggcatggtggcttttttgcacgcctgtagtcccagctactcgggaggctgaggcacgagaatcacttgaacccaggaagtggaggttgcagtgagctaagatcgtgccactgcactccagcctggacaacggagtgagactctggggaaaaaaaaaattaaacttcctactttttttctttttgtagagacagagtttcactctgtcgccca

SEQ ID NO: 431026 - DNA, 3431 bp, Homo sapiens
gtttttgtctttacaaattattttcagaaatggctaaaagtgtacagaaaacagtaaatcccttctttactcagaataacttcttaatagttgaagcatccaaaatatgtaaaagcaagggtgggcgtagtggctcttgcctgtaatcccagcattctgggaggccgaggcgggcagatcacttgagatcaggagttcgagaccaccctggccaacgtggtgaaaccccgtctctactaaaaatacaaaaactagctgggcatggtggcttttttgcacgcctgtagtcccagctactcgggaggctgaggcacgatcatacctcactgcagcctcttgggcttatgtgatcttaccccctcagcctctggagtagctggaactacaggctaaatttcctactttgtaaacatcagtagtggccagatacttctgagtcttaaaagcataataggccgggcgcggtggctcacgcctgtaatcccagcactttgggaggccgaggtgggtggatcacaaggtcaggagttcaagaccagcctggcccaaatggtgaaaccctgtctctactaaatatacaaaaattagctgggtgtggtggcgggcacctgtaatcccagctactcaggaggctgaggcaggagaatcgcttgaacctgggaggtggaggttgtggtgagccaatatcatgccactgcactccagcctgggtgacagagtaagactccgtctcaaaaaaaaaaaaagcataataatttattacatcccaaatatataaaaatttgagtgcctttgcagttgggatggttcctaaaattgcgtatagaattaaggcacagaattgtgtgtaaggtcctgaatctggctaaaatacagtggatgtatgtattggaattatgaggcataagtagccagtatctatagttagaatctacaaggcctcctttttgcacctgtagactagaatataactgttattggtgcctttgagtgttatctctcagtggctagaggtgctgtttcaagcacaatttagactagggttgaaccactcattgttcaaatcattggtgggctccaatgtaaaatatcactacatcagtccacaagcaacattaaggaaatctaaaggaaatggaatttgactttttagagtataatgatgttctagggcataatgaggaaaatttttaaaaaatagattataatgatacatattggtatcattaagacaacagatttgagcaaatacaattaaggtgtcttattttttgcatcaagtaattattgctgtggtctttctactccacaaaataattttttctttttgcagttgaaaattaactgcattattaactaattaataaaataaatcaagtggtataagggattagtttaccctcaagccgatgactccatggctactgatattagttagtttaggatttttaaaaagcatatcagacccccagtttcaggaattgagtataaatattgcttcttgtcaccctgggacagtaatgccttatagtggcactagtcaccttaagtagattacacatggttgaggtgaataaagctgcatgggaatttgctttcgtgatatatttcatttgcaaacttctacataatcaagttttatgtttaaaaccatcggttctatatatctagctttaggaagttgcccttacaggtgggaccttttgtgttaatctgttttctccccagtcatcttatttggctatgttaaaaaaaaaaaaaaaaaaaaagcgagagagagagatggtgtctcactgtgttgcccaggctggtctcgaactcctggcctcaagtgactttcccgcctcggcttcccaaagtgctggaatcacaggcatgagccacagtgcctggtcttagctgtgtttttaattatgccatgcatcaacataacaccgggccatcttcctatcccttcctatcccatatgtttaatgaaaacatattttatgtgctaaattaggttaatttaccagagatttagcttagtgtttttaaactatagaacaatacccctatagaacaatgtacagctgcacccaaggttaaaaagaggtagcagggaaaacaaacttaaactctttgtatatggtgaaacccatccctctcctgccctctaatggtatgtttacattatttcgttattatacaatgtagtggtataaacagtattattaaactgaaggcataagttaaaggaagtatgttactttgagctgatgtaggctcttccacttttatctgtattttacttatttggggactttgtattgctagggcttcagaatactaactttgacacagctcccagagaggtttgcaaacttttggtttccctctcaaatccatggtagtagtttcaaatgagtttgtggataatggatgtttagtccttatcatttgctgtgttttgacagtttttaatttgcagtattcactcacgaactgttttattttaggaataatgcaaaaccaaccttcgtccggtgatgagaatagccgtatgataagagaatttgctcatcgtgctttaaatgattaactgttttaccttatttagtatttcatagactttgcatgatatggtacactcctaattatgcattctttggtttccaaatcttaatctaagatactttgttaactgactggtagcctaagaaagagacttttcttcctgtttttctctctccccattttttggggtaagttttgcaaagatcagtgctgcttctcatgactctaaagtaaagctcttttggatagcacagcctaactttacagctagacagaatggccattaagaatatttccaaaatccaagtttatcaaaattattttgtgggaaatcatcaatctattttattaatgttatgtgtttaattttggacttattttgggaaaaactgttcaaattgggtccttttaagcttattttaagcagcctagaaggaagaagctacttagctaatgaaagctgagacactttaataaaagcaggatcttaagagcattgtttttccttaaaaactttatactctcagataatctgcaacaacaaaaattaagaaatccctgacttttgtagaattcccactgtcaaattctcactgacttatgagtgtgagagaagttatcttttgtttgaattctgatagaacagtttaactcctttctaaggatataaaaaattcattggaaagtgtgtatatttcaaagactctcaattatctggactgaaggcactgttctcactatggccagatgaatgggagtattctgtacatgaatcatgctgtattttaaatcaggacatcacttaagtattaatgttgtgtgtacagatttttgttttgggattttttttgcctaaataaatgttataaatttta

SEQ ID NO: 431027 - DNA, 3377 bp, Homo sapiens
gtttttgtctttacaaattattttcagaaatggctaaaagtgtacagaaaacagtaaatcccttctttactcagaataacttcttaatagttgaagcatccaaaatatgtaaaagcaagggtgggcgtagtggctcttgcctgtaatcccagcattctgggaggccgaggcgggcagatcacttgagatcaggagttcgagaccaccctggccaacgtggtgaaaccccgtctctactaaaaatacaaaaactagctgggcatggtggcttttttgcacgcctgtagtcccagctactcgggaggctgaggcacgatcatacctcactgcagcctcttgggcttatgtgatcttaccccctcagcctctggagtagctggaactacaggctaaatttcctactttgtaaacatcagtagtggccagatacttctgagtcttaaaagcataataggccgggcgcggtggctcacgcctgtaatcccagcactttgggaggccgaggtgggtggatcacaaggtcaggagttcaagaccagcctggcccaaatggtgaaaccctgtctctactaaatatacaaaaattagctgggtgtggtggcgggcacctgtaatcccagctactcaggaggctgaggcaggagaatcgcttgaacctgggaggtggaggttgtggtgagccaatatcatgccactgcactccagcctgggtgacagagtaagactccgtctcaaaaaaaaaaaaagcataataatttattacatcccaaatatataaaaatttgagtgcctttgcagttgggatggttcctaaaattgcgtatagaattaaggcacagaattgtgtgtaaggtcctgaatctggctaaaatacagtggatgtatgtattggaattatgaggcataagtagccagtatctatagttagaatctacaaggcctcctttttgcacctgtagactagaatataactgttattggtgcctttgagtgttatctctcagtggctagaggtgctgtttcaagcacaatttagactagggttgaaccactcattgttcaaatcattggtgggctccaatgtaaaatatcactacatcagtccacaagcaacattaaggaaatctaaaggaaatggaatttgactttttagagtataatgatgttctagggcataatgaggaaaatttttaaaaaatagattataatgatacatattggtatcattaagacaacagatttgagcaaatacaattaaggtgtcttattttttgcatcaagtaattattgctgtggtctttctactccacaaaataattttttctttttgcagttgaaaattaactgcattattaactaattaataaaataaatcaagtggtataagggattagtttaccctcaagccgatgactccatggctactgatattagttagtttaggatttttaaaaagcatatcagacccccagtttcaggaattgagtataaatattgcttcttgtcaccctgggacagtaatgccttatagtggcactagtcaccttaagtagattacacatggttgaggtgaataaagctgcatgggaatttgctttcgtgatatatttcatttgcaaacttctacataatcaagttttatgtttaaaaccatcggttctatatatctagctttaggaagttgcccttacaggtgggaccttttgtgttaatctgttttctccccagtcatcttatttggctatgttaaaaaaaaaaaaaaaaaaaaagcgagagagagagatggtgtctcactgtgttgcccaggctggtctcgaactcctggcctcaagtgactttcccgcctcggcttcccaaagtgctggaatcacaggcatgagccacagtgcctggtcttagctgtgtttttaattatgccatgcatcaacataacaccgggccatcttcctatcccttcctatcccatatgtttaatgaaaacatattttatgtgctaaattaggttaatttaccagagatttagcttagtgtttttaaactatagaacaatacccctatagaacaatgtacagctgcacccaaggttaaaaagaggtagcagggaatggtatgtttacattatttcgttattatacaatgtagtggtataaacagtattattaaactgaaggcataagttaaaggaagtatgttactttgagctgatgtaggctcttccacttttatctgtattttacttatttggggactttgtattgctagggcttcagaatactaactttgacacagctcccagagaggtttgcaaacttttggtttccctctcaaatccatggtagtagtttcaaatgagtttgtggataatggatgtttagtccttatcatttgctgtgttttgacagtttttaatttgcagtattcactcacgaactgttttattttaggaataatgcaaaaccaaccttcgtccggtgatgagaatagccgtatgataagagaatttgctcatcgtgctttaaatgattaactgttttaccttatttagtatttcatagactttgcatgatatggtacactcctaattatgcattctttggtttccaaatcttaatctaagatactttgttaactgactggtagcctaagaaagagacttttcttcctgtttttctctctccccattttttggggtaagttttgcaaagatcagtgctgcttctcatgactctaaagtaaagctcttttggatagcacagcctaactttacagctagacagaatggccattaagaatatttccaaaatccaagtttatcaaaattattttgtgggaaatcatcaatctattttattaatgttatgtgtttaattttggacttattttgggaaaaactgttcaaattgggtccttttaagcttattttaagcagcctagaaggaagaagctacttagctaatgaaagctgagacactttaataaaagcaggatcttaagagcattgtttttccttaaaaactttatactctcagataatctgcaacaacaaaaattaagaaatccctgacttttgtagaattcccactgtcaaattctcactgacttatgagtgtgagagaagttatcttttgtttgaattctgatagaacagtttaactcctttctaaggatataaaaaattcattggaaagtgtgtatatttcaaagactctcaattatctggactgaaggcactgttctcactatggccagatgaatgggagtattctgtacatgaatcatgctgtattttaaatcaggacatcacttaagtattaatgttgtgtgtacagatttttgttttgggattttttttgcctaaataaatgttataaatttta

SEQ ID NO: 431028 - DNA, 3472 bp, Homo sapiens
gtttttgtctttacaaattattttcagaaatggctaaaagtgtacagaaaacagtaaatcccttctttactcagaataacttcttaatagttgaagcatccaaaatatgtaaaagcaagggtgggcgtagtggctcttgcctgtaatcccagcattctgggaggccgaggcgggcagatcacttgagatcaggagttcgagaccaccctggccaacgtggtgaaaccccgtctctactaaaaatacaaaaactagctgggcatggtggcttttttgcacgcctgtagtcccagctactcgggaggctgaggcacgatcatacctcactgcagcctcttgggcttatgtgatcttaccccctcagcctctggagtagctggaactacaggctaaatttcctactttgtaaacatcagtagtggccagatacttctgagtcttaaaagcataataggccgggcgcggtggctcacgcctgtaatcccagcactttgggaggccgaggtgggtggatcacaaggtcaggagttcaagaccagcctggcccaaatggtgaaaccctgtctctactaaatatacaaaaattagctgggtgtggtggcgggcacctgtaatcccagctactcaggaggctgaggcaggagaatcgcttgaacctgggaggtggaggttgtggtgagccaatatcatgccactgcactccagcctgggtgacagagtaagactccgtctcaaaaaaaaaaaaagcataataatttattacatcccaaatatataaaaatttgagtgcctttgcagttgggatggttcctaaaattgcgtatagaattaaggcacagaattgtgtgtaaggtcctgaatctggctaaaatacagtggatgtatgtattggaattatgaggcataagtagccagtatctatagttagaatctacaaggcctcctttttgcacctgtagactagaatataactgttattggtgcctttgagtgttatctctcagtggctagaggtgctgtttcaagcacaatttagactagggttgaaccactcattgttcaaatcattggtgggctccaatgtaaaatatcactacatcagtccacaagcaacattaaggaaatctaaaggaaatggaatttgactttttagagtataatgatgttctagggcataatgaggaaaatttttaaaaaatagattataatgatacatattggtatcattaagacaacagatttgagcaaatacaattaaggtgtcttattttttgcatcaagtaattattgctgtggtctttctactccacaaaataattttttctttttgcagttgaaaattaactgcattattaactaattaataaaataaatcaagtggtataagggattagtttaccctcaagccgatgactccatggctactgatattagttagtttaggatttttaaaaagcatatcagacccccagtttcaggaattgagtataaatattgcttcttgtcaccctgggacagtaatgccttatagtggcactagtcaccttaagtagattacacatggttgaggtgaataaagctgcatgggaatttgctttcgtgatatatttcatttgcaaacttctacataatcaagttttatgtttaaaaccatcggttctatatatctagctttaggaagttgcccttacaggtgggaccttttgtgttaatctgttttctccccagtcatcttatttggctatgttaaaaaaaaaaaaaaaaaaaaagcgagagagagagatggtgtctcactgtgttgcccaggctggtctcgaactcctggcctcaagtgactttcccgcctcggcttcccaaagtgctggaatcacaggcatgagccacagtgcctggtcttagctgtgtttttaattatgccatgcatcaacataacaccgggccatcttcctatcccttcctatcccatatgtttaatgaaaacatattttatgtgctaaattaggttaatttaccagagatttagcttagtgtttttaaactatagaacaatacccctatagaacaatgtacagctgcacccaaggttaaaaagaggtagcagggaaaacaaacttaaactctttgtatatggtgaaacccatccctctcctgccctctaatggtatgtttacattatttcgttattatacaatgtagtggtataaacagtattattaaactgaaggcataagttaaaggaagtatgttactttgagctgatgtaggctcttccacttttatctgtattttacttatttggggactttgtattgctagggcttcagaatactaactttgacacagctcccagagaggtttgcaaacttttggtttccctctcaaatccatggtagtagtttcaaatgagtttgtggataatggatgtttagtccttatcatttgctgtgttttgacagtttttaatttgcagtattcactcacgaactgttttattttaggaataatgcaaaaccaaccttcgtccggtgatgagaatagccgtatgataagagaatttgctcatcgtgctttaaatgattaactgttttaccttatttagtatttcatagactttgcatgatatggtacactcctaattatgcattctttggtttccaaatcttaatctaagatactttgttaactgactggtagcctaagaaagagacttttcttcctgtttttctctctccccattttttggggtaagttttgcaaagatcagtgctgcttctcatgactctaaagtaaagctcttttggatagcacagcctaactttacagctagacagaatggccattaagaatatttccaaaatccaagtttatcaaaattattttgtgggaaatcatcaatctattttattaatgttatgtgtttaattttggacttattttgggaaaaactgttcaaattgggtccttttaagcttattttaagcagcctagaaggaagaagctacttagctaatgaaagctgagacactttaataaaagcaggatcttaagagcattgtttttccttaaaaactttatactctcagataatctgcaacaacaaaaattaagaaatccctgacttttgtagaattcccactgtcaaattctcactgacttatgagtgtgagagaagttatcttttgtttgaattctgatagaacagtttaactcctttctaaggatataaaaaattcattggaaagtgtgtatatttcaaagactctcaattatctggactgaaggcactgttctcactatggccagatgaatgggagtattctgtacatgaatcatgctgtattttaaatcaggacatcacttaagtattaatgttgtgtgtacagatttttgttttgggattttttttgcctaaataaatgttataaattttaacgaacaacaacaccaaaaaaacaaaaacaaacaaaaaact

SEQ ID NO: 431029 - DNA, 3377 bp, Homo sapiens
gtttttgtctttacaaattattttcagaaatggctaaaagtgtacagaaaacagtaaatcccttctttactcagaataacttcttaatagttgaagcatccaaaatatgtaaaagcaagggtgggcgtagtggctcttgcctgtaatcccagcattctgggaggccgaggcgggcagatcacttgagatcaggagttcgagaccaccctggccaacgtggtgaaaccccgtctctactaaaaatacaaaaactagctgggcatggtggcttttttgcacgcctgtagtcccagctactcgggaggctgaggcacgatcatacctcactgcagcctcttgggcttatgtgatcttaccccctcagcctctggagtagctggaactacaggctaaatttcctactttgtaaacatcagtagtggccagatacttctgagtcttaaaagcataataggccgggcgcggtggctcacgcctgtaatcccagcactttgggaggccgaggtgggtggatcacaaggtcaggagttcaagaccagcctggcccaaatggtgaaaccctgtctctactaaatatacaaaaattagctgggtgtggtggcgggcacctgtaatcccagctactcaggaggctgaggcaggagaatcgcttgaacctgggaggtggaggttgtggtgagccaatatcatgccactgcactccagcctgggtgacagagtaagactccgtctcaaaaaaaaaaaaagcataataatttattacatcccaaatatataaaaatttgagtgcctttgcagttgggatggttcctaaaattgcgtatagaattaaggcacagaattgtgtgtaaggtcctgaatctggctaaaatacagtggatgtatgtattggaattatgaggcataagtagccagtatctatagttagaatctacaaggcctcctttttgcacctgtagactagaatataactgttattggtgcctttgagtgttatctctcagtggctagaggtgctgtttcaagcacaatttagactagggttgaaccactcattgttcaaatcattggtgggctccaatgtaaaatatcactacatcagtccacaagcaacattaaggaaatctaaaggaaatggaatttgactttttagagtataatgatgttctagggcataatgaggaaaatttttaaaaaatagattataatgatacatattggtatcattaagacaacagatttgagcaaatacaattaaggtgtcttattttttgcatcaagtaattattgctgtggtctttctactccacaaaataattttttctttttgcagttgaaaattaactgcattattaactaattaataaaataaatcaagtggtataagggattagtttaccctcaagccgatgactccatggctactgatattagttagtttaggatttttaaaaagcatatcagacccccagtttcaggaattgagtataaatattgcttcttgtcaccctgggacagtaatgccttatagtggcactagtcaccttaagtagattacacatggttgaggtgaataaagctgcatgggaatttgctttcgtgatatatttcatttgcaaacttctacataatcaagttttatgtttaaaaccatcggttctatatatctagctttaggaagttgcccttacaggtgggaccttttgtgttaatctgttttctccccagtcatcttatttggctatgttaaaaaaaaaaaaaaaaaaaaagcgagagagagagatggtgtctcactgtgttgcccaggctggtctcgaactcctggcctcaagtgactttcccgcctcggcttcccaaagtgctggaatcacaggcatgagccacagtgcctggtcttagctgtgtttttaattatgccatgcatcaacataacaccgggccatcttcctatcccttcctatcccatatgtttaatgaaaacatattttatgtgctaaattaggttaatttaccagagatttagcttagtgtttttaaactatagaacaatacccctatagaacaatgtacagctgcacccaaggttaaaaagaggtagcagggaaaacaaacttaaactctttgtatatggtgaaacccatccctctcctgccctctaatggtatgtttacattatttcgttattatacaatgtagtggtataaacagtattattaaactgaaggcataagttaaaggaagtatgttactttgagctgatgtaggctcttccacttttatctgtattttacttatttggggactttgtattgctagggcttctctcaaatccatggtagtagtttcaaatgagtttgtggataatggatgtttagtccttatcatttgctgtgttttgacagtttttaatttgcagtattcactcacgaactgttttattttaggaataatgcaaaaccaaccttcgtccggtgatgagaatagccgtatgataagagaatttgctcatcgtgctttaaatgattaactgttttaccttatttagtatttcatagactttgcatgatatggtacactcctaattatgcattctttggtttccaaatcttaatctaagatactttgttaactgactggtagcctaagaaagagacttttcttcctgtttttctctctccccattttttggggtaagttttgcaaagatcagtgctgcttctcatgactctaaagtaaagctcttttggatagcacagcctaactttacagctagacagaatggccattaagaatatttccaaaatccaagtttatcaaaattattttgtgggaaatcatcaatctattttattaatgttatgtgtttaattttggacttattttgggaaaaactgttcaaattgggtccttttaagcttattttaagcagcctagaaggaagaagctacttagctaatgaaagctgagacactttaataaaagcaggatcttaagagcattgtttttccttaaaaactttatactctcagataatctgcaacaacaaaaattaagaaatccctgacttttgtagaattcccactgtcaaattctcactgacttatgagtgtgagagaagttatcttttgtttgaattctgatagaacagtttaactcctttctaaggatataaaaaattcattggaaagtgtgtatatttcaaagactctcaattatctggactgaaggcactgttctcactatggccagatgaatgggagtattctgtacatgaatcatgctgtattttaaatcaggacatcacttaagtattaatgttgtgtgtacagatttttgttttgggattttttttgcctaaataaatgttataaatttta

SEQ ID NO: 431030 - DNA, 1514 bp, Homo sapiens
cattcggtaggtcgcgcgggcccagatgggtacttgaatgtttgtgttcaactcagtcatgagtataccataagagcagcatcacttggatcatgtgacttcagagttgcgttggcactttcgtgctaccaatagaagagatacgccccggagagacaaccggtatcgattcttttagctaataatcgcgatgaatggcgctatctcgcatcgtccatgtcacctgcgtaatctggtcatgctaggaagatccatagccggatctcgattatcaagttatggtataaacagtattattaaactgaaggcataagttaaaggaagtatgttactttgagctgatgtaggctcttccacttttatctgtattttacttatttggggactttgtattgctagggcttcagaatactaactttgacacagctcccagagaggtttgcaaacttttggtttccctctcaaatccatggtagtagtttcaaatgagtttgtggataatggatgtttagtccttatcatttgctgtgttttgacagtttttaatttgcagtattcactcacgaactgttttattttaggaataatgcaaaaccaaccttcgtccggtgatgagaatagccgtatgataagagaatttgctcatcgtgctttaaatgattaactgttttaccttatttagtatttcatagactttgcatgatatggtacactcctaattatgcattctttggtttccaaatcttaatctaagatactttgttaactgactggtagcctaagaaagagacttttcttcctgtttttctctctccccattttttggggtaagttttgcaaagatcagtgctgcttctcatgactctaaagtaaagctcttttggatagcacagcctaactttacagctagacagaatggccattaagaatatttccaaaatccaagtttatcaaaattattttgtgggaaatcatcaatctattttattaatgttatgtgtttaattttggacttattttgggaaaaactgttcaaattgggtccttttaagcttattttaagcagcctagaaggaagaagctacttagctaatgaaagctgagacactttaataaaagcaggatcttaagagcattgtttttccttaaaaactttatactctcagataatctgcaacaacaaaaattaagaaatccctgacttttgtagaattcccactgtcaaattctcactgacttatgagtgtgagagaagttatcttttgtttgaattctgatagaacagtttaactcctttctaaggatataaaaaattcattggaaagtgtgtatatttcaaagactctcaattatctggactgaaggcactgttctcactatggccagatgaatgggagtattctgtacatgaatcatgctgtattttaaatcaggacatcacttaagtattaatgttgtgtgtacagatttttgttttgggattttttttgcctaaataaatgttataaatttta

SEQ ID NO: 431031 - DNA, 1717 bp, Homo sapiens
  misc_feature (1693)..(1693): n is a, c, g, or t
  misc_feature (1709)..(1709): n is a, c, g, or t
gtttttgtctttacaaattattttcagaaatggctaaaagtgtacagaaaacagtaaatcccttctttactcagaataacttcttaatagttgaagcatccaaaatatgtaaaagcaagggtgggcgtagtggctcttgcctgtaatcccagcattctgggaggccgaggcgggcagatcacttgagatcaggagttcgagaccaccctggccaacgtggtgaaaccccgtctctactaaaaatacaaaaactagctgggcatggtggcttttttgcacgcctgtagtcccagctactcgggaggctgaggcacgatcatacctcactgcagcctcttgggcttatgtgatcttaccccctcagcctctggagtagctggaactacaggctaaatttcctactttgtaaacatcagtagtggccagatacttctgagtcttaaaagcataataggccgggcgcggtggctcacgcctgtaatcccagcactttgggaggccgaggtgggtggatcacaaggtcaggagttcaagaccagcctggcccaaatggtgaaaccctgtctctactaaatatacaaaaattagctgggtgtggtggcgggcacctgtaatcccagctactcaggaggctgaggcaggagaatcgcttgaacctgggaggtggaggttgtggtgagccaatatcatgccactgcactccagcctgggtgacagagtaagactccgtctcaaaaaaaaaaaaagcataataatttattacatcccaaatatataaaaatttgagtgcctttgcagttgggatggttcctaaaattgcgtatagaattaaggcacagaattgtgtgtaaggtcctgaatctggctaaaatacagtggatgtatgtattggaattatgaggcataagtagccagtatctatagttagaatctacaaggcctcctttttgcacctgtagactagaatataactgttattggtgcctttgagtgttatctctcagtggctagaggtgctgtttcaagcacaatttagactagggttgaaccactcattgttcaaatcattggtgggctccaatgtaaaatatcactacatcagtccacaagcaacattaaggaaatctaaaggaaatggaatttgactttttagagtataatgatgttctagggcataatgaggaaaatttttaaaaaatagattataatgatacatattggtatcattaagacaacagatttgagcaaatacaattaaggtgtcttattttttgcatcaagtaattattgctgtggtctttctactccacaaaataattttttctttttgcagttgaaaattaactgcattattaactaattaataaaataaatcaagtggtataagggattagtttaccctcaagccgatgactccatggctactgatattagttagtttaggatttttaaaaagcatatcagacccccagtttcaggaattgagtataaatattgcttcttgtcaccctgggacagtaatgccttatagtggcactagtcaccttaagtagattacacatggttgaggtgaataaagctgcatgggaatttgctttcgtgatatatttcatttgcaaacttctacataatcaagttttatgtttaaaaccatcggttctatatatctagctttagggggattaaactctgncccccggtgtaccaancgcgatgg

SEQ ID NO: 431032 - DNA, 2421 bp, Homo sapiens
  misc_feature (1235)..(1235): n is a, c, g, or t
taatagaatttaaaacatttcacaaaagtcaacacataaataatatcaaccaaaataaagtggtagacagaagagaaaatatactaatttattgttcaaagaggaaaataagtctcaaaggttaaggctattatataaatttatttttaaaaagacataaacctacattttcagaagaagaagttccatgtttccttagattatgtatttagcatccattaatcacagggccaaactaacaacaaaagttgtttagctttcccttacaatccagcttttatgggtgtgcaaacatcacattacagtccctccaaccacaaaccccaacatatagtatttcacttcctgcccaatagtgggtgtccccacacctttcaaccactgtagcaacaaagctctggcctaggcttttcacttgcttctttactgcctgactgactttggtgtttcctcatgtggcctggtgtggcatggcacgccctcttgggagatgaaagtaatcttccataggcaattgtttctgtgtcaccattgctgattaaaacaaatcctaagtacaaatgtcagaacagaaacatgcaaagcaagaaaacattacatcatgaaagtttctttttttttcttttttctttttttttttttttgagacagagttttgctctttttgctcaggctggagtacagtggcgcgatcttggttcaccgcaacctccgcctcctgggttcaagcgtttctcctgcctcagcctcccaagtagctgggattataggcatgtgccaccatggctaattttgtatttttagtagagacggggtttctccatgttggtgaggctggtttttaactcccgaactcaggtgattgcctgcctcggtctcccaaaaagtgccgggattacaggcgtgagccattgtgcccagccaaaagtttctttttcaagagatggtggtcttgccatgttgtccagtatggacttgaactactcagctcaagcagtcctcccacctcagcctcctgaatagctgagactacaggcatgcaccactacacctggctgcgagatgaaattttaagagatgggggtcttgttctgtcgcccaggctggagtgcagtgacatgatcaagccgtgatctcctgggctcaagcaatcctcctacctcagcctcctgagtagctggaactacaggaatgcaacaccatgcccagctaattttgatttttagtagagatgnggtcttcctttgttgcccaagctggtctcaaactccagggcttcctgagtagctgagactacaggtgtgagccaccatgcccagcctcctctcttttccaatattgtgttaagtaaattgtattggtggtaatcaacttgatcatttcatttttaggatagagatatcaaggtgagggtataactgaacgagaagaggaataaacaccaccctgtgattgatggatctttatagctctcctttgataaagaagggaaatatcgtacttacattagcatgttatagttgctgttgttatacagaagaatattaaacaatattcatatattgtttatgaatgcattgaattcataaacaatggtatggatattgactagccaaagaggtggataaatgtagatacaatgatacggtgatttggtattcagtgtccattctgctctcctagtgtgccttcctataatgcaggggctggaaggtgagaaaataaccacatttcccagactccctttgcaggtagatttccagatgtgaattgggttccactgatcagacacccatgtgtgagatttggaatgcagaactgaggagagagccatcttcctcttgcttgtgttctggtggcatgtgtggttgaggagacatttaatttccctgcagcagaattcttgcagtcagttgttgaggcaagtggcgtggtggatgcaaccctgattcttcacctttctcattattgtggggtagcagcgcctctggcaagccagacagacctgcagtgtttttctgggagttaattctggagacccagtatggaacccactcctagcccttgtgacaatattgcaagcatccagttccctgttttacagtccttttaaatgtggctagctacagtagtttgtgtttcctgcaactaatcactcatacatctgtatctaaagcactccacctgggtcatgtactatacttaaaattataaggcaatattaattcacaaaactacctactcgttttatttaaccctcagaagaactgaaaacaaaagctataccaggcttgctctagagcgtgggcttgggaatggaaaggcagagtgcacctattgaattccatcatcagtttttctataccatggagttacttaccatgtgtatacataacactgattaaaaattttaaaaaaaag

SEQ ID NO: 431033 - DNA, 2022 bp, Homo sapiens
taatagaatttaaaacatttcacaaaagtcaacacataaataatatcaaccaaaataaagtggtagacagaagagaaaatatactaatttattgttcaaagaggaaaataagtctcaaaggttaaggctattatataaatttatttttaaaaagacataaacctacattttcagaagaagaagttccatgtttccttagattatgtatttagcatccattaatcacagggccaaactaacaacaaaagttgtttagctttcccttacaatccagcttttatgggtgtgcaaacatcacattacagtccctccaaccacaaaccccaacatatagtatttcacttcctgcccaatagtgggtgtccccacacctttcaaccactgtagcaacaaagctctggcctaggcttttcacttgcttctttactgcctgactgactttggtgtttcctcatgtggcctggtgtggcatggcacgccctcttgggagatgaaagtaatcttccataggcaattgtttctgtgtcaccattgctgattaaaacaaatcctaagtacaaatgtcagaacagaaacatgcaaagcaagaaaacattacatcatgaaagtttctttttttttcttttttctttttttttttttttgagacagagttttgctctttttgctcaggctggagtacagtggcgcgatcttggttcaccgcaacctccgcctcctgggttcaagcgtttctcctgcctcagcctcccaagtagctgggattataggcatgtgccaccatggctaattttgtatttttagtagagacggggtttctccatgttggtgaggctggtttttaactcccgaactcaggtgattgcctgcctcggtctcccaaaaagtgccgggattacaggcgtgaccaccatgcccagcctcctctcttttccaatattgtgttaagtaaattgtattggtggtaatcaacttgatcatttcatttttaggatagagatatcaaggtgagggtataactgaacgagaagaggaataaacaccaccctgtgattgatggatctttatagctctcctttgataaagaagggaaatatcgtacttacattagcatgttatagttgctgttgttatacagaagaatattaaacaatattcatatattgtttatgaatgcattgaattcataaacaatggtatggatattgactagccaaagaggtggataaatgtagatacaatgatacggtgatttggtattcagtgtccattctgctctcctagtgtgccttcctataatgcaggggctggaaggtgagaaaataaccacatttcccagactccctttgcaggtagatttccagatgtgaattgggttccactgatcagacacccatgtgtgagatttggaatgcagaactgaggagagagccatcttcctcttgcttgtgttctggtggcatgtgtggttgaggagacatttaatttccctgcagcagaattcttgcagtcagttgttgaggcaagtggcgtggtggatgcaaccctgattcttcacctttctcattattgtggggtagcagcgcctctggcaagccagacagacctgcagtgtttttctgggagttaattctggagacccagtatggaacccactcctagcccttgtgacaatattgcaagcatccagttccctgttttacagtccttttaaatgtggctagctacagtagtttgtgtttcctgcaactaatcactcatacatctgtatctaaagcactccacctgggtcatgtactatacttaaaattataaggcaatattaattcacaaaactacctactcgttttatttaaccctcagaagaactgaaaacaaaagctataccaggcttgctctagagcgtgggcttgggaatggaaaggcagagtgcacctattgaattccatcatcagtttttctataccatggagttacttaccatgtgtatacataacactgattaaaaattttaaaaaaaag

SEQ ID NO: 431034 - DNA, 1773 bp, Homo sapiens
ggccccctccgggggggggaggcccgggaccgggacccgtagcgaattctcctaactccctcgacctctcctctcgcccggcccgagtgtgaggagaagggcccggcccggcctgcgtcgtgtgtgaggaggaccccgggcgggcccacgggccgtgtggggcctggtctggcccgccgggtgtgtgaagaccggggcccggtgctgcccggccggagggcgagcggaggggaggggcctggtccggcccggccggtgcgtgaggactggggcccgggcccggcgccgccgccgccgccgccgccgcgatggcccagcagcagatgaccagctcgcagaaggccctgatgctcgagctgaaatccctgcaggaggaaccggtggagggcttccggatcaccctggtggacgagtccgacctctacaactgggaggtggccatcttcggaccccccaacaccctctacgaaggcggctacttcaaggcgcatattaaatttcctattgactacccctattcaccacctaccttcagattcttgaccaaaatgtggcaccccaacatttatgagaatggagatgtatgcatttcgattcttcatccgcctgtagatgacccacagagtggagaactgccttctgaaaggtggaatcctactcagaatgtgaggactatcctattaagtgtaatctcactgcttaatgagcccaacaccttctccccagccaatgtcgatgcttcagttatgttcaggaaatggagagacagtaaaggaaaagacaaagaatatgctgaaattattaggaaacaagtttcagccactaaggccgaagcagaaaaggatggagtgaaggtccccacaaccctggcggaatactgcatcaaaactaaagtgccttccaatgacaacagctcagatttgctttacgacgacttgtatgatgacgacattgatgatgaagatgaggaggaggaagatgccgactgttatgatgatgatgattctgggaatgaggagtcgtgacgtgctccttcagtgcccctgtactgccctgccatctcaggccaaagggaggggagcaagtggggacctggccatggcccctcagcaaaaacctattcacagcgggtggggaaacacacacagctccctgctgactccccttatggatctcagtttgctcctttttatggacctttaatggagagagagtaaccctccacagaatgtctgaattcttgcattctttacccttccatcactatattgattctttttttaaaaaacatgaacccaaactcccgcctcacttcgtctctacagaatgttcacagcaaaacacgtttggtctgtttttagattcttgaagaattcaatagtctttcaagatgtttaatgtgtttaaagctgggaacctgttgggagttcacaagtgctgcatatactgggtagcaaaagaaaatggaaaaaaacccacaaaacaaactttaaaaaaaaaaaaaaacaaatttgccaaggtttagctgctcatttacattagtgtgtgtgcattcgttcagccccatggtggtgaattctgtttctttcctttcctaaggctgggacatggtgggcatcagggactttgtgctaagcctgatgaaatgtgctccttcaatctccatgaaaccatcgtaacatggaggcctcagctgctctgaggagagaaatcagactttgttttttgaaatcgattgggatcgaaagcctgaaataaatattcatactttcc

SEQ ID NO: 431035 - DNA, 4193 bp, Homo sapiens
ggccccctccgggggggggaggcccgggaccgggacccgtagcgaattctcctaactccctcgacctctcctctcgcccggcccgagtgtgaggagaagggcccggcccggcctgcgtcgtgtgtgaggaggaccccgggcgggcccacgggccgtgtggggcctggtctggcccgccgggtgtgtgaagaccggggcccggtgctgcccggccggagggcgagcggaggggaggggcctggtccggcccggccggtgcgtgaggactggggcccgggcccggcgccgccgccgccgccgccgccgcgatggcccagcagcagatgaccagctcgcagaaggccctgatgctcgagctgaaatccctgcaggaggaaccggtggagggcttccggatcaccctggtggacgagtccgacctctacaactgggaggtggccatcttcggaccccccaacaccctctacgaaggcggctacttcaaggcgcatattaaatttcctattgactacccctattcaccacctaccttcagattcttgaccaaaatgtggcaccccaacatttatgagaatggagatgtatgcatttcgattcttcatccgcctgtagatgacccacagagtggagaactgccttctgaaaggtggaatcctactcagaatgtgaggactatcctattaagtgtaatctcactgcttaatgagcccaacaccttctccccagccaatgtcgatgcttcagttatgttcaggaaatggagagacagtaaaggaaaagacaaagaatatgctgaaattattaggaaacaagtttcagccactaaggccgaagcagaaaaggatggagtgaaggtccccacaaccctggcggaatactgcatcaaaactaaagtgccttccaatgacaacagctcagatttgctttacgacgacttgtatgatgacgacattgatgatgaagatgaggaggaggaagatgccgactgttatgatgatgatgattctgggaatgaggagtcgtgacgtgctccttcagtgcccctgtactgccctgccatctcaggccaaagggaggggagcaagtggggacctggccatggcccctcagcaaaaacctattcacagcgggtggggaaacacacacagctccctgctgactccccttatggatctcagtttgctcctttttatggacctttaatggagagagagtaaccctccacagaatgtctgaattcttgcattctttacccttccatcactatattgattctttttttaaaaaacatgaacccaaactcccgcctcacttcgtctctacagaatgttcacagcaaaacacgtttggtctgtttttagattcttgaagaattcaatagtctttcaagatgtttaatgtgtttaaagctgggaacctgttgggagttcacaagtgctgcatatactgggtagcaaaagaaaatggaaaaaaacccacaaaacaaactttaaaaaaaaaaaaaaacaaatttgccaaggtttagctgctcatttacattagtgtgtgtgcattcgttcagccccatggtggtgaattctgtttctttcctttcctaaggctgggacatggtgggcatcagggactttgtgctaagcctgatgaaatgtgctccttcaatctccatgaaaccatcgtaacatggaggcctcagctgctctgaggagagaaatcagactttgttttttgaaatcgattgggatcgaaagcctgaaataaatattcatactttccatagaactgagcacttggttgctatttattttaaaggcagggttatttccccccagggagtggggcaagcggggaagttgggatgagtgcgtgtgggagcaaagagttaaaaatcactatgctaagtttggttgatgctactggggggaaaaagttgaaactactggtgaccactgttgggagaggaaacatctgttttatagatttagcatggccttcccatcaaaaatacactcgtaccatgacgttttgtttttgttttttaagtagccacttttaattactcagtattaatcctaggtgcatgtgttaagatttcggttttcatcgagctgcttatactgatagtgaaaaacttggatgtgtgtgagacgagttaccgccttcttcattggatgtgatctgaactttttttctcctttcaacatacttaggctgtggagtgcaagcagaattatgcatagaaattgtggcagggctgagggagttgactgcaggcagtttttaggccagataaggctagatcttcctgcaatgcacttgctgcagctttgattttccagatctcaatcgtgttgcttcaatcaatattgagatccagcagccttcaccatccaggagacttcagaacttgaaggtaatttttggttgttatgggggtgcaccagatcataggagggcattatttggaggaaaccgctataatgtaaaatcagatttcagaaggaaaatgcagcaaggactgactgtagtcctatttcagacccctgggcactagtgtcaactcctcctttggctcgtaactcagaaagaaccaaagggcagattagggacggggcaggagggatcctaggatggccagagtaggtgacgcttacttccttagctcctccttccattctgatctcagggttttcactcttcaaactcccaaacacatgacttcttcccagcagcccttcccggcctctaaagtttggtcccagcagcccttcccagcctctaaagtttggtctggtatgaaatgggactgtttaacaagcaaggctcttaggggacactgttgagcctggtcccagaatctgtgatctccacagggccagggttgctacttgcacccagaatctagtgattttagtcagatccatggaacagagcagcttcgtaatacattgtcaagttacctgattacaaactctcatagatgttggaactacctttttactccccatactttgtaagtaatgcttccagattaacctgcaaatcttgtggagccaaagcctctcacagtgctgatttacctcccccaaaatgcccccaaacccccatgcaagtttacagccagtagcttggtcttattctcttggagccctaaaattaagcctttcattcccctttgctaaagcatctcactcccagggcagccccagcaccctggcattgcgggaggtgctctgctgcacagctgttccatcaggccctattggcctctgttagacattgactcagggagccggagcgccaagtggaggttgtacctttcagccctttggggtgttaaaagtgtcaagggctgggtttgcctctgatgagtacaatcagttccagaagactgggtaagtctcttgctagcaggtggacattctggtattttagactgactgaacgaaacccagaggctggttccagagctctgtccctgagaacacatccctgtggaaaatacttgagtttgtaattttttttcccccttctgggagtggaggtctcaggctcaatccggaaccatgtacgtacagttttgcttattatttgatgtgacatgaactcaaaatcctgcatttttagattccttttagttctaattgaggcctcactagatgctcttcagttctgtgtattttgaggctgggtggagaagtatatgattctgctgttgattctttcagtcttccccccttctccttttatcaatcattccagagttattttctattagtcaaacttttttgtagaaccttctttcccttaccctggcaaattgcttctttacttgctggtttccttacgtttggggcacatgttgtaagaaactgattggaaggggaaatgtgcagctctccactggaaaggaactctccacccctcccatcctgataaaacaaacaaggtttacatttacaactaaaaggattcagatgcaattttcaactattctgaaaccagcaggacacacctgactttaatagttttagctgaaattgtagatgttttgcttcagtttaacttatgagaaaagattatctgacggattttgtgttgacttcccctttagtggtttattttgtctttttctgcccatctgtctactaataaaatgtgaaataaaatacctgtattgctacttccccatgaaa

SEQ ID NO: 431036 - DNA, 4261 bp, Homo sapiens
ggccccctccgggggggggaggcccgggaccgggacccgtagcgaattctcctaactccctcgacctctcctctcgcccggcccgagtgtgaggagaagggcccggcccggcctgcgtcgtgtgtgaggaggaccccgggcgggcccacgggccgtgtggggcctggtctggcccgccgggtgtgtgaagaccggggcccggtgctgcccggccggagggcgagcggaggggaggggcctggtccggcccggccggtgcgtgaggactggggcccgggcccggcgccgccgccgccgccgccgccgcgatggcccagcagcagatgaccagctcgcagaaggccctgatgctcgagctgaaatccctgcaggaggaaccggtggagggcttccggatcaccctggtggacgagtccgacctctacaactgggaggtggccatcttcggaccccccaacaccctctacgaaggcggctacttcaaggcgcatattaaatttcctattgactacccctattcaccacctaccttcagattcttgaccaaaatgtggcaccccaacatttatgagaatggagatgtatgcatttcgattcttcatccgcctgtagatgacccacagagtggagaactgccttctgaaaggtggaatcctactcagaatgtgaggactatcctattaagtgtaatctcactgcttaatgagcccaacaccttctccccagccaatgtcgatgcttcagttatgttcaggaaatggagagacagtaaaggaaaagacaaagaatatgctgaaattattaggaaacaagtttcagccactaaggccgaagcagaaaaggatggagtgaaggtccccacaaccctggcggaatactgcatcaaaactaaagtgccttccaatgacaacagctcagatttgctttacgacgacttgtatgatgacgacattgatgatgaagatgaggaggaggaagatgccgactgttatgatgatgatgattctgggaatgaggagtcgtgacgtgctccttcagtgcccctgtactgccctgccatctcaggccaaagggaggggagcaagtggggacctggccatggcccctcagcaaaaacctattcacagcgggtggggaaacacacacagctccctgctgactccccttatggatctcagtttgctcctttttatggacctttaatggagagagagtaaccctccacagaatgtctgaattcttgcattctttacccttccatcactatattgattctttttttaaaaaacatgaacccaaactcccgcctcacttcgtctctacagaatgttcacagcaaaacacgtttggtctgtttttagattcttgaagaattcaatagtctttcaagatgtttaatgtgtttaaagctgggaacctgttgggagttcacaagtgctgcatatactgggtagcaaaagaaaatggaaaaaaacccacaaaacaaactttaaaaaaaaaaaaaaacaaatttgccaaggtttagctgctcatttacattagtgtgtgtgcattcgttcagccccatggtggtgaattctgtttctttcctttcctaaggctgggacatggtgggcatcagggactttgtgctaagcctgatgaaatgtgctccttcaatctccatgaaaccatcgtaacatggaggcctcagctgctctgaggagagaaatcagactttgttttttgaaatcgattgggatcgaaagcctgaaataaatattcatactttccatagaactgagcacttggttgctatttattttaaaggcagggttatttccccccagggagtggggcaagcggggaagttgggatgagtgcgtgtgggagcaaagagttaaaaatcactatgctaagtttggttgatgctactggggggaaaaagttgaaactactggtgaccactgttgggagaggaaacatctgttttatagatttagcatggccttcccatcaaaaatacactcgtaccatgacgttttgtttttgttttttaagtagccacttttaattactcagtattaatcctaggtgcatgtgttaagatttcggttttcatcgagctgcttatactgatagtgaaaaacttggatgtgtgtgagacgagttaccgccttcttcattggatgtgatctgaactttttttctcctttcaacatacttaggctgtggagtgcaagcagaattatgcatagaaattgtggcagggctgagggagttgactgcaggcagtttttaggccagataaggctagatcttcctgcaatgcacttgctgcagctttgattttccagatctcaatcgtgttgcttcaatcaatattgagatccagcagccttcaccatccaggagacttcagaacttgaaggtaatttttggttgttatgggggtgcaccagatcataggagggcattatttggaggaaaccgctataatgtaaaatcagatttcagaaggaaaatgcagcaaggactgactgtagtcctatttcagacccctgggcactagtgtcaactcctcctttggctcgtaactcagaaagaaccaaagggcagattagggacggggcaggagggatcctaggatggccagagtaggtgacgcttacttccttagctcctccttccattctgatctcagggttttcactcttcaaactcccaaacacatgacttcttcccagcagcccttcccggcctctaaagtttggtcccagcagcccttcccagcctctaaagtttggtctggtatgaaatgggactgtttaacaagcaaggctcttaggggacactgttgagcctggtcccagaatctgtgatctccacagggccagggttgctacttgcacccagaatctagtgattttagtcagatccatggaacagagcagcttcgtaatacattgtcaagttacctgattacaaactctcatagatgttggaactacctttttactccccatactttgtaagtaatgcttccagattaacctgcaaatcttgtggagccaaagcctctcacagtgctgatttacctcccccaaaatgcccccaaacccccatgcaagtttacagccagtagcttggtcttattctcttggagccctaaaattaagcctttcattcccctttgctaaagcatctcactcccagggcagccccagcaccctggcattgcgggaggtgctctgctgcacagctgttccatcaggccctattggcctctgttagacattgactcagggagccggagcgccaagtggaggttgtacctttcagccctttggggtgttaaaagtgtcaagggctgggtttgcctctgatgagtacaatcagttccagaagactgggtaagtctcttgctagcaggtggacattctggtattttagactgactgaacgaaacccagaggctggttccagagctctgtccctgagaacacatccctgtggaaaatacttgagtttgtaattttttttcccccttctgggagtggaggtctcaggctcaatccggaaccatgtacgtacagttttgcttattatttgatgtgacatgaactcaaaatcctgcatttttagattccttttagttctaattgaggcctcactagatgctcttcagttctgtgtattttgaggctgggtggagaagtatatgattctgctgttgattctttcagtcttccccccttctccttttatcaatcattccagagttattttctattagtcaaacttttttgtagaaccttctttcccttaccctggcaaattgcttctttacttgctggtttccttacgtttggggcacatgttgtaagaaactgattggaaggggaaatgtgcagctctccactggaaaggaactctccacccctcccatcctgataaaacaaacaaggtttacatttacaactaaaaggattcagatgcaattttcaactattctgaaaccagcaggacacacctgactttaatagttttagctgaaattgtagatgttttgcttcagtttaacttatgagaaaagattatctgacggattttgtgttgacttcccctttagtggtttattttgtctttttctgcccatctgtctactaataaaatgtgaaataaaatacctgtattgctacttccccatgaaaaaaatccgtcagataatcttttctcataagttaaactgaagcaaaacatctacaatttcagctaaaac

SEQ ID NO: 431037 - DNA, 1984 bp, Homo sapiens
ggccccctccgggggggggaggcccgggaccgggacccgtagcgaattctcctaactccctcgacctctcctctcgcccggcccgagtgtgaggagaagggcccggcccggcctgcgtcgtgtgtgaggaggaccccgggcgggcccacgggccgtgtggggcctggtctggcccgccgggtgtgtgaagaccggggcccggtgctgcccggccggagggcgagcggaggggaggggcctggtccggcccggccggtgcgtgaggactggggcccgggcccggcgccgccgccgccgccgccgccgcgatggcccagcagcagatgaccagctcgcagaaggccctgatgctcgagctgaaatccctgcaggaggaaccggtggagggcttccggatcaccctggtggacgagtccgacctctacaactgggaggtggccatcttcggaccccccaacaccctctacgaaggcggctacttcaaggcgcatattaaatttcctattgactacccctattcaccacctaccttcagattcttgaccaaaatgtggcaccccaacatttatgagaatggagatgtatgcatttcgattcttcatccgcctgtagatgacccacagagtggagaactgccttctgaaaggtggaatcctactcagaatgtgaggactatcctattaagtgtaatctcactgcttaatgagcccaacaccttctccccagccaatgtcgatgcttcagttatgttcaggaaatggagagacagtaaaggaaaagacaaagaatatgctgaaattattaggaaacaagtttcagccactaaggccgaagcagaaaaggatggagtgaaggtccccacaaccctggcggaatactgcatcaaaactaaagtgccttccaatgacaacagctcagatttgctttacgacgacttgtatgatgacgacattgatgatgaagatgaggaggaggaagatgccgactgttatgatgatgatgattctgggaatgaggagtcgtgacgtgctccttcagtgcccctgtactgccctgccatctcaggccaaagggaggggagcaagtggggacctggccatggcccctcagcaaaaacctattcacagcgggtggggaaacacacacagctccctgctgactccccttatggatctcagtttgctcctttttatggacctttaatggagagagagtaaccctccacagaatgtctgaattcttgcattctttacccttccatcactatattgattctttttttaaaaaacatgaacccaaactcccgcctcacttcgtctctacagaatgttcacagcaaaacacgtttggtctgtttttagattcttgaagaattcaatagtctttcaagatgtttaatgtgtttaaagctgggaacctgttgggagttcacaagtgctgcatatactgggtagcaaaagaaaatggaaaaaaacccacaaaacaaactttaaaaaaaaaaaaaaacaaatttgccaaggtttagctgctcatttacattagtgtgtgtgcattcgttcagccccatggtggtgaattctgtttctttcctttcctaaggctgggacatggtgggcatcagggactttgtgctaagcctgatgaaatgtgctccttcaatctccatgaaaccatcgtaacatggaggcctcagctgctctgaggagagaaatcagactttgttttttgaaatcgattgggatcgaaagcctgaaataaatattcatactttcccataaaaaaaaacacacacacgacacaacacactccacatcactgacacacaacagcaccccgcaccaacccaccacccacacgacacataaacacacgcgcggggcgccctacaatatcccccacgcgcaactcacgcgacccgcctcgttagacacccccacacacgcctcaacacccggccccggccccaaccgccacgagagcctct

SEQ ID NO: 431038 - DNA, 3533 bp, Homo sapiens
tacagggtatctgtcagatgctttcaggcaggtactgaagtttggagagctgagtcataagtaatattgattatttaaggccaattataaatctgtcttaaaaaaagacttaccgtaaaccatttctgtgtcaacctcccttcaggaaacaagtttcagccactaaggccgaagcagaaaaggatggagtgaaggtccccacaaccctggcggaatactgcatcaaaactaaagtgccttccaatgacaacagctcagatttgctttacgacgacttgtatgatgacgacattgatgatgaagatgaggaggaggaagatgccgactgttatgatgatgatgattctgggaatgaggagtcgtgacgtgctccttcagtgcccctgtactgccctgccatctcaggccaaagggaggggagcaagtggggacctggccatggcccctcagcaaaaacctattcacagcgggtggggaaacacacacagctccctgctgactccccttatggatctcagtttgctcctttttatggacctttaatggagagagagtaaccctccacagaatgtctgaattcttgcattctttacccttccatcactatattgattctttttttaaaaaacatgaacccaaactcccgcctcacttcgtctctacagaatgttcacagcaaaacacgtttggtctgtttttagattcttgaagaattcaatagtctttcaagatgtttaatgtgtttaaagctgggaacctgttgggagttcacaagtgctgcatatactgggtagcaaaagaaaatggaaaaaaacccacaaaacaaactttaaaaaaaaaaaaaaacaaatttgccaaggtttagctgctcatttacattagtgtgtgtgcattcgttcagccccatggtggtgaattctgtttctttcctttcctaaggctgggacatggtgggcatcagggactttgtgctaagcctgatgaaatgtgctccttcaatctccatgaaaccatcgtaacatggaggcctcagctgctctgaggagagaaatcagactttgttttttgaaatcgattgggatcgaaagcctgaaataaatattcatactttccatagaactgagcacttggttgctatttattttaaaggcagggttatttccccccagggagtggggcaagcggggaagttgggatgagtgcgtgtgggagcaaagagttaaaaatcactatgctaagtttggttgatgctactggggggaaaaagttgaaactactggtgaccactgttgggagaggaaacatctgttttatagatttagcatggccttcccatcaaaaatacactcgtaccatgacgttttgtttttgttttttaagtagccacttttaattactcagtattaatcctaggtgcatgtgttaagatttcggttttcatcgagctgcttatactgatagtgaaaaacttggatgtgtgtgagacgagttaccgccttcttcattggatgtgatctgaactttttttctcctttcaacatacttaggctgtggagtgcaagcagaattatgcatagaaattgtggcagggctgagggagttgactgcaggcagtttttaggccagataaggctagatcttcctgcaatgcacttgctgcagctttgattttccagatctcaatcgtgttgcttcaatcaatattgagatccagcagccttcaccatccaggagacttcagaacttgaaggtaatttttggttgttatgggggtgcaccagatcataggagggcattatttggaggaaaccgctataatgtaaaatcagatttcagaaggaaaatgcagcaaggactgactgtagtcctatttcagacccctgggcactagtgtcaactcctcctttggctcgtaactcagaaagaaccaaagggcagattagggacggggcaggagggatcctaggatggccagagtaggtgacgcttacttccttagctcctccttccattctgatctcagggttttcactcttcaaactcccaaacacatgacttcttcccagcagcccttcccggcctctaaagtttggtcccagcagcccttcccagcctctaaagtttggtctggtatgaaatgggactgtttaacaagcaaggctcttaggggacactgttgagcctggtcccagaatctgtgatctccacagggccagggttgctacttgcacccagaatctagtgattttagtcagatccatggaacagagcagcttcgtaatacattgtcaagttacctgattacaaactctcatagatgttggaactacctttttactccccatactttgtaagtaatgcttccagattaacctgcaaatcttgtggagccaaagcctctcacagtgctgatttacctcccccaaaatgcccccaaacccccatgcaagtttacagccagtagcttggtcttattctcttggagccctaaaattaagcctttcattcccctttgctaaagcatctcactcccagggcagccccagcaccctggcattgcgggaggtgctctgctgcacagctgttccatcaggccctattggcctctgttagacattgactcagggagccggagcgccaagtggaggttgtacctttcagccctttggggtgttaaaagtgtcaagggctgggtttgcctctgatgagtacaatcagttccagaagactgggtaagtctcttgctagcaggtggacattctggtattttagactgactgaacgaaacccagaggctggttccagagctctgtccctgagaacacatccctgtggaaaatacttgagtttgtaattttttttcccccttctgggagtggaggtctcaggctcaatccggaaccatgtacgtacagttttgcttattatttgatgtgacatgaactcaaaatcctgcatttttagattccttttagttctaattgaggcctcactagatgctcttcagttctgtgtattttgaggctgggtggagaagtatatgattctgctgttgattctttcagtcttccccccttctccttttatcaatcattccagagttattttctattagtcaaacttttttgtagaaccttctttcccttaccctggcaaattgcttctttacttgctggtttccttacgtttggggcacatgttgtaagaaactgattggaaggggaaatgtgcagctctccactggaaaggaactctccacccctcccatcctgataaaacaaacaaggtttacatttacaactaaaaggattcagatgcaattttcaactattctgaaaccagcaggacacacctgactttaatagttttagctgaaattgtagatgttttgcttcagtttaacttatgagaaaagattatctgacggattttgtgttgacttcccctttagtggtttattttgtctttttctgcccatctgtctactaataaaatgtgaaataaaatacctgtattgctacttccccatgaaa

SEQ ID NO: 431039 - DNA, 1698 bp, Homo sapiens
  misc_feature (1589)..(1589): n is a, c, g, or t
ggccccctccgggggggggaggcccgggaccgggacccgtagcgaattctcctaactccctcgacctctcctctcgcccggcccgagtgtgaggagaagggcccggcccggcctgcgtcgtgtgtgaggaggaccccgggcgggcccacgggccgtgtggggcctggtctggcccgccgggtgtgtgaagaccggggcccggtgctgcccggccggagggcgagcggaggggaggggcctggtccggcccggccggtgcgtgaggactggggcccgggcccggcgccgccgccgccgccgccgccgcgatggcccagcagcagatgaccagctcgcagaaggccctgatgctcgagctgaaatccctgcaggaggaaccggtggagggcttccggatcaccctggtggacgagtccgacctctacaactgggaggtggccatcttcggaccccccaacaccctctacgaaggcggctacttcaaggcgcatattaaatttcctattgactacccctattcaccacctaccttcagattcttgaccaaaatgtggcaccccaacatttatgagaatggagatgtatgcatttcgattcttcatccgcctgtagatgacccacagagtggagaactgccttctgaaaggtggaatcctactcagaatgtgaggactatcctattaagtgtaatctcactgcttaatgagcccaacaccttctccccagccaatgtcgatgcttcagttatgttcaggaaatggagagacagtaaaggaaaagacaaagaatatgctgaaattattaggaaacaagtttcagccactaaggccgaagcagaaaaggatggagtgaaggtccccacaaccctggcggaatactgcatcaaaactaaagtgccttccaatgacaacagctcagatttgctttacgacgacttgtatgatgacgacattgatgatgaagatgaggaggaggaagatgccgactgttatgatgatgatgattctgggaatgaggagtcgtgacgtgctccttcagtgcccctgtactgccctgccatctcaggccaaagggaggggagcaagtggggacctggccatggcccctcagcaaaaacctattcacagcgggtggggaaacacacacagctccctgctgactccccttatggatctcagtttgctcctttttatggacctttaatggagagagagtaaccctccacagaatgtctgaattcttgcattctttacccttccatcactatattgattctttttttaaaaaacatgaacccaaactcccgcctcacttcgtctctacagaatgttcacagcaaaacacgtttggtctgtttttagattcttgaagaattcaatagtctttcaagatgtttaatgtgtttaaagctgggaacctgttgggagttcacaagtgctgcatatactgggtagcaaaagaaaatggaaaaaaacccacaaaacaaactttaaaaatataaaatgctgcagctgctttggaaaagtctggcagttcctcaaaaaattaaacagttacctcatgacccggcaattctactcgagaattgnaaagatgttaatataaaatgtatacaaaaatgttcacagcagcattattcttataaagccacggagtggagacaacccaaatgtccatgaacagatggacaaaaaaaaa

SEQ ID NO: 431040 - DNA, 4106 bp, Homo sapiens
ggccccctccgggggggggaggcccgggaccgggacccgtagcgaattctcctaactccctcgacctctcctctcgcccggcccgagtgtgaggagaagggcccggcccggcctgcgtcgtgtgtgaggaggaccccgggcgggcccacgggccgtgtggggcctggtctggcccgccgggtgtgtgaagaccggggcccggtgctgcccggccggagggcgagcggaggggaggggcctggtccggcccggccggtgcgtgaggactggggcccgggcccggcgccgccgccgccgccgccgccgcgatggcccagcagcagatgaccagctcgcagaaggccctgatgctcgagctgaaatccctgcaggaggaaccggtggagggcttccggatcaccctggtggacgagtccgacctctacaactgggaggtggccatcttcggaccccccaacaccctctacgaaggcggctacttcaagaatggagatgtatgcatttcgattcttcatccgcctgtagatgacccacagagtggagaactgccttctgaaaggtggaatcctactcagaatgtgaggactatcctattaagtgtaatctcactgcttaatgagcccaacaccttctccccagccaatgtcgatgcttcagttatgttcaggaaatggagagacagtaaaggaaaagacaaagaatatgctgaaattattaggaaacaagtttcagccactaaggccgaagcagaaaaggatggagtgaaggtccccacaaccctggcggaatactgcatcaaaactaaagtgccttccaatgacaacagctcagatttgctttacgacgacttgtatgatgacgacattgatgatgaagatgaggaggaggaagatgccgactgttatgatgatgatgattctgggaatgaggagtcgtgacgtgctccttcagtgcccctgtactgccctgccatctcaggccaaagggaggggagcaagtggggacctggccatggcccctcagcaaaaacctattcacagcgggtggggaaacacacacagctccctgctgactccccttatggatctcagtttgctcctttttatggacctttaatggagagagagtaaccctccacagaatgtctgaattcttgcattctttacccttccatcactatattgattctttttttaaaaaacatgaacccaaactcccgcctcacttcgtctctacagaatgttcacagcaaaacacgtttggtctgtttttagattcttgaagaattcaatagtctttcaagatgtttaatgtgtttaaagctgggaacctgttgggagttcacaagtgctgcatatactgggtagcaaaagaaaatggaaaaaaacccacaaaacaaactttaaaaaaaaaaaaaaacaaatttgccaaggtttagctgctcatttacattagtgtgtgtgcattcgttcagccccatggtggtgaattctgtttctttcctttcctaaggctgggacatggtgggcatcagggactttgtgctaagcctgatgaaatgtgctccttcaatctccatgaaaccatcgtaacatggaggcctcagctgctctgaggagagaaatcagactttgttttttgaaatcgattgggatcgaaagcctgaaataaatattcatactttccatagaactgagcacttggttgctatttattttaaaggcagggttatttccccccagggagtggggcaagcggggaagttgggatgagtgcgtgtgggagcaaagagttaaaaatcactatgctaagtttggttgatgctactggggggaaaaagttgaaactactggtgaccactgttgggagaggaaacatctgttttatagatttagcatggccttcccatcaaaaatacactcgtaccatgacgttttgtttttgttttttaagtagccacttttaattactcagtattaatcctaggtgcatgtgttaagatttcggttttcatcgagctgcttatactgatagtgaaaaacttggatgtgtgtgagacgagttaccgccttcttcattggatgtgatctgaactttttttctcctttcaacatacttaggctgtggagtgcaagcagaattatgcatagaaattgtggcagggctgagggagttgactgcaggcagtttttaggccagataaggctagatcttcctgcaatgcacttgctgcagctttgattttccagatctcaatcgtgttgcttcaatcaatattgagatccagcagccttcaccatccaggagacttcagaacttgaaggtaatttttggttgttatgggggtgcaccagatcataggagggcattatttggaggaaaccgctataatgtaaaatcagatttcagaaggaaaatgcagcaaggactgactgtagtcctatttcagacccctgggcactagtgtcaactcctcctttggctcgtaactcagaaagaaccaaagggcagattagggacggggcaggagggatcctaggatggccagagtaggtgacgcttacttccttagctcctccttccattctgatctcagggttttcactcttcaaactcccaaacacatgacttcttcccagcagcccttcccggcctctaaagtttggtcccagcagcccttcccagcctctaaagtttggtctggtatgaaatgggactgtttaacaagcaaggctcttaggggacactgttgagcctggtcccagaatctgtgatctccacagggccagggttgctacttgcacccagaatctagtgattttagtcagatccatggaacagagcagcttcgtaatacattgtcaagttacctgattacaaactctcatagatgttggaactacctttttactccccatactttgtaagtaatgcttccagattaacctgcaaatcttgtggagccaaagcctctcacagtgctgatttacctcccccaaaatgcccccaaacccccatgcaagtttacagccagtagcttggtcttattctcttggagccctaaaattaagcctttcattcccctttgctaaagcatctcactcccagggcagccccagcaccctggcattgcgggaggtgctctgctgcacagctgttccatcaggccctattggcctctgttagacattgactcagggagccggagcgccaagtggaggttgtacctttcagccctttggggtgttaaaagtgtcaagggctgggtttgcctctgatgagtacaatcagttccagaagactgggtaagtctcttgctagcaggtggacattctggtattttagactgactgaacgaaacccagaggctggttccagagctctgtccctgagaacacatccctgtggaaaatacttgagtttgtaattttttttcccccttctgggagtggaggtctcaggctcaatccggaaccatgtacgtacagttttgcttattatttgatgtgacatgaactcaaaatcctgcatttttagattccttttagttctaattgaggcctcactagatgctcttcagttctgtgtattttgaggctgggtggagaagtatatgattctgctgttgattctttcagtcttccccccttctccttttatcaatcattccagagttattttctattagtcaaacttttttgtagaaccttctttcccttaccctggcaaattgcttctttacttgctggtttccttacgtttggggcacatgttgtaagaaactgattggaaggggaaatgtgcagctctccactggaaaggaactctccacccctcccatcctgataaaacaaacaaggtttacatttacaactaaaaggattcagatgcaattttcaactattctgaaaccagcaggacacacctgactttaatagttttagctgaaattgtagatgttttgcttcagtttaacttatgagaaaagattatctgacggattttgtgttgacttcccctttagtggtttattttgtctttttctgcccatctgtctactaataaaatgtgaaataaaatacctgtattgctacttccccatgaaa

SEQ ID NO: 431041 - DNA, 4405 bp, Homo sapiens
  misc_feature (1470)..(1470): n is a, c, g, or t
  misc_feature (1474)..(1474): n is a, c, g, or t
  misc_feature (1479)..(1479): n is a, c, g, or t
  misc_feature (1481)..(1481): n is a, c, g, or t
ggccccctccgggggggggaggcccgggaccgggacccgtagcgaattctcctaactccctcgacctctcctctcgcccggcccgagtgtgaggagaagggcccggcccggcctgcgtcgtgtgtgaggaggaccccgggcgggcccacgggccgtgtggggcctggtctggcccgccgggtgtgtgaagaccggggcccggtgctgcccggccggagggcgagcggaggggaggggcctggtccggcccggccggtgcgtgaggactggggcccgggcccggcgccgccgccgccgccgccgccgcgatggcccagcagcagatgaccagctcgcagaaggccctgatgctcgagctgaaatccctgcaggaggaaccggtggagggcttccggatcaccctggtggacgagtccgacctctacaactgggaggtggccatcttcggaccccccaacaccctctacgaaggcggctacttcaaggcgcatattaaatttcctattgactacccctattcaccacctaccttcagattcttgaccaaaatgtggcaccccaacatttatgagaatggagatgtatgcatttcgattcttcatccgcctgtagatgacccacagagtggagaactgccttctgaaaggtggaatcctactcagaatgtgaggactatcctattaagtgtaatctcactgcttaatgagcccaacaccttctccccagccaatgtcgatgcttcagttatgttcaggaaatggagagacagtaaaggaaaagacaaagaatatgctgaaattattaggaaacaagtttcagccactaaggccgaagcagaaaaggatggagtgaaggtccccacaaccctggcggaatactgcatcaaaactaaagtgccttccaatgacaacagctcagatttgctttacgacgacttgtatgatgacgacattgatgatgaagatgaggaggaggaagatgccgactgttatgatgatgatgattctgggaatgaggagtcgtgacgtgctccttcagtgcccctgtactgccctgccatctcaggccaaagggaggggagcaagtggggacctggccatggcccctcagcaaaaacctattcacagcgggtggggaaacacacacagctccctgctgactccccttatggatctcagtttgctcctttttatggacctttaatggagagagagtaaccctccacagaatgtctgaattcttgcattctttacccttccatcactatattgattctttttttaaaaaacatgaacccaaactcccgcctcacttcgtctctacagaatgttcacagcaaaacacgtttggtctgtttttagattcttgaagaattcaatagtctttcaagatgtttaatgtgtttaaagctgggaacctgttgggagttcacaagtgctgcatatactgggtagcaaaagaaaatggaanaaanccacnanacaaactttaaaaaatatgaacccaaactcccgcctcacttcgtctctacagaatgttcacagcaaaacacgtttggtctgtttttagattcttgaagaattcaatagtctttcaagatgtttaactgtgtttaaagctgggaacctgttgggagttcacaagtgctgcatattactggggtagcaaaagaaccatggcaaaaaacccacaaaacaaactttaaaaaaaaaaaaaaacaaatttgccaaggtttagctgctcatttacattagtgtgtgtgcattcgttcagccccatggtggtgaattctgtttctttcctttcctaaggctgggacatggtgggcatcagggactttgtgctaagcctgatgaaatgtgctccttcaatctccatgaaaccatcgtaacatggaggcctcagctgctctgaggagagaaatcagactttgttttttgaaatcgattgggatcgaaagcctgaaataaatattcatactttccatagaactgagcacttggttgctatttattttaaaggcagggttatttccccccagggagtggggcaagcggggaagttgggatgagtgcgtgtgggagcaaagagttaaaaatcactatgctaagtttggttgatgctactggggggaaaaagttgaaactactggtgaccactgttgggagaggaaacatctgttttatagatttagcatggccttcccatcaaaaatacactcgtaccatgacgttttgtttttgttttttaagtagccacttttaattactcagtattaatcctaggtgcatgtgttaagatttcggttttcatcgagctgcttatactgatagtgaaaaacttggatgtgtgtgagacgagttaccgccttcttcattggatgtgatctgaactttttttctcctttcaacatacttaggctgtggagtgcaagcagaattatgcatagaaattgtggcagggctgagggagttgactgcaggcagtttttaggccagataaggctagatcttcctgcaatgcacttgctgcagctttgattttccagatctcaatcgtgttgcttcaatcaatattgagatccagcagccttcaccatccaggagacttcagaacttgaaggtaatttttggttgttatgggggtgcaccagatcataggagggcattatttggaggaaaccgctataatgtaaaatcagatttcagaaggaaaatgcagcaaggactgactgtagtcctatttcagacccctgggcactagtgtcaactcctcctttggctcgtaactcagaaagaaccaaagggcagattagggacggggcaggagggatcctaggatggccagagtaggtgacgcttacttccttagctcctccttccattctgatctcagggttttcactcttcaaactcccaaacacatgacttcttcccagcagcccttcccggcctctaaagtttggtcccagcagcccttcccagcctctaaagtttggtctggtatgaaatgggactgtttaacaagcaaggctcttaggggacactgttgagcctggtcccagaatctgtgatctccacagggccagggttgctacttgcacccagaatctagtgattttagtcagatccatggaacagagcagcttcgtaatacattgtcaagttacctgattacaaactctcatagatgttggaactacctttttactccccatactttgtaagtaatgcttccagattaacctgcaaatcttgtggagccaaagcctctcacagtgctgatttacctcccccaaaatgcccccaaacccccatgcaagtttacagccagtagcttggtcttattctcttggagccctaaaattaagcctttcattcccctttgctaaagcatctcactcccagggcagccccagcaccctggcattgcgggaggtgctctgctgcacagctgttccatcaggccctattggcctctgttagacattgactcagggagccggagcgccaagtggaggttgtacctttcagccctttggggtgttaaaagtgtcaagggctgggtttgcctctgatgagtacaatcagttccagaagactgggtaagtctcttgctagcaggtggacattctggtattttagactgactgaacgaaacccagaggctggttccagagctctgtccctgagaacacatccctgtggaaaatacttgagtttgtaattttttttcccccttctgggagtggaggtctcaggctcaatccggaaccatgtacgtacagttttgcttattatttgatgtgacatgaactcaaaatcctgcatttttagattccttttagttctaattgaggcctcactagatgctcttcagttctgtgtattttgaggctgggtggagaagtatatgattctgctgttgattctttcagtcttccccccttctccttttatcaatcattccagagttattttctattagtcaaacttttttgtagaaccttctttcccttaccctggcaaattgcttctttacttgctggtttccttacgtttggggcacatgttgtaagaaactgattggaaggggaaatgtgcagctctccactggaaaggaactctccacccctcccatcctgataaaacaaacaaggtttacatttacaactaaaaggattcagatgcaattttcaactattctgaaaccagcaggacacacctgactttaatagttttagctgaaattgtagatgttttgcttcagtttaacttatgagaaaagattatctgacggattttgtgttgacttcccctttagtggtttattttgtctttttctgcccatctgtctactaataaaatgtgaaataaaatacctgtattgctacttccccatgaaa

SEQ ID NO: 431042 - DNA, 4058 bp, Homo sapiens
ggccccctccgggggggggaggcccgggaccgggacccgtagcgaattctcctaactccctcgacctctcctctcgcccggcccgagtgtgaggagaagggcccggcccggcctgcgtcgtgtgtgaggaggaccccgggcgggcccacgggccgtgtggggcctggtctggcccgccgggtgtgtgaagaccggggcccggtgctgcccggccggagggcgagcggaggggaggggcctggtccggcccggccggtgcgtgaggactggggcccgggcccggcgccgccgccgccgccgccgccgcgatggcccagcagcagatgaccagctcgcagaaggccctgatgctcgagctgaaatccctgcaggaggaaccggtggagggcttccggatcaccctggtggacgagtccgacctctacaactgggaggtggccatcttcggaccccccaacaccctctacgaaggcggctacttcaaggcgcatattaaatttcctattgactacccctattcaccacctaccttcagattcttgaccaaaatgtggcaccccaacatttatgagaatggagatgtatgcatttcgattcttcatccgcctgtagatgacccacagagtggagaactgccttctgaaaggtggaatcctactcagaatgtgaggaaacaagtttcagccactaaggccgaagcagaaaaggatggagtgaaggtccccacaaccctggcggaatactgcatcaaaactaaagtgccttccaatgacaacagctcagatttgctttacgacgacttgtatgatgacgacattgatgatgaagatgaggaggaggaagatgccgactgttatgatgatgatgattctgggaatgaggagtcgtgacgtgctccttcagtgcccctgtactgccctgccatctcaggccaaagggaggggagcaagtggggacctggccatggcccctcagcaaaaacctattcacagcgggtggggaaacacacacagctccctgctgactccccttatggatctcagtttgctcctttttatggacctttaatggagagagagtaaccctccacagaatgtctgaattcttgcattctttacccttccatcactatattgattctttttttaaaaaacatgaacccaaactcccgcctcacttcgtctctacagaatgttcacagcaaaacacgtttggtctgtttttagattcttgaagaattcaatagtctttcaagatgtttaatgtgtttaaagctgggaacctgttgggagttcacaagtgctgcatatactgggtagcaaaagaaaatggaaaaaaacccacaaaacaaactttaaaaaaaaaaaaaaacaaatttgccaaggtttagctgctcatttacattagtgtgtgtgcattcgttcagccccatggtggtgaattctgtttctttcctttcctaaggctgggacatggtgggcatcagggactttgtgctaagcctgatgaaatgtgctccttcaatctccatgaaaccatcgtaacatggaggcctcagctgctctgaggagagaaatcagactttgttttttgaaatcgattgggatcgaaagcctgaaataaatattcatactttccatagaactgagcacttggttgctatttattttaaaggcagggttatttccccccagggagtggggcaagcggggaagttgggatgagtgcgtgtgggagcaaagagttaaaaatcactatgctaagtttggttgatgctactggggggaaaaagttgaaactactggtgaccactgttgggagaggaaacatctgttttatagatttagcatggccttcccatcaaaaatacactcgtaccatgacgttttgtttttgttttttaagtagccacttttaattactcagtattaatcctaggtgcatgtgttaagatttcggttttcatcgagctgcttatactgatagtgaaaaacttggatgtgtgtgagacgagttaccgccttcttcattggatgtgatctgaactttttttctcctttcaacatacttaggctgtggagtgcaagcagaattatgcatagaaattgtggcagggctgagggagttgactgcaggcagtttttaggccagataaggctagatcttcctgcaatgcacttgctgcagctttgattttccagatctcaatcgtgttgcttcaatcaatattgagatccagcagccttcaccatccaggagacttcagaacttgaaggtaatttttggttgttatgggggtgcaccagatcataggagggcattatttggaggaaaccgctataatgtaaaatcagatttcagaaggaaaatgcagcaaggactgactgtagtcctatttcagacccctgggcactagtgtcaactcctcctttggctcgtaactcagaaagaaccaaagggcagattagggacggggcaggagggatcctaggatggccagagtaggtgacgcttacttccttagctcctccttccattctgatctcagggttttcactcttcaaactcccaaacacatgacttcttcccagcagcccttcccggcctctaaagtttggtcccagcagcccttcccagcctctaaagtttggtctggtatgaaatgggactgtttaacaagcaaggctcttaggggacactgttgagcctggtcccagaatctgtgatctccacagggccagggttgctacttgcacccagaatctagtgattttagtcagatccatggaacagagcagcttcgtaatacattgtcaagttacctgattacaaactctcatagatgttggaactacctttttactccccatactttgtaagtaatgcttccagattaacctgcaaatcttgtggagccaaagcctctcacagtgctgatttacctcccccaaaatgcccccaaacccccatgcaagtttacagccagtagcttggtcttattctcttggagccctaaaattaagcctttcattcccctttgctaaagcatctcactcccagggcagccccagcaccctggcattgcgggaggtgctctgctgcacagctgttccatcaggccctattggcctctgttagacattgactcagggagccggagcgccaagtggaggttgtacctttcagccctttggggtgttaaaagtgtcaagggctgggtttgcctctgatgagtacaatcagttccagaagactgggtaagtctcttgctagcaggtggacattctggtattttagactgactgaacgaaacccagaggctggttccagagctctgtccctgagaacacatccctgtggaaaatacttgagtttgtaattttttttcccccttctgggagtggaggtctcaggctcaatccggaaccatgtacgtacagttttgcttattatttgatgtgacatgaactcaaaatcctgcatttttagattccttttagttctaattgaggcctcactagatgctcttcagttctgtgtattttgaggctgggtggagaagtatatgattctgctgttgattctttcagtcttccccccttctccttttatcaatcattccagagttattttctattagtcaaacttttttgtagaaccttctttcccttaccctggcaaattgcttctttacttgctggtttccttacgtttggggcacatgttgtaagaaactgattggaaggggaaatgtgcagctctccactggaaaggaactctccacccctcccatcctgataaaacaaacaaggtttacatttacaactaaaaggattcagatgcaattttcaactattctgaaaccagcaggacacacctgactttaatagttttagctgaaattgtagatgttttgcttcagtttaacttatgagaaaagattatctgacggattttgtgttgacttcccctttagtggtttattttgtctttttctgcccatctgtctactaataaaatgtgaaataaaatacctgtattgctacttccccatgaaa

SEQ ID NO: 431043 - DNA, 3481 bp, Homo sapiens
ctcggagctctagagttttctattactctatgtagttgagacaggatttgactaagtctagttaaaagacaaagaatatgctgaaattattaggaaacaagtttcagccactaaggccgaagcagaaaaggatggagtgaaggtccccacaaccctggcggaatactgcatcaaaactaaagtgccttccaatgacaacagctcagatttgctttacgacgacttgtatgatgacgacattgatgatgaagatgaggaggaggaagatgccgactgttatgatgatgatgattctgggaatgaggagtcgtgacgtgctccttcagtgcccctgtactgccctgccatctcaggccaaagggaggggagcaagtggggacctggccatggcccctcagcaaaaacctattcacagcgggtggggaaacacacacagctccctgctgactccccttatggatctcagtttgctcctttttatggacctttaatggagagagagtaaccctccacagaatgtctgaattcttgcattctttacccttccatcactatattgattctttttttaaaaaacatgaacccaaactcccgcctcacttcgtctctacagaatgttcacagcaaaacacgtttggtctgtttttagattcttgaagaattcaatagtctttcaagatgtttaatgtgtttaaagctgggaacctgttgggagttcacaagtgctgcatatactgggtagcaaaagaaaatggaaaaaaacccacaaaacaaactttaaaaaaaaaaaaaaacaaatttgccaaggtttagctgctcatttacattagtgtgtgtgcattcgttcagccccatggtggtgaattctgtttctttcctttcctaaggctgggacatggtgggcatcagggactttgtgctaagcctgatgaaatgtgctccttcaatctccatgaaaccatcgtaacatggaggcctcagctgctctgaggagagaaatcagactttgttttttgaaatcgattgggatcgaaagcctgaaataaatattcatactttccatagaactgagcacttggttgctatttattttaaaggcagggttatttccccccagggagtggggcaagcggggaagttgggatgagtgcgtgtgggagcaaagagttaaaaatcactatgctaagtttggttgatgctactggggggaaaaagttgaaactactggtgaccactgttgggagaggaaacatctgttttatagatttagcatggccttcccatcaaaaatacactcgtaccatgacgttttgtttttgttttttaagtagccacttttaattactcagtattaatcctaggtgcatgtgttaagatttcggttttcatcgagctgcttatactgatagtgaaaaacttggatgtgtgtgagacgagttaccgccttcttcattggatgtgatctgaactttttttctcctttcaacatacttaggctgtggagtgcaagcagaattatgcatagaaattgtggcagggctgagggagttgactgcaggcagtttttaggccagataaggctagatcttcctgcaatgcacttgctgcagctttgattttccagatctcaatcgtgttgcttcaatcaatattgagatccagcagccttcaccatccaggagacttcagaacttgaaggtaatttttggttgttatgggggtgcaccagatcataggagggcattatttggaggaaaccgctataatgtaaaatcagatttcagaaggaaaatgcagcaaggactgactgtagtcctatttcagacccctgggcactagtgtcaactcctcctttggctcgtaactcagaaagaaccaaagggcagattagggacggggcaggagggatcctaggatggccagagtaggtgacgcttacttccttagctcctccttccattctgatctcagggttttcactcttcaaactcccaaacacatgacttcttcccagcagcccttcccggcctctaaagtttggtcccagcagcccttcccagcctctaaagtttggtctggtatgaaatgggactgtttaacaagcaaggctcttaggggacactgttgagcctggtcccagaatctgtgatctccacagggccagggttgctacttgcacccagaatctagtgattttagtcagatccatggaacagagcagcttcgtaatacattgtcaagttacctgattacaaactctcatagatgttggaactacctttttactccccatactttgtaagtaatgcttccagattaacctgcaaatcttgtggagccaaagcctctcacagtgctgatttacctcccccaaaatgcccccaaacccccatgcaagtttacagccagtagcttggtcttattctcttggagccctaaaattaagcctttcattcccctttgctaaagcatctcactcccagggcagccccagcaccctggcattgcgggaggtgctctgctgcacagctgttccatcaggccctattggcctctgttagacattgactcagggagccggagcgccaagtggaggttgtacctttcagccctttggggtgttaaaagtgtcaagggctgggtttgcctctgatgagtacaatcagttccagaagactgggtaagtctcttgctagcaggtggacattctggtattttagactgactgaacgaaacccagaggctggttccagagctctgtccctgagaacacatccctgtggaaaatacttgagtttgtaattttttttcccccttctgggagtggaggtctcaggctcaatccggaaccatgtacgtacagttttgcttattatttgatgtgacatgaactcaaaatcctgcatttttagattccttttagttctaattgaggcctcactagatgctcttcagttctgtgtattttgaggctgggtggagaagtatatgattctgctgttgattctttcagtcttccccccttctccttttatcaatcattccagagttattttctattagtcaaacttttttgtagaaccttctttcccttaccctggcaaattgcttctttacttgctggtttccttacgtttggggcacatgttgtaagaaactgattggaaggggaaatgtgcagctctccactggaaaggaactctccacccctcccatcctgataaaacaaacaaggtttacatttacaactaaaaggattcagatgcaattttcaactattctgaaaccagcaggacacacctgactttaatagttttagctgaaattgtagatgttttgcttcagtttaacttatgagaaaagattatctgacggattttgtgttgacttcccctttagtggtttattttgtctttttctgcccatctgtctactaataaaatgtgaaataaaatacctgtattgctacttccccatgaaa

SEQ ID NO: 431044 - DNA, 3366 bp, Homo sapiens
gtcatcattcaaaataaaacaaaataaaaaagtattaaggcgaagattaaaaaaatttgcattacataatttacacgaaagcaatgctatcacctcccagcatgcattccgcgtggcatgcggggggggaaacacacacagcatgaggaagatgccgactgttatgatgatgatgattctgggaatgaggagtcgtgacgtgctccttcagtgcccctgtactgccctgccatctcaggccaaagggaggggagcaagtggggacctggccatggcccctcagcaaaaacctattcacagcgggtggggaaacacacacagctccctgctgactccccttatggatctcagtttgctcctttttatggacctttaatggagagagagtaaccctccacagaatgtctgaattcttgcattctttacccttccatcactatattgattctttttttaaaaaacatgaacccaaactcccgcctcacttcgtctctacagaatgttcacagcaaaacacgtttggtctgtttttagattcttgaagaattcaatagtctttcaagatgtttaatgtgtttaaagctgggaacctgttgggagttcacaagtgctgcatatactgggtagcaaaagaaaatggaaaaaaacccacaaaacaaactttaaaaaaaaaaaaaaacaaatttgccaaggtttagctgctcatttacattagtgtgtgtgcattcgttcagccccatggtggtgaattctgtttctttcctttcctaaggctgggacatggtgggcatcagggactttgtgctaagcctgatgaaatgtgctccttcaatctccatgaaaccatcgtaacatggaggcctcagctgctctgaggagagaaatcagactttgttttttgaaatcgattgggatcgaaagcctgaaataaatattcatactttccatagaactgagcacttggttgctatttattttaaaggcagggttatttccccccagggagtggggcaagcggggaagttgggatgagtgcgtgtgggagcaaagagttaaaaatcactatgctaagtttggttgatgctactggggggaaaaagttgaaactactggtgaccactgttgggagaggaaacatctgttttatagatttagcatggccttcccatcaaaaatacactcgtaccatgacgttttgtttttgttttttaagtagccacttttaattactcagtattaatcctaggtgcatgtgttaagatttcggttttcatcgagctgcttatactgatagtgaaaaacttggatgtgtgtgagacgagttaccgccttcttcattggatgtgatctgaactttttttctcctttcaacatacttaggctgtggagtgcaagcagaattatgcatagaaattgtggcagggctgagggagttgactgcaggcagtttttaggccagataaggctagatcttcctgcaatgcacttgctgcagctttgattttccagatctcaatcgtgttgcttcaatcaatattgagatccagcagccttcaccatccaggagacttcagaacttgaaggtaatttttggttgttatgggggtgcaccagatcataggagggcattatttggaggaaaccgctataatgtaaaatcagatttcagaaggaaaatgcagcaaggactgactgtagtcctatttcagacccctgggcactagtgtcaactcctcctttggctcgtaactcagaaagaaccaaagggcagattagggacggggcaggagggatcctaggatggccagagtaggtgacgcttacttccttagctcctccttccattctgatctcagggttttcactcttcaaactcccaaacacatgacttcttcccagcagcccttcccggcctctaaagtttggtcccagcagcccttcccagcctctaaagtttggtctggtatgaaatgggactgtttaacaagcaaggctcttaggggacactgttgagcctggtcccagaatctgtgatctccacagggccagggttgctacttgcacccagaatctagtgattttagtcagatccatggaacagagcagcttcgtaatacattgtcaagttacctgattacaaactctcatagatgttggaactacctttttactccccatactttgtaagtaatgcttccagattaacctgcaaatcttgtggagccaaagcctctcacagtgctgatttacctcccccaaaatgcccccaaacccccatgcaagtttacagccagtagcttggtcttattctcttggagccctaaaattaagcctttcattcccctttgctaaagcatctcactcccagggcagccccagcaccctggcattgcgggaggtgctctgctgcacagctgttccatcaggccctattggcctctgttagacattgactcagggagccggagcgccaagtggaggttgtacctttcagccctttggggtgttaaaagtgtcaagggctgggtttgcctctgatgagtacaatcagttccagaagactgggtaagtctcttgctagcaggtggacattctggtattttagactgactgaacgaaacccagaggctggttccagagctctgtccctgagaacacatccctgtggaaaatacttgagtttgtaattttttttcccccttctgggagtggaggtctcaggctcaatccggaaccatgtacgtacagttttgcttattatttgatgtgacatgaactcaaaatcctgcatttttagattccttttagttctaattgaggcctcactagatgctcttcagttctgtgtattttgaggctgggtggagaagtatatgattctgctgttgattctttcagtcttccccccttctccttttatcaatcattccagagttattttctattagtcaaacttttttgtagaaccttctttcccttaccctggcaaattgcttctttacttgctggtttccttacgtttggggcacatgttgtaagaaactgattggaaggggaaatgtgcagctctccactggaaaggaactctccacccctcccatcctgataaaacaaacaaggtttacatttacaactaaaaggattcagatgcaattttcaactattctgaaaccagcaggacacacctgactttaatagttttagctgaaattgtagatgttttgcttcagtttaacttatgagaaaagattatctgacggattttgtgttgacttcccctttagtggtttattttgtctttttctgcccatctgtctactaataaaatgtgaaataaaatacctgtattgctacttccccatgaaa

SEQ ID NO: 431045 - DNA, 3776 bp, Homo sapiens
ggccccctccgggggggggaggcccgggaccgggacccgtagcgaattctcctaactccctcgacctctcctctcgcccggcccgagtgtgaggagaagggcccggcccggcctgcgtcgtgtgtgaggaggaccccgggcgggcccacgggccgtgtggggcctggtctggcccgccgggtgtgtgaagaccggggcccggtgctgcccggccggagggcgagcggaggggaggggcctggtccggcccggccggtgcgtgaggactggggcccgggcccggcgccgccgccgccgccgccgccgcgatggcccagcagcagatgaccagctcgcagaaggccctgatgctcgagctgaaatccctgcaggaggaaccggtggagggcttccggatcaccctggtggacgagtccgacctctacaactgggaggtggccatcttcggaccccccaacaccctctacgaaggcggctacttcaaggcgcatattaaatttcctattgactacccctattcaccacctaccttcagattcttgaccaaaatgtggcaccccaacatttatgagtatgatgatgatgattctgggaatgaggagtcgtgacgtgctccttcagtgcccctgtactgccctgccatctcaggccaaagggaggggagcaagtggggacctggccatggcccctcagcaaaaacctattcacagcgggtggggaaacacacacagctccctgctgactccccttatggatctcagtttgctcctttttatggacctttaatggagagagagtaaccctccacagaatgtctgaattcttgcattctttacccttccatcactatattgattctttttttaaaaaacatgaacccaaactcccgcctcacttcgtctctacagaatgttcacagcaaaacacgtttggtctgtttttagattcttgaagaattcaatagtctttcaagatgtttaatgtgtttaaagctgggaacctgttgggagttcacaagtgctgcatatactgggtagcaaaagaaaatggaaaaaaacccacaaaacaaactttaaaaaaaaaaaaaaacaaatttgccaaggtttagctgctcatttacattagtgtgtgtgcattcgttcagccccatggtggtgaattctgtttctttcctttcctaaggctgggacatggtgggcatcagggactttgtgctaagcctgatgaaatgtgctccttcaatctccatgaaaccatcgtaacatggaggcctcagctgctctgaggagagaaatcagactttgttttttgaaatcgattgggatcgaaagcctgaaataaatattcatactttccatagaactgagcacttggttgctatttattttaaaggcagggttatttccccccagggagtggggcaagcggggaagttgggatgagtgcgtgtgggagcaaagagttaaaaatcactatgctaagtttggttgatgctactggggggaaaaagttgaaactactggtgaccactgttgggagaggaaacatctgttttatagatttagcatggccttcccatcaaaaatacactcgtaccatgacgttttgtttttgttttttaagtagccacttttaattactcagtattaatcctaggtgcatgtgttaagatttcggttttcatcgagctgcttatactgatagtgaaaaacttggatgtgtgtgagacgagttaccgccttcttcattggatgtgatctgaactttttttctcctttcaacatacttaggctgtggagtgcaagcagaattatgcatagaaattgtggcagggctgagggagttgactgcaggcagtttttaggccagataaggctagatcttcctgcaatgcacttgctgcagctttgattttccagatctcaatcgtgttgcttcaatcaatattgagatccagcagccttcaccatccaggagacttcagaacttgaaggtaatttttggttgttatgggggtgcaccagatcataggagggcattatttggaggaaaccgctataatgtaaaatcagatttcagaaggaaaatgcagcaaggactgactgtagtcctatttcagacccctgggcactagtgtcaactcctcctttggctcgtaactcagaaagaaccaaagggcagattagggacggggcaggagggatcctaggatggccagagtaggtgacgcttacttccttagctcctccttccattctgatctcagggttttcactcttcaaactcccaaacacatgacttcttcccagcagcccttcccggcctctaaagtttggtcccagcagcccttcccagcctctaaagtttggtctggtatgaaatgggactgtttaacaagcaaggctcttaggggacactgttgagcctggtcccagaatctgtgatctccacagggccagggttgctacttgcacccagaatctagtgattttagtcagatccatggaacagagcagcttcgtaatacattgtcaagttacctgattacaaactctcatagatgttggaactacctttttactccccatactttgtaagtaatgcttccagattaacctgcaaatcttgtggagccaaagcctctcacagtgctgatttacctcccccaaaatgcccccaaacccccatgcaagtttacagccagtagcttggtcttattctcttggagccctaaaattaagcctttcattcccctttgctaaagcatctcactcccagggcagccccagcaccctggcattgcgggaggtgctctgctgcacagctgttccatcaggccctattggcctctgttagacattgactcagggagccggagcgccaagtggaggttgtacctttcagccctttggggtgttaaaagtgtcaagggctgggtttgcctctgatgagtacaatcagttccagaagactgggtaagtctcttgctagcaggtggacattctggtattttagactgactgaacgaaacccagaggctggttccagagctctgtccctgagaacacatccctgtggaaaatacttgagtttgtaattttttttcccccttctgggagtggaggtctcaggctcaatccggaaccatgtacgtacagttttgcttattatttgatgtgacatgaactcaaaatcctgcatttttagattccttttagttctaattgaggcctcactagatgctcttcagttctgtgtattttgaggctgggtggagaagtatatgattctgctgttgattctttcagtcttccccccttctccttttatcaatcattccagagttattttctattagtcaaacttttttgtagaaccttctttcccttaccctggcaaattgcttctttacttgctggtttccttacgtttggggcacatgttgtaagaaactgattggaaggggaaatgtgcagctctccactggaaaggaactctccacccctcccatcctgataaaacaaacaaggtttacatttacaactaaaaggattcagatgcaattttcaactattctgaaaccagcaggacacacctgactttaatagttttagctgaaattgtagatgttttgcttcagtttaacttatgagaaaagattatctgacggattttgtgttgacttcccctttagtggtttattttgtctttttctgcccatctgtctactaataaaatgtgaaataaaatacctgtattgctacttccccatgaaa

SEQ ID NO: 431046 - DNA, 4136 bp, Homo sapiens
ggccccctccgggggggggaggcccgggaccgggacccgtagcgaattctcctaactccctcgacctctcctctcgcccggcccgagtgtgaggagaagggcccggcccggcctgcgtcgtgtgtgaggaggaccccgggcgggcccacgggccgtgtggggcctggtctggcccgccgggtgtgtgaagaccggggcccggtgctgcccggccggagggcgagcggaggggaggggcctggtccggcccggccggtgcgtgaggactggggcccgggcccggcgccgccgccgccgccgccgccgcgatggcccagcagcagatgaccagctcgcagaaggccctgatgctcgagctgaaatccctgcaggaggaaccggtggagggcttccggatcaccctggtggacgagtccgacctctacaactgggaggtggccatcttcggaccccccaacaccctctacgaaggcggctacttcaaggcgcatattaaatttcctattgactacccctattcaccacctaccttcagattcttgaccaaaatgtggcaccccaacatttatgagaatggagatgtatgcatttcgattcttcatccgcctgtagatgacccacagagtggagaactgccttctgaaaggtggaatcctactcagaatgtgaggactatcctattaagtgtaatctcactgcttaatgagcccaacaccttctccccagccaatgtcgatgcttcagttatgttcaggaaatggagagacagtaaaggaaaagacaaagaatatgctgaaattattaggaaacaagtttcagccactaaggccgaagcagaaaaggatggagtgaaggtccccacaaccctggcggaatactgcatcaaaactaaagtgccttccaatgacaacagctcagatttgctttacgacgacttgtatgatgacgacattgatgatgaagatgaggaggaggaagatgccgactgttatgatgatgatgattctgggaatgaggagtcgtgacgttggggacctggccatggcccctcagcaaaaacctattcacagcgggtggggaaacacacacagctccctgctgactccccttatggatctcagtttgctcctttttatggacctttaatggagagagagtaaccctccacagaatgtctgaattcttgcattctttacccttccatcactatattgattctttttttaaaaaacatgaacccaaactcccgcctcacttcgtctctacagaatgttcacagcaaaacacgtttggtctgtttttagattcttgaagaattcaatagtctttcaagatgtttaatgtgtttaaagctgggaacctgttgggagttcacaagtgctgcatatactgggtagcaaaagaaaatggaaaaaaacccacaaaacaaactttaaaaaaaaaaaaaaacaaatttgccaaggtttagctgctcatttacattagtgtgtgtgcattcgttcagccccatggtggtgaattctgtttctttcctttcctaaggctgggacatggtgggcatcagggactttgtgctaagcctgatgaaatgtgctccttcaatctccatgaaaccatcgtaacatggaggcctcagctgctctgaggagagaaatcagactttgttttttgaaatcgattgggatcgaaagcctgaaataaatattcatactttccatagaactgagcacttggttgctatttattttaaaggcagggttatttccccccagggagtggggcaagcggggaagttgggatgagtgcgtgtgggagcaaagagttaaaaatcactatgctaagtttggttgatgctactggggggaaaaagttgaaactactggtgaccactgttgggagaggaaacatctgttttatagatttagcatggccttcccatcaaaaatacactcgtaccatgacgttttgtttttgttttttaagtagccacttttaattactcagtattaatcctaggtgcatgtgttaagatttcggttttcatcgagctgcttatactgatagtgaaaaacttggatgtgtgtgagacgagttaccgccttcttcattggatgtgatctgaactttttttctcctttcaacatacttaggctgtggagtgcaagcagaattatgcatagaaattgtggcagggctgagggagttgactgcaggcagtttttaggccagataaggctagatcttcctgcaatgcacttgctgcagctttgattttccagatctcaatcgtgttgcttcaatcaatattgagatccagcagccttcaccatccaggagacttcagaacttgaaggtaatttttggttgttatgggggtgcaccagatcataggagggcattatttggaggaaaccgctataatgtaaaatcagatttcagaaggaaaatgcagcaaggactgactgtagtcctatttcagacccctgggcactagtgtcaactcctcctttggctcgtaactcagaaagaaccaaagggcagattagggacggggcaggagggatcctaggatggccagagtaggtgacgcttacttccttagctcctccttccattctgatctcagggttttcactcttcaaactcccaaacacatgacttcttcccagcagcccttcccggcctctaaagtttggtcccagcagcccttcccagcctctaaagtttggtctggtatgaaatgggactgtttaacaagcaaggctcttaggggacactgttgagcctggtcccagaatctgtgatctccacagggccagggttgctacttgcacccagaatctagtgattttagtcagatccatggaacagagcagcttcgtaatacattgtcaagttacctgattacaaactctcatagatgttggaactacctttttactccccatactttgtaagtaatgcttccagattaacctgcaaatcttgtggagccaaagcctctcacagtgctgatttacctcccccaaaatgcccccaaacccccatgcaagtttacagccagtagcttggtcttattctcttggagccctaaaattaagcctttcattcccctttgctaaagcatctcactcccagggcagccccagcaccctggcattgcgggaggtgctctgctgcacagctgttccatcaggccctattggcctctgttagacattgactcagggagccggagcgccaagtggaggttgtacctttcagccctttggggtgttaaaagtgtcaagggctgggtttgcctctgatgagtacaatcagttccagaagactgggtaagtctcttgctagcaggtggacattctggtattttagactgactgaacgaaacccagaggctggttccagagctctgtccctgagaacacatccctgtggaaaatacttgagtttgtaattttttttcccccttctgggagtggaggtctcaggctcaatccggaaccatgtacgtacagttttgcttattatttgatgtgacatgaactcaaaatcctgcatttttagattccttttagttctaattgaggcctcactagatgctcttcagttctgtgtattttgaggctgggtggagaagtatatgattctgctgttgattctttcagtcttccccccttctccttttatcaatcattccagagttattttctattagtcaaacttttttgtagaaccttctttcccttaccctggcaaattgcttctttacttgctggtttccttacgtttggggcacatgttgtaagaaactgattggaaggggaaatgtgcagctctccactggaaaggaactctccacccctcccatcctgataaaacaaacaaggtttacatttacaactaaaaggattcagatgcaattttcaactattctgaaaccagcaggacacacctgactttaatagttttagctgaaattgtagatgttttgcttcagtttaacttatgagaaaagattatctgacggattttgtgttgacttcccctttagtggtttattttgtctttttctgcccatctgtctactaataaaatgtgaaataaaatacctgtattgctacttccccatgaaa

SEQ ID NO: 431047 - DNA, 3469 bp, Homo sapiens
ggccccctccgggggggggaggcccgggaccgggacccgtagcgaattctcctaactccctcgacctctcctctcgcccggcccgagtgtgaggagaagggcccggcccggcctgcgtcgtgtgtgaggaggaccccgggcgggcccacgggccgtgtggggcctggtctggcccgccgggtgtgtgaagaccggggcccggtgctgcccggccggagggcgagcggaggggaggggcctggtccggcccggccggtgcgtgaggactggggcccgggcccggcgccgccgccgccgccgccgccgcgatggcccagcagcagatgaccagctcgcagaaggccctgatgctcgagctgaaatccctgcaggaggaaccggtggagggcttccggatcaccctggtggacgagtccgacctctacaactgggaggtggccatcttcggaccccccaacaccctctacgaaggcggctacttcaaggcgcatattaaatttcctattgactacccctattcaccacctaccttcagattcttgaccaaaatgtggcaccccaacatttatgagaatggagatgtatgcatttcgattcttcatccgcctgtagatgacccacagagtggagaactgccttctgaaaggtggaatcctactcagaatgtgaggactatcctattaagtgtaatctcactgcttaatgagcccaacaccttctccccagccaatgtcgatgcttcagttatgttcaggaaatggagagacagtaaaaaaaaaaaacaaatttgccaaggtttagctgctcatttacattagtgtgtgtgcattcgttcagccccatggtggtgaattctgtttctttcctttcctaaggctgggacatggtgggcatcagggactttgtgctaagcctgatgaaatgtgctccttcaatctccatgaaaccatcgtaacatggaggcctcagctgctctgaggagagaaatcagactttgttttttgaaatcgattgggatcgaaagcctgaaataaatattcatactttccatagaactgagcacttggttgctatttattttaaaggcagggttatttccccccagggagtggggcaagcggggaagttgggatgagtgcgtgtgggagcaaagagttaaaaatcactatgctaagtttggttgatgctactggggggaaaaagttgaaactactggtgaccactgttgggagaggaaacatctgttttatagatttagcatggccttcccatcaaaaatacactcgtaccatgacgttttgtttttgttttttaagtagccacttttaattactcagtattaatcctaggtgcatgtgttaagatttcggttttcatcgagctgcttatactgatagtgaaaaacttggatgtgtgtgagacgagttaccgccttcttcattggatgtgatctgaactttttttctcctttcaacatacttaggctgtggagtgcaagcagaattatgcatagaaattgtggcagggctgagggagttgactgcaggcagtttttaggccagataaggctagatcttcctgcaatgcacttgctgcagctttgattttccagatctcaatcgtgttgcttcaatcaatattgagatccagcagccttcaccatccaggagacttcagaacttgaaggtaatttttggttgttatgggggtgcaccagatcataggagggcattatttggaggaaaccgctataatgtaaaatcagatttcagaaggaaaatgcagcaaggactgactgtagtcctatttcagacccctgggcactagtgtcaactcctcctttggctcgtaactcagaaagaaccaaagggcagattagggacggggcaggagggatcctaggatggccagagtaggtgacgcttacttccttagctcctccttccattctgatctcagggttttcactcttcaaactcccaaacacatgacttcttcccagcagcccttcccggcctctaaagtttggtcccagcagcccttcccagcctctaaagtttggtctggtatgaaatgggactgtttaacaagcaaggctcttaggggacactgttgagcctggtcccagaatctgtgatctccacagggccagggttgctacttgcacccagaatctagtgattttagtcagatccatggaacagagcagcttcgtaatacattgtcaagttacctgattacaaactctcatagatgttggaactacctttttactccccatactttgtaagtaatgcttccagattaacctgcaaatcttgtggagccaaagcctctcacagtgctgatttacctcccccaaaatgcccccaaacccccatgcaagtttacagccagtagcttggtcttattctcttggagccctaaaattaagcctttcattcccctttgctaaagcatctcactcccagggcagccccagcaccctggcattgcgggaggtgctctgctgcacagctgttccatcaggccctattggcctctgttagacattgactcagggagccggagcgccaagtggaggttgtacctttcagccctttggggtgttaaaagtgtcaagggctgggtttgcctctgatgagtacaatcagttccagaagactgggtaagtctcttgctagcaggtggacattctggtattttagactgactgaacgaaacccagaggctggttccagagctctgtccctgagaacacatccctgtggaaaatacttgagtttgtaattttttttcccccttctgggagtggaggtctcaggctcaatccggaaccatgtacgtacagttttgcttattatttgatgtgacatgaactcaaaatcctgcatttttagattccttttagttctaattgaggcctcactagatgctcttcagttctgtgtattttgaggctgggtggagaagtatatgattctgctgttgattctttcagtcttccccccttctccttttatcaatcattccagagttattttctattagtcaaacttttttgtagaaccttctttcccttaccctggcaaattgcttctttacttgctggtttccttacgtttggggcacatgttgtaagaaactgattggaaggggaaatgtgcagctctccactggaaaggaactctccacccctcccatcctgataaaacaaacaaggtttacatttacaactaaaaggattcagatgcaattttcaactattctgaaaccagcaggacacacctgactttaatagttttagctgaaattgtagatgttttgcttcagtttaacttatgagaaaagattatctgacggattttgtgttgacttcccctttagtggtttattttgtctttttctgcccatctgtctactaataaaatgtgaaataaaatacctgtattgctacttccccatgaaa

SEQ ID NO: 431048 - DNA, 2974 bp, Homo sapiens
aaaacacgtttggtctgtttttagattcttgaagaattcaatagtctttcaagatgtttaatgtgtttaaagctgggaacctgttgggagttcacaagtgctgcatatactgggtagcaaaacacgtttggtctgtttttagattcttgaagaattcaatagtctttcaagatgtttaatgtgtttaaagctgggaacctgttgggagttcacaagtgctgcatatactgggtagcaaaagaaaatggaaaaaaacccacaaaacaaactttaaaaaaaaaaaaaaacaaatttgccaaggtttagctgctcatttacattagtgtgtgtgcattcgttcagccccatggtggtgaattctgtttctttcctttcctaaggctgggacatggtgggcatcagggactttgtgctaagcctgatgaaatgtgctccttcaatctccatgaaaccatcgtaacatggaggcctcagctgctctgaggagagaaatcagactttgttttttgaaatcgattgggatcgaaagcctgaaataaatattcatactttccatagaactgagcacttggttgctatttattttaaaggcagggttatttccccccagggagtggggcaagcggggaagttgggatgagtgcgtgtgggagcaaagagttaaaaatcactatgctaagtttggttgatgctactggggggaaaaagttgaaactactggtgaccactgttgggagaggaaacatctgttttatagatttagcatggccttcccatcaaaaatacactcgtaccatgacgttttgtttttgttttttaagtagccacttttaattactcagtattaatcctaggtgcatgtgttaagatttcggttttcatcgagctgcttatactgatagtgaaaaacttggatgtgtgtgagacgagttaccgccttcttcattggatgtgatctgaactttttttctcctttcaacatacttaggctgtggagtgcaagcagaattatgcatagaaattgtggcagggctgagggagttgactgcaggcagtttttaggccagataaggctagatcttcctgcaatgcacttgctgcagctttgattttccagatctcaatcgtgttgcttcaatcaatattgagatccagcagccttcaccatccaggagacttcagaacttgaaggtaatttttggttgttatgggggtgcaccagatcataggagggcattatttggaggaaaccgctataatgtaaaatcagatttcagaaggaaaatgcagcaaggactgactgtagtcctatttcagacccctgggcactagtgtcaactcctcctttggctcgtaactcagaaagaaccaaagggcagattagggacggggcaggagggatcctaggatggccagagtaggtgacgcttacttccttagctcctccttccattctgatctcagggttttcactcttcaaactcccaaacacatgacttcttcccagcagcccttcccggcctctaaagtttggtcccagcagcccttcccagcctctaaagtttggtctggtatgaaatgggactgtttaacaagcaaggctcttaggggacactgttgagcctggtcccagaatctgtgatctccacagggccagggttgctacttgcacccagaatctagtgattttagtcagatccatggaacagagcagcttcgtaatacattgtcaagttacctgattacaaactctcatagatgttggaactacctttttactccccatactttgtaagtaatgcttccagattaacctgcaaatcttgtggagccaaagcctctcacagtgctgatttacctcccccaaaatgcccccaaacccccatgcaagtttacagccagtagcttggtcttattctcttggagccctaaaattaagcctttcattcccctttgctaaagcatctcactcccagggcagccccagcaccctggcattgcgggaggtgctctgctgcacagctgttccatcaggccctattggcctctgttagacattgactcagggagccggagcgccaagtggaggttgtacctttcagccctttggggtgttaaaagtgtcaagggctgggtttgcctctgatgagtacaatcagttccagaagactgggtaagtctcttgctagcaggtggacattctggtattttagactgactgaacgaaacccagaggctggttccagagctctgtccctgagaacacatccctgtggaaaatacttgagtttgtaattttttttcccccttctgggagtggaggtctcaggctcaatccggaaccatgtacgtacagttttgcttattatttgatgtgacatgaactcaaaatcctgcatttttagattccttttagttctaattgaggcctcactagatgctcttcagttctgtgtattttgaggctgggtggagaagtatatgattctgctgttgattctttcagtcttccccccttctccttttatcaatcattccagagttattttctattagtcaaacttttttgtagaaccttctttcccttaccctggcaaattgcttctttacttgctggtttccttacgtttggggcacatgttgtaagaaactgattggaaggggaaatgtgcagctctccactggaaaggaactctccacccctcccatcctgataaaacaaacaaggtttacatttacaactaaaaggattcagatgcaattttcaactattctgaaaccagcaggacacacctgactttaatagttttagctgaaattgtagatgttttgcttcagtttaacttatgagaaaagattatctgacggattttgtgttgacttcccctttagtggtttattttgtctttttctgcccatctgtctactaataaaatgtgaaataaaatacctgtattgctacttccccatgaaa

SEQ ID NO: 431049 - DNA, 1049 bp, Homo sapiens
ggccccctccgggggggggaggcccgggaccgggacccgtagcgaattctcctaactccctcgacctctcctctcgcccggcccgagtgtgaggagaagggcccggcccggcctgcgtcgtgtgtgaggaggaccccgggcgggcccacgggccgtgtggggcctggtctggcccgccgggtgtgtgaagaccggggcccggtgctgcccggccggagggcgagcggaggggaggggcctggtccggcccggccggtgcgtgaggactggggcccgggcccggcgccgccgccgccgccgccgccgcgatggcccagcagcagatgaccagctcgcagaaggccctgatgctcgagctgaaatccctgcaggaggaaccggtggagggcttccggatcaccctggtggacgagtccgacctctacaactgggaggtggccatcttcggaccccccaacaccctctacgaaggcggctacttcaaggcgcatattaaatttcctattgactacccctattcaccacctaccttcagattcttgaccaaaatgtggcaccccaacatttatgagaatggagatgtatgcatttcgattcttcatccgcctgtagatgacccacagagtggagaactgccttctgaaaggtggaatcctactcagaatgtgaggactatcctattaagtgtaatctcactgcttaatgagcccaacaccttctccccagccaatgtcgatgcttcagttatgttcaggaaatggagagacagtaaaaaaaaaaaacaaatttgccaaggtttagctgctcatttacattagtgtgtgtgcattcgttcagccccatggtggtgaattctgtttctttcctttcctaaggctgggacatggtgggcatcagggactttgtgctaagcctgatgaaatgtgctccttcaatctccatgaaaccatcgtaacatggaggcctcagctgctctgaggagagaaatcagactttgttttttgaaatcgattgggatcgaaagcctgaaataaatattcatactttcc

SEQ ID NO: 431050 - DNA, 589 bp, Homo sapiens
tgcggccgctccaacatcagaatcatatacttctccactcatttctcaaaatacacagaactgaagagcatctattgaggctgggtggagaagtatatgattctgctgttgattctttcagtcttccccccttctccttttatcaatcattccagagttattttctattagtcaaacttttttgtagaaccttctttcccttaccctggcaaattgcttctttacttgctggtttccttacgtttggggcacatgttgtaagaaactgattggaaggggaaatgtgcagctctccactggaaaggaactctccacccctcccatcctgataaaacaaacaaggtttacatttacaactaaaaggattcagatgcaattttcaactattctgaaaccagcaggacacacctgactttaatagttttagctgaaattgtagatgttttgcttcagtttaacttatgagaaaagattatctgacggattttgtgttgacttcccctttagtggtttattttgtctttttctgcccatctgtctactaataaaatgtgaaataaaatacctgtattgctacttccccatgaaa

SEQ ID NO: 431051 - DNA, 2200 bp, Homo sapiens
aaaaaaaaaaaaaaaaaaaaaaaaaaaaaacaatccagaggcacagtcccctaggctttgcaaggcaatcccccatgcccttaggagcaagcagtttgacttaccagccttcatatggtcaaggtttgagaaccagctccctaagccactcagcatgcccaactcccaaccctctgtctcgacacagtccagcccctttctccaaatcttctacgttctatagaaacagcccagcaagggaattgcatcttcctataagggatggtaatactttggaaatgcatggtgacacctgccaacctggcattttcaactatgccacaaggctgggaaggagaagcaagagtcctcaggccatggcatcacatggttctagaccagggagtcgcctaaagcagccgattgggcagattccactggaatcttctcctccagtcggactttctattgaagaagtggagaggctcaacacacctcgccctagaaacccaagtatctgcagtgcagaccatgggaggtcttcttcagaggaggactgcagaaggccactgtctagaacaaggaatccagcggatggcattccagctccagaatcctcttctgatagtgactcccatgaatctttcacttgctcagaaatggaatatgacagggagaagccaatggtatatacttccagaatgtccaaattatctcaagtcaatgaatctgatgcagatgatgaagataattatggagccagactgaagcctcgaaggtaccacggtcgcagggccgagggaggacctgtgggcacccaggcagcagcaccaggcactgctgacaacacactgcccatgaagctagggcagcaagcagggactttcaactgggacaaccttttgaactggggccctggctttggccattatgtagatgtttttaaagatttggcatctcttccagaaaaagcagcagcaaatgaagaaggcaaagctgggacaactaaaccagtccccaaagatggggaagcagaacagtatgtgtgaagtttatgtactggcactataaaatataaaaacaagaaataatactcaaaccattgtaaagttgctgactaggttgggtcacatttgaaaaacaggccagtatggactagtggtggagggaaaactttaaaaataataaccacaatgctgctgaaacagactcacaacaactcttaatttaaacatgtgtggttgaatttatttccctgcatgcattgtgttttgtaactagttatgtggcatgcagcatttggaaaatttttcttatttaccagtgtttgatttgtgatttttaaaaattgatacctttaccattgcagaaaagaacttgtgctttcccagtggcgtatgtgtattgtttcaactgtattattataattatattttgcattgcaagattcttgatgttaaaccaatccttgtaaagtgtaaaaaggaaccctcctatcgtggaatgaaagattaagtatattaacacttttcagaatgatagtttctgtatttgatgttgctcagaaatgtctgagtatttgagtaagttttacatgacagtgggtactgaaattaagtcattttgttcagcactttaacgctttcttatagaattgtcttaaaacttctggatccttgagcaaatgattatagtctcctgactttcatgaggcttccattaggaacagaatgattgcatgttgtccccagaacactgccaccttgctatgcgaatgatgttctcagcagcacttctaagaaacactcttaaaagttatttattgaaaatttttcgtatgcttttaatattttaaagaattgacctaaggaaagcttatgattggacttattttccaaccagataacatttactctaagtacccagtttttataatttatatgaaatcagatttcaacacttactttgtcattttgtagatcattttttttaaatactgtgtaaaaactttttttacacctaagctgtgtttttgatactgatattttcctatgctgaatagttttcttactttcagggaaggtaagaaaatactttttttatatttgttacttatgtaacattcatatttttctcattttgatatttgtaacatactgtatgctttctacttgtaaatgtcaacaatagaattaaaatatttatttaaaataaaaaaaat

SEQ ID NO: 431052 - DNA, 2239 bp, Homo sapiens
tcatgtacattgcatttgttttaaatgttgagtgtacattggatatatggtatgaatgtgttttgtatattcatggctgttgtctgcatgcaactcgtatgcaccttccctctgtctttcatttatgctgcatgtgccctgcatgtgggttattgtatatgtgtatcatgggtgcggcattcctgttgaatgtctattgtgtatcgcacatatcttgggtactacatgaatattgtatgcacttggtattgttccattcattctgcaacattgttttctacctgtacattacatgcatatttcatgtgtttcttgtgcatgctatatgcttcatgtggcatccatgcccatgcaccacatatgttacgtgtaaactgtgtggtgtgtgtgtggcgtgtatgttttggtgttctgccttcagacagttctgcacaggcctcgcgcgtgcaagtggccatccagaccctggatgagaatgacaatgctccccagctggctgagccctacgatacttttgtgtgtgactctgcagctcctggccagctgattcaggtcatccgggccctggacagagatgaagttggcaacagtagccatgtctcctttcaaggtcctctgggccctgatgccaactttactgtccaggacaaccgagatggctccgccagcctgctgctgccctcccgccctgctccaccccgccatgccccctacttggttcccatagaactgtgggactgggggcagccggcgctgagcagcactgccacagtgactgttagtgtgtgccgctgccagcctgacggctctgtggcatcctgctggcctgaggctcacctctcagctgctgggctcagcaccggcgccctgcttgccatcatcacctgtgtgggtgccctgcttgccctggtggtgctcttcgtggccctgcggcggcagaagcaagaagcactgatggtactggaggaggaggacgtccgagagaacatcatcacctacgacgacgagggcggcggcgaggaggacaccgaggccttcgacatcacggccttgcagaacccggacggggcggcccccccggcgcccggccctcccgcgcgccgagacgtgttgccccgggcccgggtgtcgcgccagcccagaccccccggccccgccgacgtggcgcagctcctggcgctgcggctccgcgaggcggacgaggaccccggcgtacccccgtacgactcggtgcaggtgtacggctacgagggccgcggctcctcttgcggctccctcagctccctgggctccggcagcgaagccggcggcgcccccggccccgcggagccgctggacgactggggtccgctcttccgcaccctggccgagctgtatggggccaaggagcccccggccccctgagcgcccgggctggcccggcccaccgcggggggggggcagcgggcacaggccctctgagtgagccccacggggtccaggcgggcggcagcagcccaggggccccaggcctcctccctgtccttgtgtccctccttgcttccccggggcaccctcgctctcacctccctcctcctgagtcggtgtgtgtgtctctctccaggaatctttgtctctatctgtgacacgctcctctgtccgggcctgggtttcctgccctggccctggccctgcgatctctcactgtgattcctctccttcctccgtggcgttttgtctctgcagttctgaagctcacacatagtctccctgcgtcttccttgcccatacacatgctctgtgtctgtctcctgcccacatctcccttccttctctctgggtccctgtgactggctttttgtttttttctgttgtccatcccaaaatcaagagaaacttccagccactgctgcccaccctcctgcaggggatgttgtgccccagacctgcctgcatggttccatccattactcatggcctcagcctcatcctggctccactggcctccagctgagagagggaaccagcctgcctcccagggcaagagctccagcctcccgtgtggccgcctccctggagctctgcccagctgtcagcttcccctgggcatcccagccctgggcattgtcttgtgtgcttcctgagggagtagggaaaggaaagggggaggcggctggggaaggggaaagagggaggaaggggaggggcctccatctctaatttcataataaacaaacactttattttgtaaaaaaaaaaa

SEQ ID NO: 431053 - DNA, 3043 bp, Homo sapiens
gagctgggtctggaaccagttctttgtcattgaggaatatgctggtccagagcctgttctcattggcaagctgcactcggatgttgaccggggagagggccgcaccaagtacctgttgaccggggagggggcaggcaccgtatttgtgattgatgaggccacaggcaatattcatgttaccaagagccttgaccgggaggaaaaggcgcaatatgtgctactggcccaagccgtggaccgagcctccaaccggcccctggagcccccatcagagttcatcatcaaagtgcaagacatcaacgacaatccacccatttttccccttgggccctaccatgccaccgtgcccgagatgtccaatgtcgggacatcagtgatccaggtgactgctcacgatgctgatgaccccagctatgggaacagtgccaagctggtgtacactgttctggatggactgcctttcttctctgtggacccccagactggagtggtgcgtacagccatccccaacatggaccgggagacacaggaggagttcttggtggtgatccaggccaaggacatgggcggccacatgggggggctgtcaggcagcactacggtgactgtcacgctcagcgatgtcaacgacaacccccccaagttcccacagagcctataccagttctccgtggtggagacagctggacctggcacactggtgggccggctccgggcccaggacccagacctgggggacaacgccctgatggcatacagcatcctggatggggaggggtctgaggccttcagcatcagcacagacttgcagggtcgagacgggctcctcactgtccgcaagcccctagactttgagagccagcgctcctactccttccgtgtcgaggccaccaacacgctcattgacccagcctatctgcggcgagggcccttcaaggatgtggcctctgtgcgtgtggcagtgcaagatgcccagagccactgccttcacccaggtgctaccacctgacagtgcctgaaacaaggccccggggacctggtaggcagatctccgcggctgacctggactcccctgccagcccaatcagatactccatcctcccccactcagatccggagcgttgcttctctatccagcccgaggaaggcaccatccatacagcagcacccctggatcgcgaggctcgcgcctggcacaacctcactgtgctggctacagagctcgacagttctgcacaggcctcgcgcgtgcaagtggccatccagaccctggatgagaatgacaatgctccccagctggctgagccctacgatacttttgtgtgtgactctgcagctcctggccagctgattcaggtcatccgggccctggacagagatgaagttggcaacagtagccatgtctcctttcaaggtcctctgggccctgatgccaactttactgtccaggacaaccgagatggctccgccagcctgctgctgccctcccgccctgctccaccccgccatgccccctacttggttcccatagaactgtgggactgggggcagccggcgctgagcagcactgccacagtgactgttagtgtgtgccgctgccagcctgacggctctgtggcatcctgctggcctgaggctcacctctcagctgctgggctcagcaccggcgccctgcttgccatcatcacctgtgtgggtgccctgcttgccctggtggtgctcttcgtggccctgcggcggcagaagcaagaagcactgatggtactggaggaggaggacgtccgagagaacatcatcacctacgacgacgagggcggcggcgaggaggacaccgaggccttcgacatcacggccttgcagaacccggacggggcggcccccccggcgcccggccctcccgcgcgccgagacgtgttgccccgggcccgggtgtcgcgccagcccagaccccccggccccgccgacgtggcgcagctcctggcgctgcggctccgcgaggcggacgaggaccccggcgtacccccgtacgactcggtgcaggtgtacggctacgagggccgcggctcctcttgcggctccctcagctccctgggctccggcagcgaagccggcggcgcccccggccccgcggagccgctggacgactggggtccgctcttccgcaccctggccgagctgtatggggccaaggagcccccggccccctgagcgcccgggctggcccggcccaccgcggggggggggcagcgggcacaggccctctgagtgagccccacggggtccaggcgggcggcagcagcccaggggccccaggcctcctccctgtccttgtgtccctccttgcttccccggggcaccctcgctctcacctccctcctcctgagtcggtgtgtgtgtctctctccaggaatctttgtctctatctgtgacacgctcctctgtccgggcctgggtttcctgccctggccctggccctgcgatctctcactgtgattcctctccttcctccgtggcgttttgtctctgcagttctgaagctcacacatagtctccctgcgtcttccttgcccatacacatgctctgtgtctgtctcctgcccacatctcccttccttctctctgggtccctgtgactggctttttgtttttttctgttgtccatcccaaaatcaagagaaacttccagccactgctgcccaccctcctgcaggggatgttgtgccccagacctgcctgcatggttccatccattactcatggcctcagcctcatcctggctccactggcctccagctgagagagggaaccagcctgcctcccagggcaagagctccagcctcccgtgtggccgcctccctggagctctgcccagctgtcagcttcccctgggcatcccagccctgggcattgtcttgtgtgcttcctgagggagtagggaaaggaaagggggaggcggctggggaaggggaaagagggaggaaggggaggggcctccatctctaatttcataataaacaaacactttattttgtaaaaaaaaaaa

SEQ ID NO: 431054 - DNA, 504 bp, Homo sapiens
catgtgtttcttgtgcatgctatatgcttcatgtggcatccatgcccatgcaccacatatgttacgtgtaaactgtgtggtgtgtgtgtggcgtgtatgttttggtgttctgccttcagacagttctgcacaggcctcgcgcgtgcaagtggccatccagaccctggatgagaatgacaatgctccccagctggctgagccctacgatacttttgtgtgtgactctgcagctcctggccaggtgagcaactgaggcagaggggttgggacgtccaggcctccagcagcccactccatacaaggcctctctcttcttcctcccagctgattcaggtcatccgggccctggacagagatgaagttggcaacagtagccatgtctcctttcaaggtcctctgggccctgatgccaactttactgtccaggacaaccgaggtaggtggcctcctacagccatgtccatacctgcctctgtccccttctcctcctcctccacccctagc

SEQ ID NO: 431055 - DNA, 564 bp, Homo sapiens
tgcccatacacatgctctgtgtctgtctcctgcccacatctcccttccttctctctgggtccctgtgactggctttttgtttttttctgttgtccatcccaaaatcaagagaaacttccagccactgctgcccaccctcctgcaggggatgttgtgccccaggtcagtgcccctagactgtggggcagggcggtggatgaaggctcccactccccactgcctctaacgtggctcccctgtccttacagacctgcctgcatggttccatccattactcatggcctcagcctcatcctggctccactggcctccagctgagagagggaaccagcctgcctcccagggcaagagctccagcctcccgtgtggccgcctccctggagctctgcccagctgtcagcttcccctgggcatcccagccctgggcattgtcttgtgtgcttcctgagggagtagggaaaggaaagggggaggcggctggggaaggggaaagagggaggaaggggaggggcctccatctctaatttcataataaacaaacactttattttgtaaaaaaaaaaa

SEQ ID NO: 431056 - DNA, 1160 bp, Homo sapiens
cgcgcgccattgtgtggctggactcggccgcccctgtggtgtgaggcgcgtgttcgggctcttgccgtccccgcacccgcaccgcggttactggcttgcggtccgccgttcgacaaccagcccttgggtccccgcccgccacggacatgccgcgcgtctacataggacgcctgagctacaacgtccgggagaaggacatccagcgctttttcagtggctatggccgcctcctcgaagtagacctcaaaaatgggtacggcttcgtggagttcgaggactcccgcgacgccgacgacgccgtttacgagctgaacggcaaggagctctgcggcgagcgcgtgatcgtagagcacgcccggggcccgcgtcgcgatcgcgacggctacagctacggaagccgcagtggtggaggtggatacagcagtcggagaacatctggcagagacaaatacggaccacctgttcgtacagaatacaggcttattgtagaaaatctttctagtcggtgcagttggcaagatttaaaggattttatgcgacaagcaggtgaagtaacctatgcggatgcccacaaggaacgaacaaatgagggtgtaattgagtttcgctcctactctgacatgaagcgtgctttggacaaactggatggcacagaaataaatggcagaaatattaggcttattgaagataagccacgcacaagccataggcgatcttactctggaagcagatccaggtctcgatctagaagacggtcacgaagtaggagtcgcaggagcagccgcagtagatctcgaagtatctcaaaaagtcgctcccgttccaggtcgcggagcaaaggtcgatcacgttctcgatcaaaaggcaggaaatctagatcaaagagcaaatctaagcccaagtctgatcggggctcccattcacattctcgaagcagatctaaggatgagtatgagaaatctcgaagcaggtctcggtcccgatcccccaaagaaaatggaaagggtgatataaagtcaaaatccagatcaaggagccagtcccgttccaattcgccgctacctgttccaccctcaaaggcccgttctgtgtgaagctcggagccagattcatgagtcagcaaggaactgagagcctttacagtctggcatcaagctgcc

SEQ ID NO: 431057 - DNA, 1079 bp, Homo sapiens
cgcgcgccattgtgtggctggactcggccgcccctgtggtgtgaggcgcgtgttcgggctcttgccgtccccgcacccgcaccgcggttactggcttgcggtccgccgttcgacaaccagcccttgggtccccgcccgccacggacatgccgcgcgtctacataggacgcctgagctacaacgtccgggagaaggacatccagcgctttttcagtggctatggccgcctcctcgaagtagacctcaaaaatgggtacggcttcgtggagttcgaggactcccgcgacgccgacgacgccgtttacgagctgaacggcaaggagctctgcggcgagcgcgtgatcgtagagcacgcccggggcccgcgtcgcgatcgcgacggctacagctacggaagccgcagtggtggaggtggatacagcagtcggagaacatctggcagagacaaatacggaccacctgttcgtacagaatacaggcttattgtagaaaatctttctagtcggtgcagttggcaagatttaaaggattttatgcgacaagcaggtgaagtaacctatgcggatgcccacaaggaacgaacaaatgagggtgtaattgagtttcgctcctactctgacatgaagcgtgctttggacaaactggatggcacagaaataaatggcagaaatattaggcttattgaagataagccacgcacaagccataggcgatcttactctggaagcagatccaggtctcgatctagaagacggtcacgaagtaggagtcgcaggagcagccgcagtagatctcgaagtatctcaaaaagtcgctcccggtgagaagaatgagttgatgacatgctccataccagtggctagatggagtattaaggtggagcagaaaagaagtgagaacatcttgattcccctttcttttacttgatggtgtttatgaacatgccgtagtgcctttatggccagtttgagtcctgcctactttgacttttacgttcccattcctgtgttaccaccttcctcccgatttgttcacctattttgtgctttaaatctcaataaaatacttactgagggaaa

SEQ ID NO: 431058 - DNA, 3709 bp, Homo sapiens
cgcgcgccattgtgtggctggactcggccgcccctgtggtgtgaggcgcgtgttcgggctcttgccgtccccgcacccgcaccgcggttactggcttgcggtccgccgttcgacaaccagcccttgggtccccgcccgccacggacatgccgcgcgtctacataggacgcctgagctacaacgtccgggagaaggacatccagcgctttttcagtggctatggccgcctcctcgaagtagacctcaaaaatgggtacggcttcgtggagttcgaggactcccgcgacgccgacgacgccgtttacgagctgaacggcaaggagctctgcggcgagcgcgtgatcgtagagcacgcccggggcccgcgtcgcgatcgcgacggctacagctacggaagccgcagtggtggaggtggatacagcagtcggagaacatctggcagagacaaatacggaccacctgttcgtacagaatacaggcttattgtagaaaatctttctagtcggtgcagttggcaagatttaaaggattttatgcgacaagcaggtgaagtaacctatgcggatgcccacaaggaacgaacaaatgagggtgtaattgagtttcgctcctactctgacatgaagcgtgctttggacaaactggatggcacagaaataaatggcagaaatattaggcttattgaagataagccacgcacaagccataggcgatcttactctggaagcagatccaggtctcgatctagaagacggtcacgaagtaggagtcgcaggagcagccgcagtagatctcgaagtatctcaaaaagtcgctcccgttccaggtcgcggagcaaaggtcgatcacgttctcgatcaaaaggcaggaaatctagatcaaagagcaaatctaagcccaagtctgatcggggctcccattcacattctcgaagcagatctaaggatgagtatgagaaatctcgaagcaggtctcggtcccgatcccccaaagaaaatggaaagggtgatataaagtcaaaatccagatcaaggagccagtcccgttccaattcgccgctacctgttccaccctcaaaggcccgttctgtgtcccctccaccaaaaagagctacttcaagatcccgttctagatctcgctcaaagtcaagatcaaggtccaggtcgagttccagagattaactcagaactccttgtttgcacattattatggaacactttcctacttaggcagttactcttccatgtttatacttggcctcttctgcaagaggaatctcttgaaaacaggggcacacagaaatttgatttgtggccaaattggatgaaaaagatgaggctctaaggaaatggtggcatgaagaccctctcccttctttgtagaattaagataactttgattttatagcttttgagctaacgtaacttttgtaaagattaagctcatttagtgttgtttttttttttttttttttttttagtatttcagcaggatctgctggcagggtttttttgttttatttgtttgcttatttttaaattaactgttttgagctttgaatacttaaggctttagagggagaacccaattttcaattatgttggctttttataaagcttgagttatgtaagatttaaataaaagtttgctaccaagatgattgccttattgaataggtcactattaaattcctttaaatgttgatatctgccatttgtggaaacaacgtaaattctacttaagtgtaaacaaggcaagcctcagaccagcaataaattactcagtttggataacattattttgtgcagttaatcaaatttgccaaagtctttatctgcccctttaacaagttgagtaaaaataaaaggtattttttagtcaatgtgttccatgattttgcttaaattaatacttttaagtaatggaacttttttcaaaggcaaatttaaactatttaagaaatagctcctaatacttgggatcttgtttagagaatccactttctggaagttctcagcataattagtgttgagagtggttcagttgtctttaatgtttgtcatgtggaaatggaagtagcctctttttgttctgaaattgagtttattcaaagtgtaaaagcacatactgcattttctgctgaaagatcattatgtttaacaggcacttaatctcagtaaagtcagttgccagttaagttccacccagtagtcagtcccctttgtagttagtgggattatttgataattggttagatcatacttgtaaattttaatgctttgtgtaattggtttgaaaaacagtgaaatgggtaaacgcaaaacttttgtactttattacgagtaaagtgtaatgagtactgtggaaaccaaatttgaatactgcaaatttgtaggagttactaggttagcaattagtccatacatccataagcctgatgagttgaaattgcagtttgagaagtgaattaaccttacatccctttgttcagataccttaaaagttactttatttaaaagcatttattaatcttagtctgaaatcaaaatatagattaattggctcagctttaatacctttctaggaggtgtcacaatgtagggtaccaagggttggattgtgatggggcatggtcgtacactgctcattgtgccacaggtgtgactggaaagcatgatattctagggttggtttgtagattcaaataatccagaaatatacctaataagattgagtgaaaaatttgagtcaaatatctagggcattcacagagtagctgtgagttcttggtaatgtgaaaaaggccttgtttttcagaaattcctgggtttcctgttaaaaaatcttaaagcccaaccttaggaatatagtgccccaaaaggcggatgcttcttccattatcttattttctttgatactttatttaattagatgtttataaagaaatgggtttatttttccagcataaacctcagaatttaaggaaagaaaatgatgtctgttgttatagttcattgttttgcctactcagcagaagtgatgactcttaaaaattggctttgaccaaagttctcttgttttcagggaaagaacataaaagctttttgaactacagcctttttaaaagagggatgggaggatattacagtaagaaattaggctttctaaaagtatgaaacatccttcaactgggctctcttgttaataggacatcatatggtaatagactggtttgactatattgttagctgccacagtaagcaggtcattgtataggtaaatgcctgcacccataattttctagtaatagccacgaccaatttattaacagtcagggcctatccttgcctgtagttctcagtcactggatgcacaaaatcactgtgtaacattggctcacttggtgagcatagggttgactgataaaatgtttaattcccttgctagcttgtgagaagaatgagttgatgacatgctccataccagtggctagatggagtattaaggtggagcagaaaagaagtgagaacatcttgattcccctttcttttacttgatggtgtttatgaacatgccgtagtgcctttatggccagtttgagtcctgcctactttgacttttacgttcccattcctgtgttaccaccttcctcccgatttgttcacctattttgtgctttaaatctcaataaaatacttactgagggaaa

SEQ ID NO: 431059 - DNA, 3977 bp, Homo sapiens
cgcgcgccattgtgtggctggactcggccgcccctgtggtgtgaggcgcgtgttcgggctcttgccgtccccgcacccgcaccgcggttactggcttgcggtccgccgttcgacaaccagcccttgggtccccgcccgccacggacatgccgcgcgtctacataggacgcctgagctacaacgtccgggagaaggacatccagcgctttttcagtggctatggccgcctcctcgaagtagacctcaaaaatgggtacggcttcgtggagttcgaggactcccgcgacgccgacgacgccgtttacgagctgaacggcaaggagctctgcggcgagcgcgtgatcgtagagcacgcccggggcccgcgtcgcgatcgcgacggctacagctacggaagccgcatgaccaatggggctgaggctgtgtccactgaggctaagatgactgcctttcctgattggccttggcttttccatacattgtgtgacccttgccctatgaccctttggctgaccttaccggaagccatgacgacagcagccttttgccattagacgcagggtgatggtgaggattccaagggttagacaaaactggttaatctgaactaggtgactgttaccttgcgtgttttgtggccaaaccaccaccaaaaacctcacactgtgatgtggtggaggtggatacagcagtcggagaacatctggcagagacaaatacggaccacctgttcgtacagaatacaggcttattgtagaaaatctttctagtcggtgcagttggcaagatttaaaggattttatgcgacaagcaggtgaagtaacctatgcggatgcccacaaggaacgaacaaatgagggtgtaattgagtttcgctcctactctgacatgaagcgtgctttggacaaactggatggcacagaaataaatggcagaaatattaggcttattgaagataagccacgcacaagccataggcgatcttactctggaagcagatccaggtctcgatctagaagacggtcacgaagtaggagtcgcaggagcagccgcagtagatctcgaagtatctcaaaaagtcgctcccgttccaggtcgcggagcaaaggtcgatcacgttctcgatcaaaaggcaggaaatctagatcaaagagcaaatctaagcccaagtctgatcggggctcccattcacattctcgaagcagatctaaggatgagtatgagaaatctcgaagcaggtctcggtcccgatcccccaaagaaaatggaaagggtgatataaagtcaaaatccagatcaaggagccagtcccgttccaattcgccgctacctgttccaccctcaaaggcccgttctgtgtcccctccaccaaaaagagctacttcaagatcccgttctagatctcgctcaaagtcaagatcaaggtccaggtcgagttccagagattaactcagaactccttgtttgcacattattatggaacactttcctacttaggcagttactcttccatgtttatacttggcctcttctgcaagaggaatctcttgaaaacaggggcacacagaaatttgatttgtggccaaattggatgaaaaagatgaggctctaaggaaatggtggcatgaagaccctctcccttctttgtagaattaagataactttgattttatagcttttgagctaacgtaacttttgtaaagattaagctcatttagtgttgtttttttttttttttttttttttagtatttcagcaggatctgctggcagggtttttttgttttatttgtttgcttatttttaaattaactgttttgagctttgaatacttaaggctttagagggagaacccaattttcaattatgttggctttttataaagcttgagttatgtaagatttaaataaaagtttgctaccaagatgattgccttattgaataggtcactattaaattcctttaaatgttgatatctgccatttgtggaaacaacgtaaattctacttaagtgtaaacaaggcaagcctcagaccagcaataaattactcagtttggataacattattttgtgcagttaatcaaatttgccaaagtctttatctgcccctttaacaagttgagtaaaaataaaaggtattttttagtcaatgtgttccatgattttgcttaaattaatacttttaagtaatggaacttttttcaaaggcaaatttaaactatttaagaaatagctcctaatacttgggatcttgtttagagaatccactttctggaagttctcagcataattagtgttgagagtggttcagttgtctttaatgtttgtcatgtggaaatggaagtagcctctttttgttctgaaattgagtttattcaaagtgtaaaagcacatactgcattttctgctgaaagatcattatgtttaacaggcacttaatctcagtaaagtcagttgccagttaagttccacccagtagtcagtcccctttgtagttagtgggattatttgataattggttagatcatacttgtaaattttaatgctttgtgtaattggtttgaaaaacagtgaaatgggtaaacgcaaaacttttgtactttattacgagtaaagtgtaatgagtactgtggaaaccaaatttgaatactgcaaatttgtaggagttactaggttagcaattagtccatacatccataagcctgatgagttgaaattgcagtttgagaagtgaattaaccttacatccctttgttcagataccttaaaagttactttatttaaaagcatttattaatcttagtctgaaatcaaaatatagattaattggctcagctttaatacctttctaggaggtgtcacaatgtagggtaccaagggttggattgtgatggggcatggtcgtacactgctcattgtgccacaggtgtgactggaaagcatgatattctagggttggtttgtagattcaaataatccagaaatatacctaataagattgagtgaaaaatttgagtcaaatatctagggcattcacagagtagctgtgagttcttggtaatgtgaaaaaggccttgtttttcagaaattcctgggtttcctgttaaaaaatcttaaagcccaaccttaggaatatagtgccccaaaaggcggatgcttcttccattatcttattttctttgatactttatttaattagatgtttataaagaaatgggtttatttttccagcataaacctcagaatttaaggaaagaaaatgatgtctgttgttatagttcattgttttgcctactcagcagaagtgatgactcttaaaaattggctttgaccaaagttctcttgttttcagggaaagaacataaaagctttttgaactacagcctttttaaaagagggatgggaggatattacagtaagaaattaggctttctaaaagtatgaaacatccttcaactgggctctcttgttaataggacatcatatggtaatagactggtttgactatattgttagctgccacagtaagcaggtcattgtataggtaaatgcctgcacccataattttctagtaatagccacgaccaatttattaacagtcagggcctatccttgcctgtagttctcagtcactggatgcacaaaatcactgtgtaacattggctcacttggtgagcatagggttgactgataaaatgtttaattcccttgctagcttgtgagaagaatgagttgatgacatgctccataccagtggctagatggagtattaaggtggagcagaaaagaagtgagaacatcttgattcccctttcttttacttgatggtgtttatgaacatgccgtagtgcctttatggccagtttgagtcctgcctactttgacttttacgttcccattcctgtgttaccaccttcctcccgatttgttcacctattttgtgctttaaatctcaataaaatacttactgagggaaa

SEQ ID NO: 431060 - DNA, 3655 bp, Homo sapiens
cgcgcgccattgtgtggctggactcggccgcccctgtggtgtgaggcgcgtgttcgggctcttgccgtccccgcacccgcaccgcggttactggcttgcggtccgccgttcgacaaccagcccttgggtccccgcccgccacggacatgccgcgcgtctacataggacgcctgagctacaacgtccgggagaaggacatccagcgctttttcagtggctatggccgcctcctcgaagtagacctcaaaaatgggtacggcttcgtggagttcgaggactcccgcgacgccgacgacgccgtttacgagctgaacggcaaggagctctgcggcgagcgcgtgatcgtagagcacgcccggggcccgcgtcgcgatcgcgacggctacagctacggaagccgcagtggtggaggtggatacagcagtcggagaacatctggcagagacaaatacggaccacctgttcgtacagaatacaggcttattgtagaaaatctttctagtcggtgcagttggcaagatttaaaggattttatgcgacaagcaggtgaagtaacctatgcggatgcccacaaggaacgaacaaatgagggtgtaattgagtttcgctcctactctgacatgaagcgtgctttggacaaactggatggcacagaaataaatggcagaaatattaggcttattgaagataagccacgcacaagccataggcgatcttactctggaagcagatccaggtctcgatctagaagacggtcacgaagtaggagtcgcaggagcagccgcagtagatctcgaagtatctcaaaaagtcgctcccgttccaggtcgcggagcaaaggtcgatcacgttctcgatcaaaaggcaggaaatctagatcaaagagcaaatctaagcccaagtctgatcggggctcccattcacattctcgaagcagatctaaggatgagtatgagaaatctcgaagcaggtctcggtcccgatcccccaaagaaaatggaaagggtgatataaagtcaaaatccagatcaaggagccagtcccgttccaattcgccgctacctgttccaccctcaaaggcccgttctgtgtcccctccaccaaaaagagctacttcaagatcccgttctagatctcgctcaaagtcaagatcaaggtccaggtcgagttccagagattaactcagaactccttgtttgcacattattatggaacactttcctacttaggcagttactcttccatgtttatacttggcctcttctgcaagaggaatctcttgaaaacaggggcacacagaaatttgatttgtggccaaattggatgaaaaagatgaggctctaaggaaatggtggcatgaagaccctctcccttctttgtagaattaagataactttgattttatagcttttgagctaacgtaacttttgtaaagattaagctcatttagtgttgtttttttttttttttttttttttagtatttcagcaggatctgctggcagggtttttttgttttatttgtttgcttatttttaaattaactgttttgagctttgaatacttaaggctttagagggagaacccaattttcaattatgttggctttttataaagcttgagttatgtaagatttaaataaaagtttgctaccaagatgattgccttattgaataggtcactattaaattcctttaaatgttgatatctgccatttgtggaaacaacgtaaattctacttaagtgtaaacaaggcaagcctcagaccagcaataaattactcagtttggataacattattttgtgcagttaatcaaatttgccaaagtctttatctgcccctttaacaagttgagtaaaaataagtaatggaacttttttcaaaggcaaatttaaactatttaagaaatagctcctaatacttgggatcttgtttagagaatccactttctggaagttctcagcataattagtgttgagagtggttcagttgtctttaatgtttgtcatgtggaaatggaagtagcctctttttgttctgaaattgagtttattcaaagtgtaaaagcacatactgcattttctgctgaaagatcattatgtttaacaggcacttaatctcagtaaagtcagttgccagttaagttccacccagtagtcagtcccctttgtagttagtgggattatttgataattggttagatcatacttgtaaattttaatgctttgtgtaattggtttgaaaaacagtgaaatgggtaaacgcaaaacttttgtactttattacgagtaaagtgtaatgagtactgtggaaaccaaatttgaatactgcaaatttgtaggagttactaggttagcaattagtccatacatccataagcctgatgagttgaaattgcagtttgagaagtgaattaaccttacatccctttgttcagataccttaaaagttactttatttaaaagcatttattaatcttagtctgaaatcaaaatatagattaattggctcagctttaatacctttctaggaggtgtcacaatgtagggtaccaagggttggattgtgatggggcatggtcgtacactgctcattgtgccacaggtgtgactggaaagcatgatattctagggttggtttgtagattcaaataatccagaaatatacctaataagattgagtgaaaaatttgagtcaaatatctagggcattcacagagtagctgtgagttcttggtaatgtgaaaaaggccttgtttttcagaaattcctgggtttcctgttaaaaaatcttaaagcccaaccttaggaatatagtgccccaaaaggcggatgcttcttccattatcttattttctttgatactttatttaattagatgtttataaagaaatgggtttatttttccagcataaacctcagaatttaaggaaagaaaatgatgtctgttgttatagttcattgttttgcctactcagcagaagtgatgactcttaaaaattggctttgaccaaagttctcttgttttcagggaaagaacataaaagctttttgaactacagcctttttaaaagagggatgggaggatattacagtaagaaattaggctttctaaaagtatgaaacatccttcaactgggctctcttgttaataggacatcatatggtaatagactggtttgactatattgttagctgccacagtaagcaggtcattgtataggtaaatgcctgcacccataattttctagtaatagccacgaccaatttattaacagtcagggcctatccttgcctgtagttctcagtcactggatgcacaaaatcactgtgtaacattggctcacttggtgagcatagggttgactgataaaatgtttaattcccttgctagcttgtgagaagaatgagttgatgacatgctccataccagtggctagatggagtattaaggtggagcagaaaagaagtgagaacatcttgattcccctttcttttacttgatggtgtttatgaacatgccgtagtgcctttatggccagtttgagtcctgcctactttgacttttacgttcccattcctgtgttaccaccttcctcccgatttgttcacctattttgtgctttaaatctcaataaaatacttactgagggaaa

SEQ ID NO: 431061 - DNA, 3655 bp, Homo sapiens
cgcgcgccattgtgtggctggactcggccgcccctgtggtgtgaggcgcgtgttcgggctcttgccgtccccgcacccgcaccgcggttactggcttgcggtccgccgttcgacaaccagcccttgggtccccgcccgccacggacatgccgcgcgtctacataggacgcctgagctacaacgtccgggagaaggacatccagcgctttttcagtggctatggccgcctcctcgaagtagacctcaaaaatgggtacggcttcgtggagttcgaggactcccgcgacgccgacgacgccgtttacgagctgaacggcaaggagctctgcggcgagcgcgtgatcgtagagcacgcccggggcccgcgtcgcgatcgcgacggctacagctacggaagccgcagtggtggaggtggatacagcagtcggagaacatctggcagagacaaatacggaccacctgttcgtacagaatacaggcttattgtagaaaatctttctagtcggtgcagttggcaagatttaaaggattttatgcgacaagcaggtgaagtaacctatgcggatgcccacaaggaacgaacaaatgagggtgtaattgagtttcgctcctactctgacatgaagcgtgctttggacaaactggatggcacagaaataaatggcagaaatattaggcttattgaagataagccacgcacaagccataggcgatcttactctggaagcagatccaggtctcgatctagaagacggtcacgaagtaggagtcgcaggagcagccgcagtagatctcgaagtatctcaaaaagtcgctcccgttccaggtcgcggagcaaaggtcgatcacgttctcgatcaaaaggcaggaaatctagatcaaagagcaaatctaagcccaagtctgatcggggctcccattcacattctcgaagcagatctaaggatgagtatgagaaatctcgaagcaggtctcggtcccgatcccccaaagaaaatggaaagggtgatataaagtcaaaatccagatcaaggagccagtcccgttccaattcgccgctacctgttccaccctcaaaggcccgttctgtgtcccctccaccaaaaagagctacttcaagatcccgttctagatctcgctcaaagtcaagatcaaggtccaggtcgagttccagagattaactcagaactccttgtttgcacattattatggaacactttcctacttaggcagttactcttccatgtttatacttggcctcttctgcaagaggaatctcttgaaaacaggggcacacagaaatttgatttgtggccaaattggatgaaaaagatgaggctctaaggaaatggtggcatgaagaccctctcccttctttgtagaattaagataactttgattttatagcttttgagctaacgtaacttttgtaaagattaagctcatttagtgttgtttttttttttttttttttttttagtatttcagcaggatctgctggcagggtttttttgttttatttgtttgcttatttttaaattaactgttttgagctttgaatacttaaggctttagagggagaacccaattttcaattatgttggctttttataaagcttgagttatgtaagatttaaataaaagtttgctaccaagatgattgccttattgaataggtcactattaaattcctttaaatgttgatatctgccatttgtggaaacaacgtaaattctacttaagtgtaaacaaggcaagcctcagaccagcaataaattactcagtttggataacattattttgtgcagttaatcaaatttgccaaagtctttatctgcccctttaacaagttgagtaaaaataaaaggtattttttagtcaatgtgttccatgattttgcttaaattaatacttttaagtaatggaacttttttcaaaggcaaatttaaactatttaagaaatagctcctaatacttgggatcttgtttagagaatccactttctggaagttctcagcataattagtgttgagagtggttcagttgtctttaatgtttgtcatgtggaaatggaagtagcctctttttgttctgaaattgagtttattcaaagtgtaaaagcacatactgcattttctgctgaaagatcattatgtttaacaggcacttaatctcagtaaagtcagttgccagttaagttccacccagtagtcagtcccctttgtagttagtgggattatttgataattggttagatcatacttgtaaattttaatgctttgtgtaattggtttgaaaaacagtgaaatgggtaaacgctttgaatactgcaaatttgtaggagttactaggttagcaattagtccatacatccataagcctgatgagttgaaattgcagtttgagaagtgaattaaccttacatccctttgttcagataccttaaaagttactttatttaaaagcatttattaatcttagtctgaaatcaaaatatagattaattggctcagctttaatacctttctaggaggtgtcacaatgtagggtaccaagggttggattgtgatggggcatggtcgtacactgctcattgtgccacaggtgtgactggaaagcatgatattctagggttggtttgtagattcaaataatccagaaatatacctaataagattgagtgaaaaatttgagtcaaatatctagggcattcacagagtagctgtgagttcttggtaatgtgaaaaaggccttgtttttcagaaattcctgggtttcctgttaaaaaatcttaaagcccaaccttaggaatatagtgccccaaaaggcggatgcttcttccattatcttattttctttgatactttatttaattagatgtttataaagaaatgggtttatttttccagcataaacctcagaatttaaggaaagaaaatgatgtctgttgttatagttcattgttttgcctactcagcagaagtgatgactcttaaaaattggctttgaccaaagttctcttgttttcagggaaagaacataaaagctttttgaactacagcctttttaaaagagggatgggaggatattacagtaagaaattaggctttctaaaagtatgaaacatccttcaactgggctctcttgttaataggacatcatatggtaatagactggtttgactatattgttagctgccacagtaagcaggtcattgtataggtaaatgcctgcacccataattttctagtaatagccacgaccaatttattaacagtcagggcctatccttgcctgtagttctcagtcactggatgcacaaaatcactgtgtaacattggctcacttggtgagcatagggttgactgataaaatgtttaattcccttgctagcttgtgagaagaatgagttgatgacatgctccataccagtggctagatggagtattaaggtggagcagaaaagaagtgagaacatcttgattcccctttcttttacttgatggtgtttatgaacatgccgtagtgcctttatggccagtttgagtcctgcctactttgacttttacgttcccattcctgtgttaccaccttcctcccgatttgttcacctattttgtgctttaaatctcaataaaatacttactgagggaaa

SEQ ID NO: 431062 - DNA, 3312 bp, Homo sapiens
ctgttttcaagagattcctcttgcagaagaggccaagtataaacatggaagagtaactgcctaagtaggaaagtgttccataataatgtgcaaacaaggagttctgagttaatctctggaactcgacctggaccttgatcttgactttgagcgagatctagaacgggatcttgaagtagctctttttggtggaggggacacagaacgggcctttgagggtggaacaggtagcggcgaattgaaactggatggcacagaaataaatggcagaaatattaggcttattgaagataagccacgcacaagccataggcgatcttactctggaagcagatccaggtctcgatctagaagacggtcacgaagtaggagtcgcaggagcagccgcagtagatctcgaagtatctcaaaaagtcgctcccgttccaggtcgcggagcaaaggtcgatcacgttctcgatcaaaaggcaggaaatctagatcaaagagcaaatctaagcccaagtctgatcggggctcccattcacattctcgaagcagatctaaggatgagtatgagaaatctcgaagcaggtctcggtcccgatcccccaaagaaaatggaaagggtgatataaagtcaaaatccagatcaaggagccagtcccgttccaattcgccgctacctgttccaccctcaaaggcccgttctgtgtcccctccaccaaaaagagctacttcaagatcccgttctagatctcgctcaaagtcaagatcaaggtccaggtcgagttccagagattaactcagaactccttgtttgcacattattatggaacactttcctacttaggcagttactcttccatgtttatacttggcctcttctgcaagaggaatctcttgaaaacaggggcacacagaaatttgatttgtggccaaattggatgaaaaagatgaggctctaaggaaatggtggcatgaagaccctctcccttctttgtagaattaagataactttgattttatagcttttgagctaacgtaacttttgtaaagattaagctcatttagtgttgtttttttttttttttttttttttagtatttcagcaggatctgctggcagggtttttttgttttatttgtttgcttatttttaaattaactgttttgagctttgaatacttaaggctttagagggagaacccaattttcaattatgttggctttttataaagcttgagttatgtaagatttaaataaaagtttgctaccaagatgattgccttattgaataggtcactattaaattcctttaaatgttgatatctgccatttgtggaaacaacgtaaattctacttaagtgtaaacaaggcaagcctcagaccagcaataaattactcagtttggataacattattttgtgcagttaatcaaatttgccaaagtctttatctgcccctttaacaagttgagtaaaaataaaaggtattttttagtcaatgtgttccatgattttgcttaaattaatacttttaagtaatggaacttttttcaaaggcaaatttaaactatttaagaaatagctcctaatacttgggatcttgtttagagaatccactttctggaagttctcagcataattagtgttgagagtggttcagttgtctttaatgtttgtcatgtggaaatggaagtagcctctttttgttctgaaattgagtttattcaaagtgtaaaagcacatactgcattttctgctgaaagatcattatgtttaacaggcacttaatctcagtaaagtcagttgccagttaagttccacccagtagtcagtcccctttgtagttagtgggattatttgataattggttagatcatacttgtaaattttaatgctttgtgtaattggtttgaaaaacagtgaaatgggtaaacgcaaaacttttgtactttattacgagtaaagtgtaatgagtactgtggaaaccaaatttgaatactgcaaatttgtaggagttactaggttagcaattagtccatacatccataagcctgatgagttgaaattgcagtttgagaagtgaattaaccttacatccctttgttcagataccttaaaagttactttatttaaaagcatttattaatcttagtctgaaatcaaaatatagattaattggctcagctttaatacctttctaggaggtgtcacaatgtagggtaccaagggttggattgtgatggggcatggtcgtacactgctcattgtgccacaggtgtgactggaaagcatgatattctagggttggtttgtagattcaaataatccagaaatatacctaataagattgagtgaaaaatttgagtcaaatatctagggcattcacagagtagctgtgagttcttggtaatgtgaaaaaggccttgtttttcagaaattcctgggtttcctgttaaaaaatcttaaagcccaaccttaggaatatagtgccccaaaaggcggatgcttcttccattatcttattttctttgatactttatttaattagatgtttataaagaaatgggtttatttttccagcataaacctcagaatttaaggaaagaaaatgatgtctgttgttatagttcattgttttgcctactcagcagaagtgatgactcttaaaaattggctttgaccaaagttctcttgttttcagggaaagaacataaaagctttttgaactacagcctttttaaaagagggatgggaggatattacagtaagaaattaggctttctaaaagtatgaaacatccttcaactgggctctcttgttaataggacatcatatggtaatagactggtttgactatattgttagctgccacagtaagcaggtcattgtataggtaaatgcctgcacccataattttctagtaatagccacgaccaatttattaacagtcagggcctatccttgcctgtagttctcagtcactggatgcacaaaatcactgtgtaacattggctcacttggtgagcatagggttgactgataaaatgtttaattcccttgctagcttgtgagaagaatgagttgatgacatgctccataccagtggctagatggagtattaaggtggagcagaaaagaagtgagaacatcttgattcccctttcttttacttgatggtgtttatgaacatgccgtagtgcctttatggccagtttgagtcctgcctactttgacttttacgttcccattcctgtgttaccaccttcctcccgatttgttcacctattttgtgctttaaatctcaataaaatacttactgagggaaa

SEQ ID NO: 431063 - DNA, 3139 bp, Homo sapiens
tgttgtatttgatgtttcagactacctatctactgtatagtcaatgagtgctatagtgacaatactggaatagtacagaaataagtggcataaatatcaagctcattgaccataaggctatcaccataccctaggccagcttactctgtgcagcagctccggtgctttcgcatcttacatgagtgacaagaagtaggagtcgcaggagcagccgcagtagatctcgaagtatctcaaaaagtcgctcccgttccaggtcgcggagcaaaggtcgatcacgttctcgatcaaaaggcaggaaatctagatcaaagagcaaatctaagcccaagtctgatcggggctcccattcacattctcgaagcagatctaaggatgagtatgagaaatctcgaagcaggtctcggtcccgatcccccaaagaaaatggaaagggtgatataaagtcaaaatccagatcaaggagccagtcccgttccaattcgccgctacctgttccaccctcaaaggcccgttctgtgtcccctccaccaaaaagagctacttcaagatcccgttctagatctcgctcaaagtcaagatcaaggtccaggtcgagttccagagattaactcagaactccttgtttgcacattattatggaacactttcctacttaggcagttactcttccatgtttatacttggcctcttctgcaagaggaatctcttgaaaacaggggcacacagaaatttgatttgtggccaaattggatgaaaaagatgaggctctaaggaaatggtggcatgaagaccctctcccttctttgtagaattaagataactttgattttatagcttttgagctaacgtaacttttgtaaagattaagctcatttagtgttgtttttttttttttttttttttttagtatttcagcaggatctgctggcagggtttttttgttttatttgtttgcttatttttaaattaactgttttgagctttgaatacttaaggctttagagggagaacccaattttcaattatgttggctttttataaagcttgagttatgtaagatttaaataaaagtttgctaccaagatgattgccttattgaataggtcactattaaattcctttaaatgttgatatctgccatttgtggaaacaacgtaaattctacttaagtgtaaacaaggcaagcctcagaccagcaataaattactcagtttggataacattattttgtgcagttaatcaaatttgccaaagtctttatctgcccctttaacaagttgagtaaaaataaaaggtattttttagtcaatgtgttccatgattttgcttaaattaatacttttaagtaatggaacttttttcaaaggcaaatttaaactatttaagaaatagctcctaatacttgggatcttgtttagagaatccactttctggaagttctcagcataattagtgttgagagtggttcagttgtctttaatgtttgtcatgtggaaatggaagtagcctctttttgttctgaaattgagtttattcaaagtgtaaaagcacatactgcattttctgctgaaagatcattatgtttaacaggcacttaatctcagtaaagtcagttgccagttaagttccacccagtagtcagtcccctttgtagttagtgggattatttgataattggttagatcatacttgtaaattttaatgctttgtgtaattggtttgaaaaacagtgaaatgggtaaacgcaaaacttttgtactttattacgagtaaagtgtaatgagtactgtggaaaccaaatttgaatactgcaaatttgtaggagttactaggttagcaattagtccatacatccataagcctgatgagttgaaattgcagtttgagaagtgaattaaccttacatccctttgttcagataccttaaaagttactttatttaaaagcatttattaatcttagtctgaaatcaaaatatagattaattggctcagctttaatacctttctaggaggtgtcacaatgtagggtaccaagggttggattgtgatggggcatggtcgtacactgctcattgtgccacaggtgtgactggaaagcatgatattctagggttggtttgtagattcaaataatccagaaatatacctaataagattgagtgaaaaatttgagtcaaatatctagggcattcacagagtagctgtgagttcttggtaatgtgaaaaaggccttgtttttcagaaattcctgggtttcctgttaaaaaatcttaaagcccaaccttaggaatatagtgccccaaaaggcggatgcttcttccattatcttattttctttgatactttatttaattagatgtttataaagaaatgggtttatttttccagcataaacctcagaatttaaggaaagaaaatgatgtctgttgttatagttcattgttttgcctactcagcagaagtgatgactcttaaaaattggctttgaccaaagttctcttgttttcagggaaagaacataaaagctttttgaactacagcctttttaaaagagggatgggaggatattacagtaagaaattaggctttctaaaagtatgaaacatccttcaactgggctctcttgttaataggacatcatatggtaatagactggtttgactatattgttagctgccacagtaagcaggtcattgtataggtaaatgcctgcacccataattttctagtaatagccacgaccaatttattaacagtcagggcctatccttgcctgtagttctcagtcactggatgcacaaaatcactgtgtaacattggctcacttggtgagcatagggttgactgataaaatgtttaattcccttgctagcttgtgagaagaatgagttgatgacatgctccataccagtggctagatggagtattaaggtggagcagaaaagaagtgagaacatcttgattcccctttcttttacttgatggtgtttatgaacatgccgtagtgcctttatggccagtttgagtcctgcctactttgacttttacgttcccattcctgtgttaccaccttcctcccgatttgttcacctattttgtgctttaaatctcaataaaatacttactgagggaaa

SEQ ID NO: 431064 - DNA, 2848 bp, Homo sapiens
tcctgccttccttccgggccgactttaaagaatccctcactctcacacacacctcccattcacattctcgaagcagatctaaggatgagtatgagaaatctcgaagcaggtctcggtcccgatcccccaaagaaaatggaaagggtgatataaagtcaaaatccagatcaaggagccagtcccgttccaattcgccgctacctgttccaccctcaaaggcccgttctgtgtcccctccaccaaaaagagctacttcaagatcccgttctagatctcgctcaaagtcaagatcaaggtccaggtcgagttccagagattaactcagaactccttgtttgcacattattatggaacactttcctacttaggcagttactcttccatgtttatacttggcctcttctgcaagaggaatctcttgaaaacaggggcacacagaaatttgatttgtggccaaattggatgaaaaagatgaggctctaaggaaatggtggcatgaagaccctctcccttctttgtagaattaagataactttgattttatagcttttgagctaacgtaacttttgtaaagattaagctcatttagtgttgtttttttttttttttttttttttagtatttcagcaggatctgctggcagggtttttttgttttatttgtttgcttatttttaaattaactgttttgagctttgaatacttaaggctttagagggagaacccaattttcaattatgttggctttttataaagcttgagttatgtaagatttaaataaaagtttgctaccaagatgattgccttattgaataggtcactattaaattcctttaaatgttgatatctgccatttgtggaaacaacgtaaattctacttaagtgtaaacaaggcaagcctcagaccagcaataaattactcagtttggataacattattttgtgcagttaatcaaatttgccaaagtctttatctgcccctttaacaagttgagtaaaaataaaaggtattttttagtcaatgtgttccatgattttgcttaaattaatacttttaagtaatggaacttttttcaaaggcaaatttaaactatttaagaaatagctcctaatacttgggatcttgtttagagaatccactttctggaagttctcagcataattagtgttgagagtggttcagttgtctttaatgtttgtcatgtggaaatggaagtagcctctttttgttctgaaattgagtttattcaaagtgtaaaagcacatactgcattttctgctgaaagatcattatgtttaacaggcacttaatctcagtaaagtcagttgccagttaagttccacccagtagtcagtcccctttgtagttagtgggattatttgataattggttagatcatacttgtaaattttaatgctttgtgtaattggtttgaaaaacagtgaaatgggtaaacgcaaaacttttgtactttattacgagtaaagtgtaatgagtactgtggaaaccaaatttgaatactgcaaatttgtaggagttactaggttagcaattagtccatacatccataagcctgatgagttgaaattgcagtttgagaagtgaattaaccttacatccctttgttcagataccttaaaagttactttatttaaaagcatttattaatcttagtctgaaatcaaaatatagattaattggctcagctttaatacctttctaggaggtgtcacaatgtagggtaccaagggttggattgtgatggggcatggtcgtacactgctcattgtgccacaggtgtgactggaaagcatgatattctagggttggtttgtagattcaaataatccagaaatatacctaataagattgagtgaaaaatttgagtcaaatatctagggcattcacagagtagctgtgagttcttggtaatgtgaaaaaggccttgtttttcagaaattcctgggtttcctgttaaaaaatcttaaagcccaaccttaggaatatagtgccccaaaaggcggatgcttcttccattatcttattttctttgatactttatttaattagatgtttataaagaaatgggtttatttttccagcataaacctcagaatttaaggaaagaaaatgatgtctgttgttatagttcattgttttgcctactcagcagaagtgatgactcttaaaaattggctttgaccaaagttctcttgttttcagggaaagaacataaaagctttttgaactacagcctttttaaaagagggatgggaggatattacagtaagaaattaggctttctaaaagtatgaaacatccttcaactgggctctcttgttaataggacatcatatggtaatagactggtttgactatattgttagctgccacagtaagcaggtcattgtataggtaaatgcctgcacccataattttctagtaatagccacgaccaatttattaacagtcagggcctatccttgcctgtagttctcagtcactggatgcacaaaatcactgtgtaacattggctcacttggtgagcatagggttgactgataaaatgtttaattcccttgctagcttgtgagaagaatgagttgatgacatgctccataccagtggctagatggagtattaaggtggagcagaaaagaagtgagaacatcttgattcccctttcttttacttgatggtgtttatgaacatgccgtagtgcctttatggccagtttgagtcctgcctactttgacttttacgttcccattcctgtgttaccaccttcctcccgatttgttcacctattttgtgctttaaatctcaataaaatacttactgagggaaa

SEQ ID NO: 431065 - DNA, 3598 bp, Homo sapiens
cgcgcgccattgtgtggctggactcggccgcccctgtggtgtgaggcgcgtgttcgggctcttgccgtccccgcacccgcaccgcggttactggcttgcggtccgccgttcgacaaccagcccttgggtccccgcccgccacggacatgccgcgcgtctacataggacgcctgagctacaacgtccgggagaaggacatccagcgctttttcagtggctatggccgcctcctcgaagtagacctcaaaaatgggtacggcttcgtggagttcgaggactcccgcgacgccgacgacgccgtttacgagctgaacggcaaggagctctgcggcgagcgcgtgatcgtagagcacgcccggggcccgcgtcgcgatcgcgacggctacagctacggaagccgcagtggtggaggtggatacagcagtcggagaacatctggcagagacaaatacggaccacctgttcgtacagaatacaggcttattgtagaaaatctttctagtcggtgcagttggcaagatttaaaggattttatgcgacaagcaggtgaagtaacctatgcggatgcccacaaggaacgaacaaatgagggtgtaattgagtttcgctcctactctgacatgaagcgtgctttggacaaactggatggcacagaaataaatggcagaaatattaggcttattgaagataagccacgcacaagccataggcgatcttactctggaagcagatccaggtctcgatctagaagacggtcacgaagtaggagtcgcaggagcagccgcagtagatctcgaagtatctcaaaaagtcgctcccgttccaggtcgcggagcaaaggtcgatcacgttctcgatcaaaaggcaggaaatctagatcaaagagcaaatctaagcccaagtctgatcggggctcccattcacattctcgaagcagatctaaggatgagtatgagaaatctcgaagcaggtctcggtcccgatcccccaaagaaaatggaaagggtgatataaagtcaaaatccagatcaaggagccagtcccgttccaattcgccgctacctgttccaccctcaaaggcccgttctgtgtcccctccaccaaaaagagctacttcaagatcccgttctagatctcgctcaaagtcaagatcaaggtccaggtcgagttccagagattaactcagaactccttgtttgcacattattatggaacactttcctacttaggcagttactcttccatgtttatacttggcctcttctgcaagaggaatctcttgaaaacaggggcacacagaaatttgatttgtggccaaattggatgaaaaagatgaggctctaaggaaatggtggcatgaagaccctctcccttctttgtagaattaagataactttgattttatagcttttgagctaacgtaacttttgtaaagattaagctcatttagtgttgtttttttttttttttttttttttagtatttcagcaggatctgctggcagggtttttttgttttatttgtttgcttatttttaaattaactgttttgagctttgaatacttaaggctttagagggagaacccaattttcaattatgttggctttttataaagcttgagttatgtaagatttaaataaaagtttgctaccaagatgattgccttattgaataggtcactattaaattcctttaaatgttgatatctgccatttgtggaaacaacgtaaattctacttaagtgtaaacaaggcaagcctcagaccagcaataaattactcagtttggataacattattttgtgcagttaatcaaatttgccaaagtctttatctgcccctttaacaagttgagtaaaaataaaaggtattttttagtcaatgtgttccatgattttgcttaaattaatacttttaagtaatggaacttttttcaaaggcaaatttaaactatttaagaaatagctcctaatacttgggatcttgtttagagaatccactttctggaagttctcagcataattagtgttgagagtggttcagttgtctttaatgtttgtcatgtggaaatggaagtagcctctttttgttctgaaattgagtttattcaaagtgtaaaagcacatactgcattttctgctgaaagatcattatgtttaacaggcacttaatctcagtaaagtcagttgccagttaagttccacccagtagtcagtcccctttgtagttagtgggattatttgataattggttagatcatacttgtaaattttaatgctttgtgtaattggtttgaaaaacagtgaaatgggtaaacgcaaaacttttgtactttattacgagtaaagtgtaatgagtactgtggaaaccaaatttgaatactgcaaatttgtaggagttactaggttagcaattagtccatacatccataagcctgatgagttgaaattgcagtttgagaagtgaattaaccttacatccctttgttcagataccttaaaagttactttatttaaaagcatttattaatcttagtctgaaatcaaaatatagattaattggctcagctttaatacctttctaggaggtgtcacaatgtagggtaccaagggttggattgtgatggggcatggtcgtacactgctcattgtgccacaggtgtgactggaaagcatgatattctagggttggtttgtagattcaaataatccagaaatatacctaataagattgagtgaaaaatttgagtcaaatatctagggcattcacagagtagctgtgagttcttggtaatgtgaaaaaggccttgtttttcagaaattcctgggtttcctgttaaaaaatcttaaagcccaaccttaggaatatagtgccccaaaaggcggatgcttcttccattatcttattttctttgatactttatttaattagatgtttataaagaaatgggtttatttttccagcataaacctcagaatttaaggaaagaaaatgatgtctgttgttatagttcattgttttgcctactcagcagaagtgatgactcttaaaaattggctttgaccaaagttctcttgttttcagggaaagaacataaaagctttttgaactatagactggtttgactatattgttagctgccacagtaagcaggtcattgtataggtaaatgcctgcacccataattttctagtaatagccacgaccaatttattaacagtcagggcctatccttgcctgtagttctcagtcactggatgcacaaaatcactgtgtaacattggctcacttggtgagcatagggttgactgataaaatgtttaattcccttgctagcttgtgagaagaatgagttgatgacatgctccataccagtggctagatggagtattaaggtggagcagaaaagaagtgagaacatcttgattcccctttcttttacttgatggtgtttatgaacatgccgtagtgcctttatggccagtttgagtcctgcctactttgacttttacgttcccattcctgtgttaccaccttcctcccgatttgttcacctattttgtgctttaaatctcaataaaatacttactgagggaaa

SEQ ID NO: 431066 - DNA, 3880 bp, Homo sapiens
  misc_feature (3602)..(3603): n is a, c, g, or t
  misc_feature (3605)..(3605): n is a, c, g, or t
cgcgcgccattgtgtggctggactcggccgcccctgtggtgtgaggcgcgtgttcgggctcttgccgtccccgcacccgcaccgcggttactggcttgcggtccgccgttcgacaaccagcccttgggtccccgcccgccacggacatgccgcgcgtctacataggacgcctgagctacaacgtccgggagaaggacatccagcgctttttcagtggctatggccgcctcctcgaagtagacctcaaaaatgggtacggcttcgtggagttcgaggactcccgcgacgccgacgacgccgtttacgagctgaacggcaaggagctctgcggcgagcgcgtgatcgtagagcacgcccggggcccgcgtcgcgatcgcgacggctacagctacggaagccgcagtggtggaggtggatacagcagtcggagaacatctggcagagacaaatacggaccacctgttcgtacagaatacaggcttattgtagaaaatctttctagtcggtgcagttggcaagatttaaaggattttatgcgacaagcaggtgaagtaacctatgcggatgcccacaaggaacgaacaaatgagggtgtaattgagtttcgctcctactctgacatgaagcgtgctttggacaaactggatggcacagaaataaatggcagaaatattaggcttattgaagataagccacgcacaagccataggcgatcttactctggaagcagatccaggtctcgatctagaagacggtcacgaagtaggagtcgcaggagcagccgcagtagatctcgaagtatctcaaaaagtcgctcccgttccaggtcgcggagcaaaggtcgatcacgttctcgatcaaaaggcaggaaatctagatcaaagagcaaatctaagcccaagtctgatcggggctcccattcacattctcgaagcagatctaaggatgagtatgagaaatctcgaagcaggtctcggtcccgatcccccaaagaaaatggaaagggtgatataaagtcaaaatccagatcaaggagccagtcccgttccaattcgccgctacctgttccaccctcaaaggcccgttctgtgtcccctccaccaaaaagagctacttcaagatcccgttctagatctcgctcaaagtcaagatcaaggtccaggtcgagttccagagattaactcagaactccttgtttgcacattattatggaacactttcctacttaggcagttactcttccatgtttatacttggcctcttctgcaagaggaatctcttgaaaacaggggcacacagaaatttgatttgtggccaaattggatgaaaaagatgaggctctaaggaaatggtggcatgaagaccctctcccttctttgtagaattaagataactttgattttatagcttttgagctaacgtaacttttgtaaagattaagctcatttagtgttgtttttttttttttttttttttttagtatttcagcaggatctgctggcagggtttttttgttttatttgtttgcttatttttaaattaactgttttgagctttgaatacttaaggctttagagggagaacccaattttcaattatgttggctttttataaagcttgagttatgtaagatttaaataaaagtttgctaccaagatgattgccttattgaataggtcactattaaattcctttaaatgttgatatctgccatttgtggaaacaacgtaaattctacttaagtgtaaacaaggcaagcctcagaccagcaataaattactcagtttggataacattattttgtgcagttaatcaaatttgccaaagtctttatctgcccctttaacaagttgagtaaaaataaaaggtattttttagtcaatgtgttccatgattttgcttaaattaatacttttaagtaatggaacttttttcaaaggcaaatttaaactatttaagaaatagctcctaatacttgggatcttgtttagagaatccactttctggaagttctcagcataattagtgttgagagtggttcagttgtctttaatgtttgtcatgtggaaatggaagtagcctctttttgttctgaaattgagtttattcaaagtgtaaaagcacatactgcattttctgctgaaagatcattatgtttaacaggcacttaatctcagtaaagtcagttgccagttaagttccacccagtagtcagtcccctttgtagttagtgggattatttgataattggttagatcatacttgtaaattttaatgctttgtgtaattggtttgaaaaacagtgaaatgggtaaacgcaaaacttttgtactttattacgagtaaagtgtaatgagtactgtggaaaccaaatttgaatactgcaaatttgtaggagttactaggttagcaattagtccatacatccataagcctgatgagttgaaattgcagtttgagaagtgaattaaccttacatccctttgttcagataccttaaaagttactttatttaaaagcatttattaatcttagtctgaaatcaaaatatagattaattggctcagctttaatacctttctaggaggtgtcacaatgtagggtaccaagggttggattgtgatggggcatggtcgtacactgctcattgtgccacaggtgtgactggaaagcatgatattctagggttggtttgtagattcaaataatccagaaatatacctaataagattgagtgaaaaatttgagtcaaatatctagggcattcacagagtagctgtgagttcttggtaatgtgaaaaaggccttgtttttcagaaattcctgggtttcctgttaaaaaatcttaaagcccaaccttaggaatatagtgccccaaaaggcggatgcttcttccattatcttattttctttgatactttatttaattagatgtttataaagaaatgggtttatttttccagcataaacctcagaatttaaggaaagaaaatgatgtctgttgttatagttcattgttttgcctactcagcagaagtgatgactcttaaaaattggctttgaccaaagttctcttgttttcagggaaagaacataaaagctttttgaactatagactggtttgactatattgttagctgccacagtaagcaggtcattgtataggtaaatgcctgcacccataattttctagtaatagccacgaccaatttattaacagtcagggcctatccttgcctgtagttctcagtcactggatgcacaaaatcactgtgtaacattggctcacttggtgagcatagggttgactgataaaatgtttaattcccttgctagcttgtgagaagaatgagttgatgacatgctccataccagtggctagatggagtattaaggtggagcagaaaagaagtgagaacatcttgattcccctttcttttacttgatggtgtttatgaacatgccgtagtgcctttatggccagtttgagtcctgcctactttgacttttacgttcccattcctgtgttaccaccttcctcccgatttgttcacctattttgtgctttaaatctcaataaaatacttactgagggaaaaaannanaaaaaaaaaaaaaaaaaatttttgggcggcggggccctagaagaaggtcttctagaaccacattgtgtttgggcaacgcggccccacagagggataaggatgaactgcgcactaggtggtacccagaggaaaaccggggccaagacataggcgcgggtatttccccccataataaagcgccgggggcacaccgaggggtgtgggacagaccaaaggaatcaggagggcatacggggcttaccacacgaggttcaaggacccgcatttaaatacgc

SEQ ID NO: 431067 - DNA, 3041 bp, Homo sapiens
cgcgcgccattgtgtggctggactcggccgcccctgtggtgtgaggcgcgtgttcgggctcttgccgtccccgcacccgcaccgcggttactggcttgcggtccgccgttcgacaaccagcccttgggtccccgcccgccacggacatgccgcgcgtctacataggacgcctgagctacaacgtccgggagaaggacatccagcgctttttcagtggctatggccgcctcctcgaagtagacctcaaaaatgggtacggcttcgtggagttcgaggactcccgcgacgccgacgacgccgtttacgagctgaacggcaaggagctctgcggcgagcgcgtgatcgtagagcacgcccggggcccgcgtcgcgatcgcgacggctacagctacggaagccgcagtggtggaggtggatacagcagtcggagaacatctggcagagacaaatacggaccacctgttcgtacagaatacaggcttattgtagaaaatctttctagtcggtgcagttggcaagatttaaaggattttatgcgacaagcaggtgaagtaacctatgcggatgcccacaaggaacgaacaaatgagggtgtaattgagtttcgctcctactctgacatgaagcgtgctttggacaaactggatggcacagaaataaatggcagaaatattaggcttattgaagataagccacgcacaagccataggcgatcttactctggaagcagatccaggtctcgatctagaagacggtcacgaagtaggagtcgcaggagcagccgcagtagatctcgaagtatctcaaaaagtcgctcccgttccaggtcgcggagcaaaggtcgatcacgttctcgatcaaaaggcaggaaatctagatcaaagagcaaatctaagcccaagtctgatcggggctcccattcacattctcgaagcagatctaaggatgagtatgagaaatctcgaagcaggtctcggtcccgatcccccaaagaaaatggaaagggtgatataaagtcaaaatccagatcaaggagccagtcccgttccaattcgccgctacctgttccaccctcaaaggcccgttctgtgtcccctccaccaaaaagagctacttcaagatcccgttctagatctcgctcaaagtcaagatcaaggtccaggtcgagttccagagattaactcagaactccttgtttgcacattattatggaacactttcctacttaggcagttactcttccatgtttatacttggcctcttctgcaagaggaatctcttgaaaacaggggcacacagaaatttgatttgtggccaaattggatgaaaaagatgaggctctaaggaaatggtggcatgaagaccctctcccttctttgtagaattaagataactttgattttatagcttttgagctaacgtaacttttgtaaagattaagctcatttagtgttgtttttttttttttttttttttttagtatttcagcaggatctgctggcagggtttttttgttttatttgtttgcttatttttaaattaactgttttgagctttgaatacttaaggctttagagggagaacccaattttcaattatgttggctttttataaagcttgagttatgtaagatttaaataaaagtttgctaccaagatgattgccttattgaataggtcactattaaattcctttaaatgttgatatctgccatttgtggaaacaacgtaaattctacttaagtgtaaacaaggcaagcctcagaccagcaataaattactcagtttggataacattattttgtgcagttaatcaaatttgccaaagtctttatctgcccctttaacaagttgagtaaaaataaaaggtattttttagtcaatgtgttccatgattttgcttaaattaatacttttaagtaatggaacttttttcaaaggcaaatttaaactatttaagaaatagctcctaatacttgggatcttgtttagagaatccactttctggaagttctcagcataattagtgttgagagtggttcagttgtctttaatgtttgtcatgtggaaatggaagtagcctctttttgttctgaaattgagtttattcaaagtgtaaaagcacatactgcattttctgctgaaagatcattatgtttaacaggcacttaatctcagtaaagtcagttgccagttaagttccacccagtagtcagtcccctttgtagttagtgggattatttgataattggttagatcatacttgtaaattttaatgctttgtgtaattggtttgaaaaacagtgaaatgggtaaacgcaaaacttttgtactttattacgagtaaagtgtaatgagtactgtggaaaccaaatttgaatactgcaaatttgtaggagttactaggttagcaattagtccatacatccataagcctgatgagttgaaattgcagtttgagaagtgaattaaccttacatccctttgttcagataccttaaaagttactttatttaaaagcatttattaatcttagtctgaaatcaaaatatagattaattggctcagctttaatacctttctaggaggtgtcacaatgtagggtaccaagggttggattgtgatggggcatggtcgtacactgctcattgtgccacaggtgtgactggaaagcatgatattctagggttggtttgtagattcaaataatccagaaatatacctaataagattgagtgaaaaatttgagtcaaatatctagggcattcacagagtagctgtgagttcttggtaatgtgaaaaaggccttgtttttcagaaattcctgggtttcctgttaaaaaatcttaaagcccaaccttaggaatatagtgccccaaaaggcggatgcttcttccattatcttattttctttgatactttatttaattagatgtttataaagaaatgggtttatttttccagcaccccctcataatcccatttatagtcatcttgtctgtggcaatgtagcctagagctgcctcttgtgagtagtggatc

SEQ ID NO: 431068 - DNA, 992 bp, Homo sapiens
cgggctgcaggaattcggcacgagatttgagtcaaatatctagggcattcacagagtagctgtgagttcttggtaatgtgaaaaaggccttgtttttcagaaattcctgggtttcctgttaaaaaatcttaaagcccaaccttaggaatatagtgccccaaaaggcggatgcttcttccattatcttattttctttgatactttatttaattagatgtttataaagaaatgggtttatttttccagcataaacctcagaatttaaggaaagaaaatgatgtctgttgttatagttcattgttttgcctactcagcagaagtgatgactcttaaaaattggctttgaccaaagttctcttgttttcagggaaagaacataaaagctttttgaactacagcctttttaaaagagggatgggaggatattacagtaagaaattaggctttctaaaagtatgaaacatccttcaactgggctctcttgttaataggacatcatatggtaatagactggtttgactatattgttagctgccacagtaagcaggtcattgtataggtaaatgcctgcacccataattttctagtaatagccacgaccaatttattaacagtcagggcctatccttgcctgtagttctcagtcactggatgcacaaaatcactgtgtaacattggctcacttggtgagcatagggttgactgataaaatgtttaattcccttgctagcttgtgagaagaatgagttgatgacatgctccataccagtggctagatggagtattaaggtggagcagaaaagaagtgagaacatcttgattcccctttcttttacttgatggtgtttatgaacatgccgtagtgcctttatggccagtttgagtcctgcctactttgacttttacgttcccattcctgtgttaccaccttcctcccgatttgttcacctattttgtgctttaaatctcaataaaatacttactgagggaaa

SEQ ID NO: 431069 - DNA, 998 bp, Homo sapiens
  misc_feature (5)..(5): n is a, c, g, or t
gttgnttgccgcctgcaggtccctctagaggatccccccaatcaacatccaaccttccagagtagctgtgagttcttggtaatgtgaaaaaggccttgtttttcagaaattcctgggtttcctgttaaaaaatcttaaagcccaaccttaggaatatagtgccccaaaaggcggatgcttcttccattatcttattttctttgatactttatttaattagatgtttataaagaaatgggtttatttttccagcataaacctcagaatttaaggaaagaaaatgatgtctgttgttatagttcattgttttgcctactcagcagaagtgatgactcttaaaaattggctttgaccaaagttctcttgttttcagggaaagaacataaaagctttttgaactacagcctttttaaaagagggatgggaggatattacagtaagaaattaggctttctaaaagtatgaaacatccttcaactgggctctcttgttaataggacatcatatggtaatagactggtttgactatattgttagctgccacagtaagcaggtcattgtataggtaaatgcctgcacccataattttctagtaatagccacgaccaatttattaacagtcagggcctatccttgcctgtagttctcagtcactggatgcacaaaatcactgtgtaacattggctcacttggtgagcatagggttgactgataaaatgtttaattcccttgctagcttgtgagaagaatgagttgatgacatgctccataccagtggctagatggagtattaaggtggagcagaaaagaagtgagaacatcttgattcccctttcttttacttgatggtgtttatgaacatgccgtagtgcctttatggccagtttgagtcctgcctactttgacttttacgttcccattcctgtgttaccaccttcctcccgatttgttcacctattttgtgctttaaatctcaataaaatacttactgagggaaa

SEQ ID NO: 431070 - DNA, 2024 bp, Homo sapiens
  misc_feature (1960)..(1960): n is a, c, g, or t
  misc_feature (1965)..(1965): n is a, c, g, or t
cgcgcgccattgtgtggctggactcggccgcccctgtggtgtgaggcgcgtgttcgggctcttgccgtccccgcacccgcaccgcggttactggcttgcggtccgccgttcgacaaccagcccttgggtccccgcccgccacggacatgccgcgcgtctacataggacgcctgagctacaacgtccgggagaaggacatccagcgctttttcagtggctatggccgcctcctcgaagtagacctcaaaaatgggtacggcttcgtggagttcgaggactcccgcgacgccgacgacgccgtttacgagctgaacggcaaggagctctgcggcgagcgcgtgatcgtagagcacgcccggggcccgcgtcgcgatcgcgacggctacagctacggaagccgcagtggtggaggtggatacagcagtcggagaacatctggcagagacaaatacggaccacctgttcgtacagaatacaggcttattgtagaaaatctttctagtcggtgcagttggcaagatttaaaggattttatgcgacaagcaggtgaagtaacctatgcggatgcccacaaggaacgaacaaatgagggtgtaattgagtttcgctcctactctgacatgaagcgtgctttggacaaactggatggcacagaaataaatggcagaaatattaggcttattgaagataagccacgcacaagccataggcgatcttactctggaagcagatccaggtctcgatctagaagacggtcacgaagtaggagtcgcaggagcagccgcagtagatctcgaagtatctcaaaaagtcgctcccgttccaggtcgcggagcaaaggtcgatcacgttctcgatcaaaaggcaggaaatctagatcaaagagcaaatctaagcccaagtctgatcggggctcccattcacattctcgaagcagatctaaggatgagtatgagaaatctcgaagcaggtctcggtcccgatcccccaaagaaaatggaaagggtgatataaagtcaaaatccagatcaaggagccagtcccgttccaattcgccgctacctgttccaccctcaaaggcccgttctgtgtcccctccaccaaaaagagctacttcaagatcccgttctagatctcgctcaaagtcaagatcaaggtccaggtcgagttccagagattaactcagaactccttgtttgcacattattatggaacactttcctacttaggcagttactcttccatgtttatacttggcctcttctgcaagaggaatctcttgaaaacaggggcacacagaaatttgatttgtggccaaattggatgaaaaagatgaggctctaaggaaatggtggcatgaagaccctctcccttctttgtagaattaagataactttgattttatagcttttgagctaacgtaacttttgtaaagattaagctcatttagtgttgtttttttttttttttttttttttagtatttcagcaggatctgctggcagggtttttttgttttatttgtttgcttatttttaaattaactgttttgagctttgaatacttaaggctttagagggagaacccaattttcaattatgttggctttttataaagcttgagttatgtaagatttaaataaaagtttgctaccaagatgattgccttattgaataggtcactattaaattcctttaaatgttgatatctgccatttgtggaaacaacgtaaattctacttaagtgtaaacaaggcaagcctcagaccagcaataaattactcagtttggataacattattttgtgcagttaatcaaatttgccaaagtctttatctgcccctttaacaagttgagtaaaaataaaaggtattttttagtcaatgtgttccatgattttgcttaaattaatacttttaagtaatggaacttttttcaaaggcaaatttaaactattaaggngcccnatactgggacctggttagagtccacttccggagtcccgctagtgtgaggggtcgtggct

SEQ ID NO: 431071 - DNA, 1012 bp, Homo sapiens
atacgaggaatccaaggaacaagggacgtcgaagcacctcttcaaggagaactacgaaccactgctcaaggaaataaaagaggacacaaacaaatggaagaacattccatgctcatgggtaggaagaatcaatatcgtgaaaatggccatactgcccaaccttaggaatatagtgccccaaaaggcggatgcttcttccattatcttattttctttgatactttatttaattagatgtttataaagaaatgggtttatttttccagcataaacctcagaatttaaggaaagaaaatgatgtctgttgttatagttcattgttttgcctactcagcagaagtgatgactcttaaaaattggctttgaccaaagttctcttgttttcagggaaagaacataaaagctttttgaactacagcctttttaaaagagggatgggaggatattacagtaagaaattaggctttctaaaagtatgaaacatccttcaactgggctctcttgttaataggacatcatatggtaatagactggtttgactatattgttagctgccacagtaagcaggtcattgtataggtaaatgcctgcacccataattttctagtaatagccacgaccaatttattaacagtcagggcctatccttgcctgtagttctcagtcactggatgcacaaaatcactgtgtaacattggctcacttggtgagcatagggttgactgataaaatgtttaattcccttgctagcttgtgagaagaatgagttgatgacatgctccataccagtggctagatggagtattaaggtggagcagaaaagaagtgagaacatcttgattcccctttcttttacttgatggtgtttatgaacatgccgtagtgcctttatggccagtttgagtcctgcctactttgacttttacgttcccattcctgtgttaccaccttcctcccgatttgttcacctattttgtgctttaaatctcaataaaatacttactgagggaaa

SEQ ID NO: 431072 - DNA, 1391 bp, Homo sapiens
cgcgcgccattgtgtggctggactcggccgcccctgtggtgtgaggcgcgtgttcgggctcttgccgtccccgcacccgcaccgcggttactggcttgcggtccgccgttcgacaaccagcccttgggtccccgcccgccacggacatgccgcgcgtctacataggacgcctgagctacaacgtccgggagaaggacatccagcgctttttcagtggctatggccgcctcctcgaagtagacctcaaaaatgggtacggcttcgtggagttcgaggactcccgcgacgccgacgacgccgtttacgagctgaacggcaaggagctctgcggcgagcgcgtgatcgtagagcacgcccggggcccgcgtcgcgatcgcgacggctacagctacggaagccgcagtggtggaggtggatacagcagtcggagaacatctggcagagacaaatacggaccacctgttcgtacagaatacaggcttattgtagaaaatctttctagtcggtgcagttggcaagatttaaaggattttatgcgacaagcaggtgaagtaacctatgcggatgcccacaaggaacgaacaaatgagggtgtaattgagtttcgctcctactctgacatgaagcgtgctttggacaaactggatggcacagaaataaatggcagaaatattaggcttattgaagataagccacgcacaagccataggcgatcttactctggaagcagatccaggtctcgatctagaagacggtcacgaagtaggagtcgcaggagcagccgcagtagatctcgaagtatctcaaaaagtcgctcccgttccaggtcgcggagcaaaggtcgatcacgttctcgatcaaaaggcaggaaatctagatcaaagagcaaatctaagcccaagtctgatcggggctcccattcacattctcgaagcagatctaaggatgagtatgagaaatctcgaagcaggtctcggtcccgatcccccaaagaaaatggaaagggtgatataaagtcaaaatccagatcaaggagccagtcccgttccaattcgccgctacctgttccaccctcaaaggcccgttctgtgtcccctccaccaaaaagagctacttcaagatcccgttctagatctcgctcaaagtcaagatcaaggtccaggtcgagttccagagattaactcagaactccttgtttgcacattattatggaacactttcctacttaggcgcgtctgcgtgggggcagggagtgtgtgggactctctgtaccttctgctccattttgccatgaagctaagactgcactagaaaataaagtctatttaaaacaaaacagaaaaggtgatgttgagggagccctagaggaagacgctggccagcagtaggtg

SEQ ID NO: 431073 - DNA, 764 bp, Homo sapiens
tggggagggctagagaaaaatcctagaagctagcaagaccgcactacaccgaaacgtcgcgggcaacggactcgccagtcaccatctagcccagggacgacgcgggacggacgtgccgctgcgcgctgacatcacgctccaggccccgccccaccggccgcccatatagcgaaagcctggcgcgcgcgcgcgccattgtgtggctggactcggccgcccctgtggtgtgaggcgcgtgttcgggctcttgccgtccccgcacccgcaccgcggttactggcttgcggtccgccgttcgacaaccagcccttgggtccccgcccgccacggacatgccgcgcgtctacataggacgcctgagctacaacgtccgggagaaggacatccagcgctttttcagtggctatggccgcctcctcgaagtagacctcaaaaatgggtgagtcgggcctgggcgcccgcgcccagcgtcccaggcctggtggcggcgggaactctccaaggaaagaagcggccaaggccgcggcgccgcgtggcagggcctcaaagatggcgacggcgcggcgtcgcgggggcgcgcggtggggtacgggcgcgcgcacgtgcgcgtcctggctaacgactcccccgcggttgtccggccctcgcaccgcccctaggtacggcttcgtggagttcgaggactcccgcgacgccgacgacgccgtttacgagctgaacggcaaggagctctgcggcgagcgcgtgatcgtagagcacgcccg

SEQ ID NO: 431074 - DNA, 751 bp, Homo sapiens
cgcgcgccattgtgtggctggactcggccgcccctgtggtgtgaggcgcgtgttcgggctcttgccgtccccgcacccgcaccgcggttactggcttgcggtccgccgttcgacaaccagcccttgggtccccgcccgccacggacatgccgcgcgtctacataggacgcctgagctacaacgtccgggagaaggacatccagcgctttttcagtggctatggccgcctcctcgaagtagacctcaaaaatgggtacggcttcgtggagttcgaggactcccgcgacgccgacgacgccgtttacgagctgaacggcaaggagctctgcggcgagcgcgtgatcgtagagcacgcccggggcccgcgtcgcgatcgcgacggctacagctacggaagccgcagtgagtcccacccccgcgcgctccgcgcccttggggaccctgggggcgggggtgggtggggtggggcctcccagcccgggcaggcgcgagggccgggggtcgtttgacttgggtgtccccgagccccgctgccttcacgtctgcccggggcagccatgggacgccggagcgcggggattgggtttgggtgtttggttttgtttatttgccaagttgggaggtgggtggcttcttctggccccttgtcagcactgtcacgggttcttcccacagaggaagtaaggggtggctgtatttgttgtattctccttacttacctatcagtgcattagttagaggttcgggggca

SEQ ID NO: 431075 - DNA, 3693 bp, Homo sapiens
cgcgcgccattgtgtggctggactcggccgcccctgtggtgtgaggcgcgtgttcgggctcttgccgtccccgcacccgcaccgcggttactggcttgcggtccgccgttcgacaaccagcccttgggtccccgcccgccacggacatgccgcgcgtctacataggacgcctgagctacaacgtccgggagaaggacatccagcgctttttcagtggctatggccgcctcctcgaagtagacctcaaaaatgggtacggcttcgtggagttcgaggactcccgcgacgccgacgacgccgtttacgagctgaacggcaaggagctctgcggcgagcgcgtgatcgtagagcacgcccggggcccgcgtcgcgatcgcgacggctacagctacggaagccgcagtggtggaggtggatacagcagtcggagaacatctggcagagacaaatacggaccacctgttcgtacagaatacaggcttattgtagaaaatctttctagtcggtgcagttggcaagatttaaaggattttatgcgacaagcaggtgaagtaacctatgcggatgcccacaaggaacgaacaaatgagggtgtaattgagtttcgctcctactctgacatgaagcgtgctttggacaaactggatggcacagaaataaatggcagaaatattaggcttattgaagataagccacgcacaagccataggcgatcttactctggaagcagatccaggtctcgatctagaagacggtcacgaagtaggagtcgcaggagcagccgcagtagatctcgaagtatctcaaaaagtcgctcccgttccaggtcgcggagcaaaggtcgatcacgttctcgatcaaaaggcaggaaatctagatcaaagagcaaatctaagcccaagtctgatcggggctcccattcacattctcgaagcagatctaaggatgagtatgagaaatctcgaagcaggtctcggtcccgatcccccaaagaaaatggaaagggtgatataaagtcaaaatccagatcaaggagccagtcccgttccaattcgccgctacctgttccaccctcaaaggcccgttctgtgtcccctccaccaaaaagagctacttcaagatcccgttctagatctcgctcaaagtcaagatcaaggtccaggtcgagttccagagattaactcagaactccttgtttgcacattattatggaacactttcctacttaggcagttactcttccatgtttatacttggcctcttctgcaagaggaatctcttgaaaacaggggcacacagaaatttgatttgtggccaaattggatgaaaaagatgaggctctaaggaaatggtggcatgaagaccctctcccttctttgtagaattaagataactttgattttatagcttttgagctaacgtaacttttgtaaagattaagctcatttagtgttttttttttagtatttcagcaggatctgctggcagggtttttttgttttatttgtttgcttatttttaaattaactgttttgagctttgaatacttaaggctttagagggagaacccaattttcaattatgttggctttttataaagcttgagttatgtaagatttaaataaaagtttgctaccaagatgattgccttattgaataggtcactattaaattcctttaaatgttgatatctgccatttgtggaaacaacgtaaattctacttaagtgtaaacaaggcaagcctcagaccagcaataaattactcagtttggataacattattttgtgcagttaatcaaatttgccaaagtctttatctgcccctttaacaagttgagtaaaaataaaaggtattttttagtcaatgtgttccatgattttgcttaaattaatacttttaagtaatggaacttttttcaaaggcaaatttaaactatttaagaaatagctcctaatacttgggatcttgtttagagaatccactttctggaagttctcagcataattagtgttgagagtggttcagttgtctttaatgtttgtcatgtggaaatggaagtagcctctttttgttctgaaattgagtttattcaaagtgtaaaagcacatactgcattttctgctgaaagatcattatgtttaacaggcacttaatctcagtaaagtcagttgccagttaagttccacccagtagtcagtcccctttgtagttagtgggattatttgataattggttagatcatacttgtaaattttaatgctttgtgtaattggtttgaaaaacagtgaaatgggtaaacgcaaaacttttgtactttattacgagtaaagtgtaatgagtactgtggaaaccaaatttgaatactgcaaatttgtaggagttactaggttagcaattagtccatacatccataagcctgatgagttgaaattgcagtttgagaagtgaattaaccttacatccctttgttcagataccttaaaagttactttatttaaaagcatttattaatcttagtctgaaatcaaaatatagattaattggctcagctttaatacctttctaggaggtgtcacaatgtagggtaccaagggttggattgtgatggggcatggtcgtacactgctcattgtgccacaggtgtgactggaaagcatgatattctagggttggtttgtagattcaaataatccagaaatatacctaataagattgagtgaaaaatttgagtcaaatatctagggcattcacagagtagctgtgagttcttggtaatgtgaaaaaggccttgtttttcagaaattcctgggtttcctgttaaaaaatcttaaagcccaaccttaggaatatagtgccccaaaaggcggatgcttcttccattatcttattttctttgatactttatttaattagatgtttataaagaaatgggtttatttttccagcataaacctcagaatttaaggaaagaaaatgatgtctgttgttatagttcattgttttgcctactcagcagaagtgatgactcttaaaaattggctttgaccaaagttctcttgttttcagggaaagaacataaaagctttttgaactacagcctttttaaaagagggatgggaggatattacagtaagaaattaggctttctaaaagtatgaaacatccttcaactgggctctcttgttaataggacatcatatggtaatagactggtttgactatattgttagctgccacagtaagcaggtcattgtataggtaaatgcctgcacccataattttctagtaatagccacgaccaatttattaacagtcagggcctatccttgcctgtagttctcagtcactggatgcacaaaatcactgtgtaacattggctcacttggtgagcatagggttgactgataaaatgtttaattcccttgctagcttgtgagaagaatgagttgatgacatgctccataccagtggctagatggagtattaaggtggagcagaaaagaagtgagaacatcttgattcccctttcttttacttgatggtgtttatgaacatgccgtagtgcctttatggccagtttgagtcctgcctactttgacttttacgttcccattcctgtgttaccaccttcctcccgatttgttcacctattttgtgctttaaatctcaataaaatacttactgagggaaa

SEQ ID NO: 431076 - DNA, 4157 bp, Homo sapiens
ggtcttaaagctatggaacttgatgggggccaaagaatgtactatttttaagtaatgtggtattgtaccacaaagtagatctaaataagctttatgctgtatttgaactaattggggcatgttattgggaggaggttggggggatttttggttatgttaaatgtttgatgtttaaattgttgcatgttgaattcaaactttttaacaagtccttgatgtttcaatttgaaagtgaccaatggggctgaggctgtgtccactgaggctaagatgactgcctttcctgattggccttggcttttccatacattgtgtgacccttgccctatgaccctttggctgaccttaccggaagccatgacgacagcagccttttgccattagacgcagggtgatggtgaggattccaagggttagacaaaactggttaatctgaactaggtgactgttaccttgcgtgttttgtggccaaaccaccaccaaaaacctcacactgtgatgtaagtacttagtgtaaaactagtaaacatttttgtaaaatgtagaaatgcatgtaatcagttaagttttatattttacaatgttctgtaaaataaaacttagcgaggtaaatcgaataaaggagcagtcactctctaacagattgtaggagaggtttagttggatttagtctatttgacttgcccttaatttaattttatggcaaatcacaaatgtgtcgaaggtttagcaatataatagcaaagtcctactccagtaaataaaagttgatatgtttgtactaactttcaaagacattatgcgtttttatcattacaaggcatctaattgttcccttcatgtgataaaggtggtggaggtggatacagcagtcggagaacatctggcagagacaaatacggaccacctgttcgtacagaatacaggcttattgtagaaaatctttctagtcggtgcagttggcaagatttaaaggattttatgcgacaagcaggtgaagtaacctatgcggatgcccacaaggaacgaacaaatgagggtgtaattgagtttcgctcctactctgacatgaagcgtgctttggacaaactggatggcacagaaataaatggcagaaatattaggcttattgaagataagccacgcacaagccataggcgatcttactctggaagcagatccaggtctcgatctagaagacggtcacgaagtaggagtcgcaggagcagccgcagtagatctcgaagtatctcaaaaagtcgctcccgttccaggtcgcggagcaaaggtcgatcacgttctcgatcaaaaggcaggaaatctagatcaaagagcaaatctaagcccaagtctgatcggggctcccattcacattctcgaagcagatctaaggatgagtatgagaaatctcgaagcaggtctcggtcccgatcccccaaagaaaatggaaagggtgatataaagtcaaaatccagatcaaggagccagtcccgttccaattcgccgctacctgttccaccctcaaaggcccgttctgtgtcccctccaccaaaaagagctacttcaagatcccgttctagatctcgctcaaagtcaagatcaaggtccaggtcgagttccagagattaactcagaactccttgtttgcacattattatggaacactttcctacttaggcagttactcttccatgtttatacttggcctcttctgcaagaggaatctcttgaaaacaggggcacacagaaatttgatttgtggccaaattggatgaaaaagatgaggctctaaggaaatggtggcatgaagaccctctcccttctttgtagaattaagataactttgattttatagcttttgagctaacgtaacttttgtaaagattaagctcatttagtgttgtttttttttttttttttttttttagtatttcagcaggatctgctggcagggtttttttgttttatttgtttgcttatttttaaattaactgttttgagctttgaatacttaaggctttagagggagaacccaattttcaattatgttggctttttataaagcttgagttatgtaagatttaaataaaagtttgctaccaagatgattgccttattgaataggtcactattaaattcctttaaatgttgatatctgccatttgtggaaacaacgtaaattctacttaagtgtaaacaaggcaagcctcagaccagcaataaattactcagtttggataacattattttgtgcagttaatcaaatttgccaaagtctttatctgcccctttaacaagttgagtaaaaataaaaggtattttttagtcaatgtgttccatgattttgcttaaattaatacttttaagtaatggaacttttttcaaaggcaaatttaaactatttaagaaatagctcctaatacttgggatcttgtttagagaatccactttctggaagttctcagcataattagtgttgagagtggttcagttgtctttaatgtttgtcatgtggaaatggaagtagcctctttttgttctgaaattgagtttattcaaagtgtaaaagcacatactgcattttctgctgaaagatcattatgtttaacaggcacttaatctcagtaaagtcagttgccagttaagttccacccagtagtcagtcccctttgtagttagtgggattatttgataattggttagatcatacttgtaaattttaatgctttgtgtaattggtttgaaaaacagtgaaatgggtaaacgcaaaacttttgtactttattacgagtaaagtgtaatgagtactgtggaaaccaaatttgaatactgcaaatttgtaggagttactaggttagcaattagtccatacatccataagcctgatgagttgaaattgcagtttgagaagtgaattaaccttacatccctttgttcagataccttaaaagttactttatttaaaagcatttattaatcttagtctgaaatcaaaatatagattaattggctcagctttaatacctttctaggaggtgtcacaatgtagggtaccaagggttggattgtgatggggcatggtcgtacactgctcattgtgccacaggtgtgactggaaagcatgatattctagggttggtttgtagattcaaataatccagaaatatacctaataagattgagtgaaaaatttgagtcaaatatctagggcattcacagagtagctgtgagttcttggtaatgtgaaaaaggccttgtttttcagaaattcctgggtttcctgttaaaaaatcttaaagcccaaccttaggaatatagtgccccaaaaggcggatgcttcttccattatcttattttctttgatactttatttaattagatgtttataaagaaatgggtttatttttccagcataaacctcagaatttaaggaaagaaaatgatgtctgttgttatagttcattgttttgcctactcagcagaagtgatgactcttaaaaattggctttgaccaaagttctcttgttttcagggaaagaacataaaagctttttgaactacagcctttttaaaagagggatgggaggatattacagtaagaaattaggctttctaaaagtatgaaacatccttcaactgggctctcttgttaataggacatcatatggtaatagactggtttgactatattgttagctgccacagtaagcaggtcattgtataggtaaatgcctgcacccataattttctagtaatagccacgaccaatttattaacagtcagggcctatccttgcctgtagttctcagtcactggatgcacaaaatcactgtgtaacattggctcacttggtgagcatagggttgactgataaaatgtttaattcccttgctagcttgtgagaagaatgagttgatgacatgctccataccagtggctagatggagtattaaggtggagcagaaaagaagtgagaacatcttgattcccctttcttttacttgatggtgtttatgaacatgccgtagtgcctttatggccagtttgagtcctgcctactttgacttttacgttcccattcctgtgttaccaccttcctcccgatttgttcacctattttgtgctttaaatctcaataaaatacttactgagggaaa

SEQ ID NO: 431077 - DNA, 4294 bp, Homo sapiens
ggtcttaaagctatggaacttgatgggggccaaagaatgtactatttttaagtaatgtggtattgtaccacaaagtagatctaaataagctttatgctgtatttgaactaattggggcatgttattgggaggaggttggggggatttttggttatgttaaatgtttgatgtttaaattgttgcatgttgaattcaaactttttaacaagtccttgatgtttcaatttgaaagtgaccaatggggctgaggctgtgtccactgaggctaagatgactgcctttcctgattggccttggcttttccatacattgtgtgacccttgccctatgaccctttggctgaccttaccggaagccatgacgacagcagccttttgccattagacgcagggtgatggtgaggattccaagggttagacaaaactggttaatctgaactaggtgactgttaccttgcgtgttttgtggccaaaccaccaccaaaaacctcacactgtgatgtaagtacttagtgtaaaactagtaaacatttttgtaaaatgtagaaatgcatgtaatcagttaagttttatattttacaatgttctgtaaaataaaacttagcgaggtaaatcgaataaaggagcagtcactctctaacagattgtaggagaggtttagttggatttagtctatttgacttgcccttaatttaattttatggcaaatcacaaatgtgtcgaaggtttagcaatataatagcaaagtcctactccagtaaataaaagttgatatgtttgtactaactttcaaagacattatgcgtttttatcattacaaggcatctaattgttcccttcatgtgataaaggtggtggaggtggatacagcagtcggagaacatctggcagagacaaatacggaccacctgttcgtacagaatacaggcttattgtagaaaatctttctagtcggtgcagttggcaagatttaaaggtatgttttgtaattcaagatagaaatgatatgactaatgctttaaagtaaactccttttatattcttatttctgggaatttattatggtatatagatgttttaagatttccgagtctgaccaatcttgtctttcaggattttatgcgacaagcaggtgaagtaacctatgcggatgcccacaaggaacgaacaaatgagggtgtaattgagtttcgctcctactctgacatgaagcgtgctttggacaaactggatggcacagaaataaatggcagaaatattaggcttattgaagataagccacgcacaagccataggcgatcttactctggaagcagatccaggtctcgatctagaagacggtcacgaagtaggagtcgcaggagcagccgcagtagatctcgaagtatctcaaaaagtcgctcccgttccaggtcgcggagcaaaggtcgatcacgttctcgatcaaaaggcaggaaatctagatcaaagagcaaatctaagcccaagtctgatcggggctcccattcacattctcgaagcagatctaaggatgagtatgagaaatctcgaagcaggtctcggtcccgatcccccaaagaaaatggaaagggtgatataaagtcaaaatccagatcaaggagccagtcccgttccaattcgccgctacctgttccaccctcaaaggcccgttctgtgtcccctccaccaaaaagagctacttcaagatcccgttctagatctcgctcaaagtcaagatcaaggtccaggtcgagttccagagattaactcagaactccttgtttgcacattattatggaacactttcctacttaggcagttactcttccatgtttatacttggcctcttctgcaagaggaatctcttgaaaacaggggcacacagaaatttgatttgtggccaaattggatgaaaaagatgaggctctaaggaaatggtggcatgaagaccctctcccttctttgtagaattaagataactttgattttatagcttttgagctaacgtaacttttgtaaagattaagctcatttagtgttgtttttttttttttttttttttttagtatttcagcaggatctgctggcagggtttttttgttttatttgtttgcttatttttaaattaactgttttgagctttgaatacttaaggctttagagggagaacccaattttcaattatgttggctttttataaagcttgagttatgtaagatttaaataaaagtttgctaccaagatgattgccttattgaataggtcactattaaattcctttaaatgttgatatctgccatttgtggaaacaacgtaaattctacttaagtgtaaacaaggcaagcctcagaccagcaataaattactcagtttggataacattattttgtgcagttaatcaaatttgccaaagtctttatctgcccctttaacaagttgagtaaaaataaaaggtattttttagtcaatgtgttccatgattttgcttaaattaatacttttaagtaatggaacttttttcaaaggcaaatttaaactatttaagaaatagctcctaatacttgggatcttgtttagagaatccactttctggaagttctcagcataattagtgttgagagtggttcagttgtctttaatgtttgtcatgtggaaatggaagtagcctctttttgttctgaaattgagtttattcaaagtgtaaaagcacatactgcattttctgctgaaagatcattatgtttaacaggcacttaatctcagtaaagtcagttgccagttaagttccacccagtagtcagtcccctttgtagttagtgggattatttgataattggttagatcatacttgtaaattttaatgctttgtgtaattggtttgaaaaacagtgaaatgggtaaacgcaaaacttttgtactttattacgagtaaagtgtaatgagtactgtggaaaccaaatttgaatactgcaaatttgtaggagttactaggttagcaattagtccatacatccataagcctgatgagttgaaattgcagtttgagaagtgaattaaccttacatccctttgttcagataccttaaaagttactttatttaaaagcatttattaatcttagtctgaaatcaaaatatagattaattggctcagctttaatacctttctaggaggtgtcacaatgtagggtaccaagggttggattgtgatggggcatggtcgtacactgctcattgtgccacaggtgtgactggaaagcatgatattctagggttggtttgtagattcaaataatccagaaatatacctaataagattgagtgaaaaatttgagtcaaatatctagggcattcacagagtagctgtgagttcttggtaatgtgaaaaaggccttgtttttcagaaattcctgggtttcctgttaaaaaatcttaaagcccaaccttaggaatatagtgccccaaaaggcggatgcttcttccattatcttattttctttgatactttatttaattagatgtttataaagaaatgggtttatttttccagcataaacctcagaatttaaggaaagaaaatgatgtctgttgttatagttcattgttttgcctactcagcagaagtgatgactcttaaaaattggctttgaccaaagttctcttgttttcagggaaagaacataaaagctttttgaactacagcctttttaaaagagggatgggaggatattacagtaagaaattaggctttctaaaagtatgaaacatccttcaactgggctctcttgttaataggacatcatatggtaatagactggtttgactatattgttagctgccacagtaagcaggtcattgtataggtaaatgcctgcacccataattttctagtaatagccacgaccaatttattaacagtcagggcctatccttgcctgtagttctcagtcactggatgcacaaaatcactgtgtaacattggctcacttggtgagcatagggttgactgataaaatgtttaattcccttgctagcttgtgagaagaatgagttgatgacatgctccataccagtggctagatggagtattaaggtggagcagaaaagaagtgagaacatcttgattcccctttcttttacttgatggtgtttatgaacatgccgtagtgcctttatggccagtttgagtcctgcctactttgacttttacgttcccattcctgtgttaccaccttcctcccgatttgttcacctattttgtgctttaaatctcaataaaatacttactgagggaaa

SEQ ID NO: 431078 - DNA, 3639 bp, Homo sapiens
cgcgcgccattgtgtggctggactcggccgcccctgtggtgtgaggcgcgtgttcgggctcttgccgtccccgcacccgcaccgcggttactggcttgcggtccgccgttcgacaaccagcccttgggtccccgcccgccacggacatgccgcgcgtctacataggacgcctgagctacaacgtccgggagaaggacatccagcgctttttcagtggctatggccgcctcctcgaagtagacctcaaaaatgggtacggcttcgtggagttcgaggactcccgcgacgccgacgacgccgtttacgagctgaacggcaaggagctctgcggcgagcgcgtgatcgtagagcacgcccggggcccgcgtcgcgatcgcgacggctacagctacggaagccgcagtggtggaggtggatacagcagtcggagaacatctggcagagacaaatacggaccacctgttcgtacagaatacaggcttattgtagaaaatctttctagtcggtgcagttggcaagatttaaaggattttatgcgacaagcaggtgaagtaacctatgcggatgcccacaaggaacgaacaaatgagggtgtaattgagtttcgctcctactctgacatgaagcgtgctttggacaaactggatggcacagaaataaatggcagaaatattaggcttattgaagataagccacgcacaagccataggcgatcttactctggaagcagatccaggtctcgatctagaagacggtcacgaagtaggagtcgcaggagcagccgcagtagatctcgaagtatctcaaaaagtcgctcccgttccaggtcgcggagcaaaggtcgatcacgttctcgatcaaaaggcaggaaatctagatcaaagagcaaatctaagcccaagtctgatcggggctcccattcacattctcgaagcagatctaaggatgagtatgagaaatctcgaagcaggtctcggtcccgatcccccaaagaaaatggaaagggtgatataaagtcaaaatccagatcaaggagccagtcccgttccaattcgccgctacctgttccaccctcaaaggcccgttctgtgtcccctccaccaaaaagagctacttcaagatcccgttctagatctcgctcaaagtcaagatcaaggtccaggtcgagttccagagattaactcagaactccttgtttgcacattattatggaacactttcctacttaggcagttactcttccatgtttatacttggcctcttctgcaagaggaatctcttgaaaacaggggcacacagaaatttgatttgtggccaaattggatgaaaaagatgaggctctaaggaaatggtggcatgaagaccctctcccttctttgtagaattaagataactttgattttatagcttttgagctaacgtaacttttgtaaagattaagctcatttagtgttttttttttagtatttcagcaggatctgctggcagggtttttttgttttatttgtttgcttatttttaaattaactgttttgagctttgaatacttaaggctttagagggagaacccaattttcaattatgttggctttttataaagcttgagttatgtaagatttaaatttaaatgttgatatctgccatttgtggaaacaacgtaaattctacttaagtgtaaacaaggcaagcctcagaccagcaataaattactcagtttggataacattattttgtgcagttaatcaaatttgccaaagtctttatctgcccctttaacaagttgagtaaaaataaaaggtattttttagtcaatgtgttccatgattttgcttaaattaatacttttaagtaatggaacttttttcaaaggcaaatttaaactatttaagaaatagctcctaatacttgggatcttgtttagagaatccactttctggaagttctcagcataattagtgttgagagtggttcagttgtctttaatgtttgtcatgtggaaatggaagtagcctctttttgttctgaaattgagtttattcaaagtgtaaaagcacatactgcattttctgctgaaagatcattatgtttaacaggcacttaatctcagtaaagtcagttgccagttaagttccacccagtagtcagtcccctttgtagttagtgggattatttgataattggttagatcatacttgtaaattttaatgctttgtgtaattggtttgaaaaacagtgaaatgggtaaacgcaaaacttttgtactttattacgagtaaagtgtaatgagtactgtggaaaccaaatttgaatactgcaaatttgtaggagttactaggttagcaattagtccatacatccataagcctgatgagttgaaattgcagtttgagaagtgaattaaccttacatccctttgttcagataccttaaaagttactttatttaaaagcatttattaatcttagtctgaaatcaaaatatagattaattggctcagctttaatacctttctaggaggtgtcacaatgtagggtaccaagggttggattgtgatggggcatggtcgtacactgctcattgtgccacaggtgtgactggaaagcatgatattctagggttggtttgtagattcaaataatccagaaatatacctaataagattgagtgaaaaatttgagtcaaatatctagggcattcacagagtagctgtgagttcttggtaatgtgaaaaaggccttgtttttcagaaattcctgggtttcctgttaaaaaatcttaaagcccaaccttaggaatatagtgccccaaaaggcggatgcttcttccattatcttattttctttgatactttatttaattagatgtttataaagaaatgggtttatttttccagcataaacctcagaatttaaggaaagaaaatgatgtctgttgttatagttcattgttttgcctactcagcagaagtgatgactcttaaaaattggctttgaccaaagttctcttgttttcagggaaagaacataaaagctttttgaactacagcctttttaaaagagggatgggaggatattacagtaagaaattaggctttctaaaagtatgaaacatccttcaactgggctctcttgttaataggacatcatatggtaatagactggtttgactatattgttagctgccacagtaagcaggtcattgtataggtaaatgcctgcacccataattttctagtaatagccacgaccaatttattaacagtcagggcctatccttgcctgtagttctcagtcactggatgcacaaaatcactgtgtaacattggctcacttggtgagcatagggttgactgataaaatgtttaattcccttgctagcttgtgagaagaatgagttgatgacatgctccataccagtggctagatggagtattaaggtggagcagaaaagaagtgagaacatcttgattcccctttcttttacttgatggtgtttatgaacatgccgtagtgcctttatggccagtttgagtcctgcctactttgacttttacgttcccattcctgtgttaccaccttcctcccgatttgttcacctattttgtgctttaaatctcaataaaatacttactgagggaaa

SEQ ID NO: 431079 - DNA, 3652 bp, Homo sapiens
cgcgcgccattgtgtggctggactcggccgcccctgtggtgtgaggcgcgtgttcgggctcttgccgtccccgcacccgcaccgcggttactggcttgcggtccgccgttcgacaaccagcccttgggtccccgcccgccacggacatgccgcgcgtctacataggacgcctgagctacaacgtccgggagaaggacatccagcgctttttcagtggctatggccgcctcctcgaagtagacctcaaaaatgggtacggcttcgtggagttcgaggactcccgcgacgccgacgacgccgtttacgagctgaacggcaaggagctctgcggcgagcgcgtgatcgtagagcacgcccggggcccgcgtcgcgatcgcgacggctacagctacggaagccgcagtggtggaggtggatacagcagtcggagaacatctggcagagacaaatacggaccacctgttcgtacagaatacaggcttattgtagaaaatctttctagtcggtgcagttggcaagatttaaaggattttatgcgacaagcaggtgaagtaacctatgcggatgcccacaaggaacgaacaaatgagggtgtaattgagtttcgctcctactctgacatgaagcgtgctttggacaaactggatggcacagaaataaatggcagaaatattaggcttattgaagataagccacgcacaagccataggcgatcttactctggaagcagatccaggtctcgatctagaagacggtcacgaagtaggagtcgcaggagcagccgcagtagatctcgaagtatctcaaaaagtcgctcccgttccaggtcgcggagcaaaggtcgatcacgttctcgatcaaaaggcaggaaatctagatcaaagagcaaatctaagcccaagtctgatcggggctcccattcacattctcgaagcagatctaaggatgagtatgagaaatctcgaagcaggtctcggtcccgatcccccaaagaaaatggaaagggtgatataaagtcaaaatccagatcaaggagccagtcccgttccaattcgccgctacctgttccaccctcaaaggcccgttctgtgtcccctccaccaaaaagagctacttcaagatcccgttctagatctcgctcaaagtcaagatcaaggtccaggtcgagttccagagattaactcagaactccttgtttgcacattattatggaacactttcctacttaggcagttactcttccatgtttatacttggcctcttctgcaagaggaatctcttgaaaacaggggcacacagaaatttgatttgtggccaaattggatgaaaaagatgaggctctaaggaaatggtggcatgaagaccctctcccttctttgtagaattaagataactttgattttatagcttttgagctaacgtaacttttgtaaagattaagctcatttagtgttgtttttttttttttttttttttttagtatttcagcaggatctgctggcagggtttttttgttttatttgtttgcttatttttaaattaactgttttgagctttgaatacttaaggctttagagggagaacccaattttcaattatgttggctttttataaagcttgagttatgtaagatttaaataaaagtttgctaccaagatgattgccttattgaataggtcactattaaattcctttaaatgttgatatctgccatttgtggaaacaacgtaaattctacttaagtgtaaacaaggcaagcctcagaccagcaataaattactcagtttggataacattattttgtgcagttaatcaaatttgccaaagtctttatctgcccctttaacaagttgagtaaaaataaaaggtattttttagtcaatgtgttccatgattttgcttaaattaatacttttaagtaatggaacttttttcaaaggcaaatttaaactatttaagaaatagctcctaatacttgggatcttgtttagagaatccactttctggaagttctcagcataattagtgttgagagtggttcagttgtctttaatgtttgtcatgtggaaatggaagtagcctctttttgttctgaaattgagtttattcaaagtgtaaaagcacatactgcattttctgctgaaagatcattatgtttaacaggcacttaatctcagtaaagtcagttgccagttaagttccacccagtagtcagtcccctttgtagttagtgggattatttgataattggttagatcatacttgtaaattttaatgctttgtgtaattggtttgaaaaacagtgaaatgggtaaacgcaaaacttttgtactttattacgagtaaagtgtaatgagtactgtggaaaccaaatttgaatactgcaaatttgtaggagttactaggttagcaattagtccatacatccataagcctgatgagttgaaattgcagtttgagaagtgaattaaccttacatccctttgttcagataccttaaaagttactttatttaaaagcatttattaatcttagtctgaaatcaaaatatagattaattggctcagctttaatacctttctaggaggtgtcacaatgtagggtaccaagggttggattgtgatggggcatggtcgtacactgctcattgtgccacaggtgtgactggaaagcatgatattctagggttggtttgtagattcaaataatccagaaatatacctaataagattgagtgaaaaatttgagtcaaatatctagggcattcacagagtagctgtgagttcttggtaatgtgaaaaaggccttgtttttcagaaattcctgggtttcctgttaaaaaatcttaaagcccaaccttaggaatatagtgccccaaaaggcggatgcttcttccattatcttattttctttgatactttatttaattagatgtttataaagaaatgggtttatttttccagcataaacctcagaatttaaggaaagaaaatgatgtctgttgttatagttcattgttttgcctactcagcagaagtgatgactcttaaaaattggctttgaccaaagttctcttgttttcagggaaagaacataaaagctttttgaactacagcctttttaaaagagggatgggaggatattacagtaagaaattaggctttcttagactggtttgactatattgttagctgccacagtaagcaggtcattgtataggtaaatgcctgcacccataattttctagtaatagccacgaccaatttattaacagtcagggcctatccttgcctgtagttctcagtcactggatgcacaaaatcactgtgtaacattggctcacttggtgagcatagggttgactgataaaatgtttaattcccttgctagcttgtgagaagaatgagttgatgacatgctccataccagtggctagatggagtattaaggtggagcagaaaagaagtgagaacatcttgattcccctttcttttacttgatggtgtttatgaacatgccgtagtgcctttatggccagtttgagtcctgcctactttgacttttacgttcccattcctgtgttaccaccttcctcccgatttgttcacctattttgtgctttaaatctcaataaaatacttactgagggaaa

SEQ ID NO: 431080 - DNA, 3991 bp, Homo sapiens
  misc_feature (3713)..(3714): n is a, c, g, or t
  misc_feature (3716)..(3716): n is a, c, g, or t
cgcgcgccattgtgtggctggactcggccgcccctgtggtgtgaggcgcgtgttcgggctcttgccgtccccgcacccgcaccgcggttactggcttgcggtccgccgttcgacaaccagcccttgggtccccgcccgccacggacatgccgcgcgtctacataggacgcctgagctacaacgtccgggagaaggacatccagcgctttttcagtggctatggccgcctcctcgaagtagacctcaaaaatgggtacggcttcgtggagttcgaggactcccgcgacgccgacgacgccgtttacgagctgaacggcaaggagctctgcggcgagcgcgtgatcgtagagcacgcccggggcccgcgtcgcgatcgcgacggctacagctacggaagccgcagtggtggaggtggatacagcagtcggagaacatctggcagagacaaatacggaccacctgttcgtacagaatacaggcttattgtagaaaatctttctagtcggtgcagttggcaagatttaaaggattttatgcgacaagcaggtgaagtaacctatgcggatgcccacaaggaacgaacaaatgagggtgtaattgagtttcgctcctactctgacatgaagcgtgctttggacaaactggatggcacagaaataaatggcagaaatattaggcttattgaagataagccacgcacaagccataggcgatcttactctggaagcagatccaggtctcgatctagaagacggtcacgaagtaggagtcgcaggagcagccgcagtagatctcgaagtatctcaaaaagtcgctcccgttccaggtcgcggagcaaaggtcgatcacgttctcgatcaaaaggcaggaaatctagatcaaagagcaaatctaagcccaagtctgatcggggctcccattcacattctcgaagcagatctaaggatgagtatgagaaatctcgaagcaggtctcggtcccgatcccccaaagaaaatggaaagggtgatataaagtcaaaatccagatcaaggagccagtcccgttccaattcgccgctacctgttccaccctcaaaggcccgttctgtgtcccctccaccaaaaagagctacttcaagatcccgttctagatctcgctcaaagtcaagatcaaggtccaggtcgagttccagagattaactcagaactccttgtttgcacattattatggaacactttcctacttaggcagttactcttccatgtttatacttggcctcttctgcaagaggaatctcttgaaaacaggggcacacagaaatttgatttgtggccaaattggatgaaaaagatgaggctctaaggaaatggtggcatgaagaccctctcccttctttgtagaattaagataactttgattttatagcttttgagctaacgtaacttttgtaaagattaagctcatttagtgttgtttttttttttttttttttttttagtatttcagcaggatctgctggcagggtttttttgttttatttgtttgcttatttttaaattaactgttttgagctttgaatacttaaggctttagagggagaacccaattttcaattatgttggctttttataaagcttgagttatgtaagatttaaataaaagtttgctaccaagatgattgccttattgaataggtcactattaaattcctttaaatgttgatatctgccatttgtggaaacaacgtaaattctacttaagtgtaaacaaggcaagcctcagaccagcaataaattactcagtttggataacattattttgtgcagttaatcaaatttgccaaagtctttatctgcccctttaacaagttgagtaaaaataaaaggtattttttagtcaatgtgttccatgattttgcttaaattaatacttttaagtaatggaacttttttcaaaggcaaatttaaactatttaagaaatagctcctaatacttgggatcttgtttagagaatccactttctggaagttctcagcataattagtgttgagagtggttcagttgtctttaatgtttgtcatgtggaaatggaagtagcctctttttgttctgaaattgagtttattcaaagtgtaaaagcacatactgcattttctgctgaaagatcattatgtttaacaggcacttaatctcagtaaagtcagttgccagttaagttccacccagtagtcagtcccctttgtagttagtgggattatttgataattggttagatcatacttgtaaattttaatgctttgtgtaattggtttgaaaaacagtgaaatgggtaaacgcaaaacttttgtactttattacgagtaaagtgtaatgagtactgtggaaaccaaatttgaatactgcaaatttgtaggagttactaggttagcaattagtccatacatccataagcctgatgagttgaaattgcagtttgagaagtgaattaaccttacatccctttgttcagataccttaaaagttactttatttaaaagcatttattaatcttagtctgaaatcaaaatatagattaattggctcagctttaatacctttctaggaggtgtcacaatgtagggtaccaagggttggattgtgatggggcatggtcgtacactgctcattgtgccacaggtgtgactggaaagcatgatattctagggttggtttgtagattcaaataatccagaaatatacctaataagattgagtgaaaaatttgagtcaaatatctagggcattcacagagtagctgtgagttcttggtaatgtgaaaaaggccttgtttttcagaaattcctgggtttcctgttaaaaaatcttaaagcccaaccttaggaatatagtgccccaaaaggcggatgcttcttccattatcttattttctttgatactttatttaattagatgtttataaagaaatgggtttatttttccagcataaacctcagaatttaaggaaagaaaatgatgtctgttgttatagttcattgttttgcctactcagcagaagtgatgactcttaaaaattggctttgaccaaagttctcttgttttcagggaaagaacataaaagctttttgaactacagcctttttaaaagagggatgggaggatattacagtaagaaattaggctttctaaaagtatgaaacatccttcaactgggctctcttgttaataggacatcatatggtaatagactggtttgactatattgttagctgccacagtaagcaggtcattgtataggtaaatgcctgcacccataattttctagtaatagccacgaccaatttattaacagtcagggcctatccttgcctgtagttctcagtcactggatgcacaaaatcactgtgtaacattggctcacttggtgagcatagggttgactgataaaatgtttaattcccttgctagcttgtgagaagaatgagttgatgacatgctccataccagtggctagatggagtattaaggtggagcagaaaagaagtgagaacatcttgattcccctttcttttacttgatggtgtttatgaacatgccgtagtgcctttatggccagtttgagtcctgcctactttgacttttacgttcccattcctgtgttaccaccttcctcccgatttgttcacctattttgtgctttaaatctcaataaaatacttactgagggaaaaaannanaaaaaaaaaaaaaaaaaatttttgggcggcggggccctagaagaaggtcttctagaaccacattgtgtttgggcaacgcggccccacagagggataaggatgaactgcgcactaggtggtacccagaggaaaaccggggccaagacataggcgcgggtatttccccccataataaagcgccgggggcacaccgaggggtgtgggacagaccaaaggaatcaggagggcatacggggcttaccacacgaggttcaaggacccgcatttaaatacgc

SEQ ID NO: 431081 - DNA, 3050 bp, Homo sapiens
cgcgcgccattgtgtggctggactcggccgcccctgtggtgtgaggcgcgtgttcgggctcttgccgtccccgcacccgcaccgcggttactggcttgcggtccgccgttcgacaaccagcccttgggtccccgcccgccacggacatgccgcgcgtctacataggacgcctgagctacaacgtccgggagaaggacatccagcgctttttcagtggctatggccgcctcctcgaagtagacctcaaaaatgggtacggcttcgtggagttcgaggactcccgcgacgccgacgacgccgtttacgagctgaacggcaaggagctctgcggcgagcgcgtgatcgtagagcacgcccggggcccgcgtcgcgatcgcgacggctacagctacggaagccgcagtggtggaggtggatacagcagtcggagaacatctggcagagacaaatacggaccacctgttcgtacagaatacaggcttattgtagaaaatctttctagtcggtgcagttggcaagatttaaaggattttatgcgacaagcaggtgaagtaacctatgcggatgcccacaaggaacgaacaaatgagggtgtaattgagtttcgctcctactctgacatgaagcgtgctttggacaaactggatggcacagaaataaatggcagaaatattaggcttattgaagataagccacgcacaagccataggcgatcttactctggaagcagatccaggtctcgatctagaagacggtcacgaagtaggagtcgcaggagcagccgcagtagatctcgaagtatctcaaaaagtcgctcccgttccaggtcgcggagcaaaggtcgatcacgttctcgatcaaaaggcaggaaatctagatcaaagagcaaatctaagcccaagtctgatcggggctcccattcacattctcgaagcagatctaaggatgagtatgagaaatctcgaagcaggtctcggtcccgatcccccaaagaaaatggaaagggtgatataaagtcaaaatccagatcaaggagccagtcccgttccaattcgccgctacctgttccaccctcaaaggcccgttctgtgtcccctccaccaaaaagagctacttcaagatcccgttctagatctcgctcaaagtcaagatcaaggtccaggtcgagttccagagattaactcagaactccttgtttgcacattattatggaacactttcctacttaggcagttactcttccatgtttatacttggcctcttctgcaagaggaatctcttgaaaacaggggcacacagaaatttgatttgtggccaaattggatgaaaaagatgaggctctaaggaaatggtggcatgaagaccctctcccttctttgtagaattaagataactttgattttatagcttttgagctaacgtaacttttgtaaagattaagctcatttagtgttgtttttttttttttttttttttttagtatttcagcaggatctgctggcagggtttttttgttttatttgtttgcttatttttaaattaactgttttgagctttgaatacttaaggctttagagggagaacccaattttcaattatgttggctttttataaagcttgagttatgtaagatttaaataaaagtttgctaccaagatgattgccttattgaataggtcactattaaattcctttaaatgttgatatctgccatttgtggaaacaacgtaaattctacttaagtgtaaacaaggcaagcctcagaccagcaataaattactcagtttggataacattattttgtgcagttaatcaaatttgccaaagtctttatctgcccctttaacaagttgagtaaaaataaaaggtattttttagtcaatgtgttccatgattttgcttaaattaatacttttaagtaatggaacttttttcaaaggcaaatttaaactatttaagaaatagctcctaatacttgggatcttgtttagagaatccactttctggaagttctcagcataattagtgttgagagtggttcagttgtctttaatgtttgtcatgtggaaatggaagtagcctctttttgttctgaaattgagtttattcaaagtgtaaaagcacatactgcattttctgctgaaagatcattatgtttaacaggcacttaatctcagtaaagtcagttgccagttaagttccacccagtagtcagtcccctttgtagttagtgggattatttgataattggttagatcatacttgtaaattttaatgctttgtgtaattggtttgaaaaacagtgaaatgggtaaacgcaaaacttttgtactttattacgagtaaagtgtaatgagtactgtggaaaccaaatttgaatactgcaaatttgtaggagttactaggttagcaattagtccatacatccataagcctgatgagttgaaattgcagtttgagaagtgaattaaccttacatccctttgttcagataccttaaaagttactttatttaaaagcatttattaatcttagtctgaaatcaaaatatagattaattggctcagctttaatacctttctaggaggtgtcacaatgtagggtaccaagggttggattgtgatggggcatggtcgtacactgctcattgtgccacaggtgtgactggaaagcatgatattctagggttggtttgtagattcaaataatccagaaatatacctaataagattgagtgaaaaatttgagtcaaatatctagggcattcacagagtagctgtgagttcttggtaatgtgaaaaaggccttgtttttcagaaattcctgggtttcctgttaaaaaatcttaaagcccaaccttaggaatatagtgccccaaaaggcggatgcttcttccattatcttattttctttgatactttatttaattagatgtttataaagaaatgggtttatttttccagcatgaactcctcactaattttttcgacaggaaaattggatatctccgagttgtagttgcagtccttcccctcccttatatgtgagct

SEQ ID NO: 431082 - DNA, 3096 bp, Homo sapiens
cgcgcgccattgtgtggctggactcggccgcccctgtggtgtgaggcgcgtgttcgggctcttgccgtccccgcacccgcaccgcggttactggcttgcggtccgccgttcgacaaccagcccttgggtccccgcccgccacggacatgccgcgcgtctacataggacgcctgagctacaacgtccgggagaaggacatccagcgctttttcagtggctatggccgcctcctcgaagtagacctcaaaaatgggtacggcttcgtggagttcgaggactcccgcgacgccgacgacgccgtttacgagctgaacggcaaggagctctgcggcgagcgcgtgatcgtagagcacgcccggggcccgcgtcgcgatcgcgacggctacagctacggaagccgcagtggtggaggtggatacagcagtcggagaacatctggcagagacaaatacggaccacctgttcgtacagaatacaggcttattgtagaaaatctttctagtcggtgcagttggcaagatttaaaggattttatgcgacaagcaggtgaagtaacctatgcggatgcccacaaggaacgaacaaatgagggtgtaattgagtttcgctcctactctgacatgaagcgtgctttggacaaactggatggcacagaaataaatggcagaaatattaggcttattgaagataagccacgcacaagccataggcgatcttactctggaagcagatccaggtctcgatctagaagacggtcacgaagtaggagtcgcaggagcagccgcagtagatctcgaagtatctcaaaaagtcgctcccgttccaggtcgcggagcaaaggtcgatcacgttctcgatcaaaaggcaggaaatctagatcaaagagcaaatctaagcccaagtctgatcggggctcccattcacattctcgaagcagatctaaggatgagtatgagaaatctcgaagcaggtctcggtcccgatcccccaaagaaaatggaaagggtgatataaagtcaaaatccagatcaaggagccagtcccgttccaattcgccgctacctgttccaccctcaaaggcccgttctgtgtcccctccaccaaaaagagctacttcaagatcccgttctagatctcgctcaaagtcaagatcaaggtccaggtcgagttccagagattaactcagaactccttgtttgcacattattatggaacactttcctacttaggcagttactcttccatgtttatacttggcctcttctgcaagaggaatctcttgaaaacaggggcacacagaaatttgatttgtggccaaattggatgaaaaagatgaggctctaaggaaatggtggcatgaagaccctctcccttctttgtagaattaagataactttgattttatagcttttgagctaacgtaacttttgtaaagattaagctcatttagtgttgtttttttttttttttttttttttagtatttcagcaggatctgctggcagggtttttttgttttatttgtttgcttatttttaaattaactgttttgagctttgaatacttaaggctttagagggagaacccaattttcaattatgttggctttttataaagcttgagttatgtaagatttaaataaaagtttgctaccaagatgattgccttattgaataggtcactattaaattcctttaaatgttgatatctgccatttgtggaaacaacgtaaattctacttaagtgtaaacaaggcaagcctcagaccagcaataaattactcagtttggataacattattttgtgcagttaatcaaatttgccaaagtctttatctgcccctttaacaagttgagtaaaaataaaaggtattttttagtcaatgtgttccatgattttgcttaaattaatacttttaagtaatggaacttttttcaaaggcaaatttaaactatttaagaaatagctcctaatacttgggatcttgtttagagaatccactttctggaagttctcagcataattagtgttgagagtggttcagttgtctttaatgtttgtcatgtggaaatggaagtagcctctttttgttctgaaattgagtttattcaaagtgtaaaagcacatactgcattttctgctgaaagatcattatgtttaacaggcacttaatctcagtaaagtcagttgccagttaagttccacccagtagtcagtcccctttgtagttagtgggattatttgataattggttagatcatacttgtaaattttaatgctttgtgtaattggtttgaaaaacagtgaaatgggtaaacgcaaaacttttgtactttattacgagtaaagtgtaatgagtactgtggaaaccaaatttgaatactgcaaatttgtaggagttactaggttagcaattagtccatacatccataagcctgatgagttgaaattgcagtttgagaagtgaattaaccttacatccctttgttcagataccttaaaagttactttatttaaaagcatttattaatcttagtctgaaatcaaaatatagattaattggctcagctttaatacctttctaggaggtgtcacaatgtagggtaccaagggttggattgtgatggggcatggtcgtacactgctcattgtgccacaggtgtgactggaaagcatgatattctagggttggtttgtagattcaaataatccagaaatatacctaataagattgagtgaaaaatttgagtcaaatatctagggcattcacagagtagctgtgagttcttggtaatgtgaaaaaggccttgtttttcagaaattcctgggtttcctgttaaaaaatcttaaagcccaaccttaggaatatagtgccctacattgtgacacctcctagaaaggtattaaagctgagccaattaatctatattttgatttcagactaagattaataaatgcttttaaataaagtaacttttaaggtatctgaacaaagggatgtaaggttaattcacttctcatactgcaatttcaactcatcaggcttatggatgtatggactaattgctaacctagtaactcctacaaatgtgcagta

SEQ ID NO: 431083 - DNA, 1545 bp, Homo sapiens
cgcgcgccattgtgtggctggactcggccgcccctgtggtgtgaggcgcgtgttcgggctcttgccgtccccgcacccgcaccgcggttactggcttgcggtccgccgttcgacaaccagcccttgggtccccgcccgccacggacatgccgcgcgtctacataggacgcctgagctacaacgtccgggagaaggacatccagcgctttttcagtggctatggccgcctcctcgaagtagacctcaaaaatgggtacggcttcgtggagttcgaggactcccgcgacgccgacgacgccgtttacgagctgaacggcaaggagctctgcggcgagcgcgtgatcgtagagcacgcccggggcccgcgtcgcgatcgcgacggctacagctacggaagccgcagtggtggaggtggatacagcagtcggagaacatctggcagagacaaatacggaccacctgttcgtacagaatacaggcttattgtagaaaatctttctagtcggtgcagttggcaagatttaaaggattttatgcgacaagcaggtgaagtaacctatgcggatgcccacaaggaacgaacaaatgagggtgtaattgagtttcgctcctactctgacatgaagcgtgctttggacaaactggatggcacagaaataaatggcagaaatattaggcttattgaagataagccacgcacaagccataggcgatcttactctggaagcagatccaggtctcgatctagaagacggtcacgaagtaggagtcgcaggagcagccgcagtagatctcgaagtatctcaaaaagtcgctcccgttccaggtcgcggagcaaaggtcgatcacgttctcgatcaaaaggcaggaaatctagatcaaagagcaaatctaagcccaagtctgatcggggctcccattcacattctcgaagcagatctaaggatgagtatgagaaatctcgaagcaggtctcggtcccgatcccccaaagaaaatggaaagggtgatataaagtcaaaatccagatcaaggagccagtcccgttccaattcgccgctacctgttccaccctcaaaggcccgttctgtgtcccctccaccaaaaagagctacttcaagatcccgttctagatctcgctcaaagtcaagatcaaggtccaggtcgagttccagagattaactcagaactccttgtttgcacattattatggaacactttcctacttaggcagttactcttccatgtttatacttggcctcttctgcaagaggaatctcttgaaaacaggggcacacagaaatttgatttgtggccaaattggatgaaaaagatgaggctctaaggaaatggtggcatgaagaccctctcccttctttgtagaattaagataactttgattttatagcttttgagctaacgtaacttttgtaaagattaagctcatttagtgttgtttttgttaagtctttgtttctttttgtctggtaattggtgtatatggtattttatacacacgcacaaaagttcgttcgtgacaaatcgg

SEQ ID NO: 431084 - DNA, 570 bp, Homo sapiens
aatttcgtagtaaagaaaaacattattctttggcttatctatttttgccagatggcacggatgtatttaagttggattgggattaagacttcattgtttttctcctaataggtctcgatctagaagacggtcacgaagtaggagtcgcaggagcagccgcagtagatctcgaagtatctcaaaaagtcgctcccggtaaataacgttgtgttgagtcactgtgaatattaccgtacttgtttatggagtatgtgtacattctcactaagtattgagaaaatcggtctttccttgtccagttccaggtcgcggagcaaaggtcgatcacgttctcgatcaaaaggcaggaaatctagatcaaagagcaaatctaagcccaagtctgatcggggctcccattcacattctcgaagcagatctaaggatgagtatgagaaatctcgaagcaggtctcggtcccgatcccccaaagaaaatggaaagggtgatataaagtcaaaatccagatcaaggagccagtcccgttccaattcgccgctacctgttccaccctcaaaggcccgttctgtg

SEQ ID NO: 431085 - DNA, 747 bp, Homo sapiens
aaattttgtctaacctggcttctgaaatttctcaaactaaatattcatgctgttttgtgtttttcttaatgactgaggctagtgatattactcagaaaagtaacagtaacttgggtcttctgagcgtcaggatgttcaccatttaacttgtttctcgttagtgtctagtacgtcggctttcggtagtgtaggtgtgtgttctgtgtcctttcccgtgtgtgcctgcactagtggcagcctctgcttccaggtcagtttagagtagactggctctggtattgctagcaagtagttgctgttacccagtgtagccatgaagcccagctccttggatcttgacatatatgttccaggcaaagtacgtaatccagacgtttctaactctttctagatgattgcaattgttctccatgttgtctgttaggcgttatgttaattctcgatctaacagtgtgcctgtaacatatatggtagtgaagagacatcacatgcagagaccgttttccttttatcaactacaggtccgctatcgacgagagcacctttctgctaggcagtcaccctacttcccgttgttggaggatttgatgagagacggcagtgatggtgctgctctcttagctgtgattcactattattgcccagagcagatgaaactggatggtgagtggagaatgcttccctgaaacagatccgaaaaggcttaaaggaaaattatagtgtacattgatccacatatatattaaa

SEQ ID NO: 431086 - DNA, 742 bp, Homo sapiens
cggccgcgccgccgccgagggctggaggaagatggaggccccgccggacggcgccgccgacctcgtgcccctggaccgctacgacgcggcgcgcgccaagatcgccgccaacctgcagtggatctgcgccaaggcctacggccgagataacatccctgaggacctcagagaccctttctacgttgaccagtatgagcaggagcacattaagccgcctgttatcaagcttctcctgtccagcgagctgtactgccgtgtctgcagcctcatcctgaaaggggaccaggtggccgccttacagggacaccagtctgtcatccaggccctgtcccggaaagggatctatgtgatggagagtgatgacacccccgtgacagagtccgacctcagtcgcgcacccataaaaatgagtgcccacatggcaatggtggatgccctgatgatggcctacactgtggagatgatcagcatcgagaaggtggtggccagtgtcaagcgcttctcaacgttcagtgcctcgaaagaacttccgtacgacctcgaggatgccatggtgttctggatcaacaaggtaaatcttaaaatgagagagataacagagaaagaagttaaattaaaacaacagttattggaaagtccagctcatcaaaaggtaaagggtaaatttaatttttctggaatgcactaagttaatgttggtcccaattttaaagaattctgttagttcccacctgtgccgaat

SEQ ID NO: 431087 - DNA, 7627 bp, Homo sapiens
cggccgcgccgccgccgagggctggaggaagatggaggccccgccggacggcgccgccgacctcgtgcccctggaccgctacgacgcggcgcgcgccaagatcgccgccaacctgcagtggatctgcgccaaggcctacggccgagataacatccctgaggacctcagagaccctttctacgttgaccagtatgagcaggagcacattaagccgcctgttatcaagcttctcctgtccagcgagctgtactgccgtgtctgcagcctcatcctgaaaggggaccaggtggccgccttacagggacaccagtctgtcatccaggccctgtcccggaaagggatctatgtgatggagagtgatgacacccccgtgacagagtccgacctcagtcgcgcacccataaaaatgagtgcccacatggcaatggtggatgccctgatgatggcctacactgtggagatgatcagcatcgagaaggtggtggccagtgtcaagcgcttctcaacgttcagtgcctcgaaagaacttccgtacgacctcgaggatgccatggtgttctggatcaacaaggtaaatcttaaaatgagagagataacagagaaagaagttaaattaaaacaacagttattggaaagtccagctcatcaaaaggtccgctatcgacgagagcacctttctgctaggcagtcaccctacttcccgttgttggaggatttgatgagagacggcagtgatggtgctgctctcttagctgtgattcactattattgcccagagcagatgaaactggatgatatatgcttaaaggaggtaacgtcgatggccgacagtctgtataatattcggcttctgagagaattctccaatgaatatcttaataaatgtttttatctcaccttggaagatatgctgtatgcgccattagtgttgaagccgaatgttatggtttttattgcggagcttttttggtggttcgagaatgtcaagccagattttgttcagcccagggatgttcaggagctgaaagacgcgaaaacagtgttacaccagaagagcagccggcctcctgtaccgatctccaacgcgaccaaacgcagtttcctaggcagccctgctgcagggaccctggctgagctgcagccccccgtgcagctgccggcggaaggctgtcacaggcactacctgcacccggaagaacctgaatacctcgggaaaggaactgctgccttcagcccatcccatcctttattgccactgagacagaaacagcagaaatccatacagggagaggacatccctgatcagcgacatcgatcgaattctttgacccgagttgatggtcagcctcgaggagcagcaatagcctggccagaaaaaaaaaccaggcctgcgtcccagccaacaccttttgctctacatcacgctgcgagttgtgaagtggatcccagctctggcgacagcatcagcttggcccgctccatcagcaaagacagtttggcatccaacattgttaatctgaccccacagaaccagccacaccccacggccacgaagagccacgggaagagcctcctgagcaatgtcagtattgaggatgaggaagaggagcttgtggctattgttagagcagacgtggttccccagcaggctgacccggagttccccagggcctcaccccgggccttaggccttacagcaaatgcccggtctccccaaggacagctggacacctcggaaagtaagcctgacagttttttcttggagcctttgatgccagcagttcttaagccagcgaaagagaagcaggtgatcaccaaggaggatgaacggggggaagggagaccgaggagcatcgtgtctaggaggcccagcgagggcccccagcctttggtacgaaggaaaatgactggcagtcgcgacttgaataggacttttaccccgattccatgctcagaattccccatgggcatcgaccccaccgagacaggaccactgtcagtggaaaccgcaggagaggtctgtggtgggcctctggcccttggcggattcgatccgttcccccagggaccatccacggatggcttcttccttcatgtaggcagggccgatgaagacaccgagggaaggttatatgttagttgttcaaaaagccccaactcccacgattcagagccgtggactctcctcaggcaggattctgactcggatgtggtggacatagaggaagccgagcacgatttcatgggtgaggcccatcctgtggttttcagcagatacattggggaggaagagtcggccaaactgcaggaggacatgaaggtgaaggaacatgaagacaaagatgacgccagcggccgctcgagcccctgcctgagcacagcctctcagatgagcagtgtctccatggcgagtgggagcgtgaagatgaccagctttgcggagaggaagctccagagactcaacagctgtgagaccaagtccagcaccagcagctcccagaagaccacgccagatgcgtctgagagctgcccagcccctctgacgacgtggaggcagaagagggagcagagtccgagccagcatggcaaggatcccgccagcctcctggcatctgagctggtacagctgcacatgcagctggaggagaagcgcagggccatcgaggcccagaagaagaagatggaggcgctgtcggcaaggcagcgcctgaagctcggcaaggctgcattcctgcatgtggtgaagaagggcaaggccgaggctgccccacccctcaggccggagcactttgcaaaggagtactctcagcacaacggggaggactgtggggacgctgtttccaaaaccgaagactttctcgtgaaggaggagcagagagaggagctccttcacgagccacaggatgtggacaaagagagcctggcctttgctcagcaacataaagcaaaagaccctgtggctctgcacgagctggagagaaataaggtgatctccgctgccctcctggaggacactgttggggaggttgtcgacgtgaatgaatgtgacctttccatcgagaagcttaacgaaaccatcagtacgctgcagcaggccatcctgaaaatctctcagcagcaagagcagcttctgatgaagtcccccacagtcccagtgccaggctctaagaataactcgcaggaccacaaagtgaaggcaccagtccacttcgtggagccactctctcccacgggcgtggctggccaccgcaaagccccccggctgggtcaaggccggaattcccgttccggaaggccggcggagctgaaggtcccaaaagacaggccacagggctcctcccgaagtaaaaccccaacgcccagtgtagagacgctcccgcacttgagacccttccctgccagcagccaccctcggacgcccacggaccctggcctggacagtgccctggagcccagtggtgacccacatgggaagtgtctcttcgacagttacaggctccatgatgaaagcaatcagcggacacttactctgtcctcttccaaagatgccaacattctttcggagcagatgagcctcaaagaagttctggatgcgagtgtgaaggaggtggggtccagctcctcagatgtctcgggaaaagagagcgtccccgtggaggagcctctgaggagcagggccagcctcattgaagtggacctctccgacctgaaggcccccgacgaggatggggagctggtaagcctcgatggctcggcggaccttgtcagcgaaggcgaccagaagccgggggtcggcttcttcttcaaggatgaacagaaagcggaagatgagctcgccaagaagcgggcggccttcctcctgaagcagcagcgcaaggccgaggaggcccgcgtgcgcaagcagcagctggaagcggaggtggagctcaagcgtgacgaagcccggcgcaaagctgaggaagaccgggtgcggaaggaggaggagaaggcgcggcgcgagctcatcaagcaggagtacctgcggaggaagcagcagcagatcctagaggagcaggggctcggcaagcccaagtcaaagccgaagaagccgcggccgaagtcggtgcaccgggaagagtcgtgcagcgactccggcaccaagtgctcctccacccctgataacttgagccggactcagtcaggctccagcctgtccttggcctctgcggcgacgacagaacccgagagcgttcattccgggggcacaccctctcagcgagtggaatcgatggaagccctgcccatactgagccgtaacccaagcaggagcacagaccgagactgggagaccgcgtcggcggcatcttccctggcctcagtggccgagtacacaggtcccaagctctttaaggagcccagtagtaaatcaaacaagccgattattcacaatgccatatcccattgctgcctggctggaaaagtgaacgaaccccacaagaattccatattggaggagctggagaagtgtgatgccaatcactacatcatactgtttcgtgatgctggctgccagttcagggcgctttactgctactatcctgatactgaggaaatctacaaactcactggcacggggccaaagaacatcaccaagaaaatgatcgacaaactgtataaatacagctcagaccgaaaacagtttaacttgatcccagccaaaaccatgtctgtcagtgtggacgcactcacaatccacaaccacctgtggcagcccaagcggcctgcagtgccaaagaaggcccagactcgtaaatgaccccggtgcagctggcgtccaaagggtgacccagactcgtaaatgatgcccttgtggctggcatccagagggtgccacggggtccttatttattgttttcatctatttgggtacgaagtgtgcaaagtcacagaccttttgcaaagaggtttctagacagcagaagaaaacccctctctcagcgctcatctcacgcagaggatgccaggcagggtgaggatgggggagtagatgccgcttttgcagtggctcgcactgctgtggccactgctgaccactgaggctcccagcggagggtgttcacagccaggtcccgggccacggagctcccttacttgaagttctccttcagcatagattagacgtgatccactttgctttcttgcttctcacctcgcccccttgcacattgcctgacaccctcatattggccagctgtaatctcgtgactatgggactgaggctcaatcttggcttggggtgtttgaatgtctatagcaaaggaattcataatgggaaatctttttcatttgagaaattgtatgatatttattggttgtgtctactgccaacatttatatccaattctaagatttctgaaaaaaaattcttatcccttgctgctcagaaaaagtttacggaaaacaccagttcactaaaagcaccgaaatctgcaaagcctgtcttccgctagaacaacgtctacaaatgtgaagatgatgacttctggcacgcggtcatgagggtggggaatggcactaggagctgatgtttgcctcatttaaagtaggcaagccgagccaactgcagccatcattcattaagttttgggtagtgctctaatggtttgttcactttaataaagacagattttggtaaagtagaatatttttcattctgagcatgtttgtcccaaaaggtgatgcacttaagctgacagtcccttcagtggttttgttaggtcacggcttgtcctgtctggattctgcatctggaagcgctgcatgctctcagaggagcgtgccgtttcccctgtagatggatacttttgttttgttgcctatttaaaaacaattaagtggttatttgcagttatttcagaactccaagtaagtggatggctttgggttctttctgccttggtcccaatggtgttgatgcttctgtggagcgcggacattcccaggagcaggtgcgtgccagccatggctgccagacactgctgcaactgaccagctgccggaagattctggagccactaacattagttttgcacatattttcttgggagtgttacttgaatctatctcaaactgcagaaaaaatcaaaagatcaataattgggagaaaaagagacaaatttaactgttacataattttagatagacaaaaaacatgagtgagtcgtgtacataaggagggaacatggtacagaaggctagaaggaattataggtcttattcccctttcctcagtcctttgaagagaagtacagtctcttgcgattttgtatatatcgtgttcgacacagccgctctctgtcctgtaaatagggaactaaaggctgtatgatttctcaagtgctgagttacacagtcctgagtgagctttctgttaccatactttcacacgtgggctttatttctcactgtatgtttgatatgatattactgtatttattttaagaaagcactaagatgtaataaagtgatgaactaatttgctttacattgaatcgtatgtgtgaggttgctgtggctcatttcgctgaccaggcgacaccaactccttgctttataggagtttcacattgttctttaccatggccctatcgaagtcagtggaattggattctttttaatgaagagctagaaaatatctggcatagagctggaaaattgcattcccatgggacgtctgaatcaattctggattttctccatggaatgagtcagtgtgtggaacatcctgaaacttgtccttaagcgtgtagttttcactgttcgttgcgagtaagcactaatgtggcatggacattcctgatgtcccaagtccccaggccagtgttcgcctaatgattgacagaagcgtccctgcgttcttcatgcttggacacagcaacccttttaattagtcttgaaaagtttcagacacaggattaattttcgtggtggtgcttttgggcctttctggcttgggtggtggtaaagtcatgattttgcagttgataacactgacttataactctgtttatcaatgtctcctatattcaaagcccctgcagtggtatttgtgtctcgttgcaaatttctttcagcggaaagcttgcacaactttcgttgtgtctcagaattctaaccttgttatttaagacaagctgctctacccatttaggatataactttgtaaagaaagtgtaaaccaaatgattcaatgtatgatgaagtttatgtgtaaatccttggtaatgctagaattctgggagcccagaagggttgaaagagaaatgaaacttgcgtgagtcccattattttacgcatgtatgtgcagatacgttctacccacacgtgtgcgtgcacatggctgtgtgcgtgcaccaaagatggactgctttccatgtgtccttttgactttctgcacgtgtcactgcggtgcagtctcttagcagacttcaggcccaaactgtattcttcactcaggcaaaattgaaaagtggaataattctaaattacttctaggttatacttttacctccctgaaattgtagttgtcacttggagggcaaaatatttattgaaataaaattttctgttaaaaattcaaaaaaaaaaa

SEQ ID NO: 431088 - DNA, 7660 bp, Homo sapiens
cggccgcgccgccgccgagggctggaggaagatggaggccccgccggacggcgccgccgacctcgtgcccctggaccgctacgacgcggcgcgcgccaagatcgccgccaacctgcagtggatctgcgccaaggcctacggccgagataacatccctgaggacctcagagaccctttctacgttgaccagtatgagcaggagcacattaagccgcctgttatcaagcttctcctgtccagcgagctgtactgccgtgtctgcagcctcatcctgaaaggggaccaggtggccgccttacagggacaccagtctgtcatccaggccctgtcccggaaagggatctatgtgatggagagtgatgacacccccgtgacagagtccgacctcagtcgcgcacccataaaaatgagtgcccacatggcaatggtggatgccctgatgatggcctacactgtggagatgatcagcatcgagaaggtggtggccagtgtcaagcgcttctcaacgttcagtgcctcgaaagaacttccgtacgacctcgaggatgccatggtgttctggatcaacaaggtaaatcttaaaatgagagagataacagagaaagaagttaaattaaaacaacagttattggaaagtccagctcatcaaaagtctccctccaagtggtattggaagttagtgcctgtccgctatcgacgagagcacctttctgctaggcagtcaccctacttcccgttgttggaggatttgatgagagacggcagtgatggtgctgctctcttagctgtgattcactattattgcccagagcagatgaaactggatgatatatgcttaaaggaggtaacgtcgatggccgacagtctgtataatattcggcttctgagagaattctccaatgaatatcttaataaatgtttttatctcaccttggaagatatgctgtatgcgccattagtgttgaagccgaatgttatggtttttattgcggagcttttttggtggttcgagaatgtcaagccagattttgttcagcccagggatgttcaggagctgaaagacgcgaaaacagtgttacaccagaagagcagccggcctcctgtaccgatctccaacgcgaccaaacgcagtttcctaggcagccctgctgcagggaccctggctgagctgcagccccccgtgcagctgccggcggaaggctgtcacaggcactacctgcacccggaagaacctgaatacctcgggaaaggaactgctgccttcagcccatcccatcctttattgccactgagacagaaacagcagaaatccatacagggagaggacatccctgatcagcgacatcgatcgaattctttgacccgagttgatggtcagcctcgaggagcagcaatagcctggccagaaaaaaaaaccaggcctgcgtcccagccaacaccttttgctctacatcacgctgcgagttgtgaagtggatcccagctctggcgacagcatcagcttggcccgctccatcagcaaagacagtttggcatccaacattgttaatctgaccccacagaaccagccacaccccacggccacgaagagccacgggaagagcctcctgagcaatgtcagtattgaggatgaggaagaggagcttgtggctattgttagagcagacgtggttccccagcaggctgacccggagttccccagggcctcaccccgggccttaggccttacagcaaatgcccggtctccccaaggacagctggacacctcggaaagtaagcctgacagttttttcttggagcctttgatgccagcagttcttaagccagcgaaagagaagcaggtgatcaccaaggaggatgaacggggggaagggagaccgaggagcatcgtgtctaggaggcccagcgagggcccccagcctttggtacgaaggaaaatgactggcagtcgcgacttgaataggacttttaccccgattccatgctcagaattccccatgggcatcgaccccaccgagacaggaccactgtcagtggaaaccgcaggagaggtctgtggtgggcctctggcccttggcggattcgatccgttcccccagggaccatccacggatggcttcttccttcatgtaggcagggccgatgaagacaccgagggaaggttatatgttagttgttcaaaaagccccaactcccacgattcagagccgtggactctcctcaggcaggattctgactcggatgtggtggacatagaggaagccgagcacgatttcatgggtgaggcccatcctgtggttttcagcagatacattggggaggaagagtcggccaaactgcaggaggacatgaaggtgaaggaacatgaagacaaagatgacgccagcggccgctcgagcccctgcctgagcacagcctctcagatgagcagtgtctccatggcgagtgggagcgtgaagatgaccagctttgcggagaggaagctccagagactcaacagctgtgagaccaagtccagcaccagcagctcccagaagaccacgccagatgcgtctgagagctgcccagcccctctgacgacgtggaggcagaagagggagcagagtccgagccagcatggcaaggatcccgccagcctcctggcatctgagctggtacagctgcacatgcagctggaggagaagcgcagggccatcgaggcccagaagaagaagatggaggcgctgtcggcaaggcagcgcctgaagctcggcaaggctgcattcctgcatgtggtgaagaagggcaaggccgaggctgccccacccctcaggccggagcactttgcaaaggagtactctcagcacaacggggaggactgtggggacgctgtttccaaaaccgaagactttctcgtgaaggaggagcagagagaggagctccttcacgagccacaggatgtggacaaagagagcctggcctttgctcagcaacataaagcaaaagaccctgtggctctgcacgagctggagagaaataaggtgatctccgctgccctcctggaggacactgttggggaggttgtcgacgtgaatgaatgtgacctttccatcgagaagcttaacgaaaccatcagtacgctgcagcaggccatcctgaaaatctctcagcagcaagagcagcttctgatgaagtcccccacagtcccagtgccaggctctaagaataactcgcaggaccacaaagtgaaggcaccagtccacttcgtggagccactctctcccacgggcgtggctggccaccgcaaagccccccggctgggtcaaggccggaattcccgttccggaaggccggcggagctgaaggtcccaaaagacaggccacagggctcctcccgaagtaaaaccccaacgcccagtgtagagacgctcccgcacttgagacccttccctgccagcagccaccctcggacgcccacggaccctggcctggacagtgccctggagcccagtggtgacccacatgggaagtgtctcttcgacagttacaggctccatgatgaaagcaatcagcggacacttactctgtcctcttccaaagatgccaacattctttcggagcagatgagcctcaaagaagttctggatgcgagtgtgaaggaggtggggtccagctcctcagatgtctcgggaaaagagagcgtccccgtggaggagcctctgaggagcagggccagcctcattgaagtggacctctccgacctgaaggcccccgacgaggatggggagctggtaagcctcgatggctcggcggaccttgtcagcgaaggcgaccagaagccgggggtcggcttcttcttcaaggatgaacagaaagcggaagatgagctcgccaagaagcgggcggccttcctcctgaagcagcagcgcaaggccgaggaggcccgcgtgcgcaagcagcagctggaagcggaggtggagctcaagcgtgacgaagcccggcgcaaagctgaggaagaccgggtgcggaaggaggaggagaaggcgcggcgcgagctcatcaagcaggagtacctgcggaggaagcagcagcagatcctagaggagcaggggctcggcaagcccaagtcaaagccgaagaagccgcggccgaagtcggtgcaccgggaagagtcgtgcagcgactccggcaccaagtgctcctccacccctgataacttgagccggactcagtcaggctccagcctgtccttggcctctgcggcgacgacagaacccgagagcgttcattccgggggcacaccctctcagcgagtggaatcgatggaagccctgcccatactgagccgtaacccaagcaggagcacagaccgagactgggagaccgcgtcggcggcatcttccctggcctcagtggccgagtacacaggtcccaagctctttaaggagcccagtagtaaatcaaacaagccgattattcacaatgccatatcccattgctgcctggctggaaaagtgaacgaaccccacaagaattccatattggaggagctggagaagtgtgatgccaatcactacatcatactgtttcgtgatgctggctgccagttcagggcgctttactgctactatcctgatactgaggaaatctacaaactcactggcacggggccaaagaacatcaccaagaaaatgatcgacaaactgtataaatacagctcagaccgaaaacagtttaacttgatcccagccaaaaccatgtctgtcagtgtggacgcactcacaatccacaaccacctgtggcagcccaagcggcctgcagtgccaaagaaggcccagactcgtaaatgaccccggtgcagctggcgtccaaagggtgacccagactcgtaaatgatgcccttgtggctggcatccagagggtgccacggggtccttatttattgttttcatctatttgggtacgaagtgtgcaaagtcacagaccttttgcaaagaggtttctagacagcagaagaaaacccctctctcagcgctcatctcacgcagaggatgccaggcagggtgaggatgggggagtagatgccgcttttgcagtggctcgcactgctgtggccactgctgaccactgaggctcccagcggagggtgttcacagccaggtcccgggccacggagctcccttacttgaagttctccttcagcatagattagacgtgatccactttgctttcttgcttctcacctcgcccccttgcacattgcctgacaccctcatattggccagctgtaatctcgtgactatgggactgaggctcaatcttggcttggggtgtttgaatgtctatagcaaaggaattcataatgggaaatctttttcatttgagaaattgtatgatatttattggttgtgtctactgccaacatttatatccaattctaagatttctgaaaaaaaattcttatcccttgctgctcagaaaaagtttacggaaaacaccagttcactaaaagcaccgaaatctgcaaagcctgtcttccgctagaacaacgtctacaaatgtgaagatgatgacttctggcacgcggtcatgagggtggggaatggcactaggagctgatgtttgcctcatttaaagtaggcaagccgagccaactgcagccatcattcattaagttttgggtagtgctctaatggtttgttcactttaataaagacagattttggtaaagtagaatatttttcattctgagcatgtttgtcccaaaaggtgatgcacttaagctgacagtcccttcagtggttttgttaggtcacggcttgtcctgtctggattctgcatctggaagcgctgcatgctctcagaggagcgtgccgtttcccctgtagatggatacttttgttttgttgcctatttaaaaacaattaagtggttatttgcagttatttcagaactccaagtaagtggatggctttgggttctttctgccttggtcccaatggtgttgatgcttctgtggagcgcggacattcccaggagcaggtgcgtgccagccatggctgccagacactgctgcaactgaccagctgccggaagattctggagccactaacattagttttgcacatattttcttgggagtgttacttgaatctatctcaaactgcagaaaaaatcaaaagatcaataattgggagaaaaagagacaaatttaactgttacataattttagatagacaaaaaacatgagtgagtcgtgtacataaggagggaacatggtacagaaggctagaaggaattataggtcttattcccctttcctcagtcctttgaagagaagtacagtctcttgcgattttgtatatatcgtgttcgacacagccgctctctgtcctgtaaatagggaactaaaggctgtatgatttctcaagtgctgagttacacagtcctgagtgagctttctgttaccatactttcacacgtgggctttatttctcactgtatgtttgatatgatattactgtatttattttaagaaagcactaagatgtaataaagtgatgaactaatttgctttacattgaatcgtatgtgtgaggttgctgtggctcatttcgctgaccaggcgacaccaactccttgctttataggagtttcacattgttctttaccatggccctatcgaagtcagtggaattggattctttttaatgaagagctagaaaatatctggcatagagctggaaaattgcattcccatgggacgtctgaatcaattctggattttctccatggaatgagtcagtgtgtggaacatcctgaaacttgtccttaagcgtgtagttttcactgttcgttgcgagtaagcactaatgtggcatggacattcctgatgtcccaagtccccaggccagtgttcgcctaatgattgacagaagcgtccctgcgttcttcatgcttggacacagcaacccttttaattagtcttgaaaagtttcagacacaggattaattttcgtggtggtgcttttgggcctttctggcttgggtggtggtaaagtcatgattttgcagttgataacactgacttataactctgtttatcaatgtctcctatattcaaagcccctgcagtggtatttgtgtctcgttgcaaatttctttcagcggaaagcttgcacaactttcgttgtgtctcagaattctaaccttgttatttaagacaagctgctctacccatttaggatataactttgtaaagaaagtgtaaaccaaatgattcaatgtatgatgaagtttatgtgtaaatccttggtaatgctagaattctgggagcccagaagggttgaaagagaaatgaaacttgcgtgagtcccattattttacgcatgtatgtgcagatacgttctacccacacgtgtgcgtgcacatggctgtgtgcgtgcaccaaagatggactgctttccatgtgtccttttgactttctgcacgtgtcactgcggtgcagtctcttagcagacttcaggcccaaactgtattcttcactcaggcaaaattgaaaagtggaataattctaaattacttctaggttatacttttacctccctgaaattgtagttgtcacttggagggcaaaatatttattgaaataaaattttctgttaaaaattcaaaaaaaaaaa

SEQ ID NO: 431089 - DNA, 7202 bp, Homo sapiens
cggccgcgccgccgccgagggctggaggaagatggaggccccgccggacggcgccgccgacctcgtgcccctggaccgctacgacgcggcgcgcgccaagatcgccgccaacctgcagtggatctgcgccaaggcctacggccgaggtaaatcttaaaatgagagagataacagagaaagaagttaaattaaaacaacagttattggaaagtccagctcatcaaaaggtccgctatcgacgagagcacctttctgctaggcagtcaccctacttcccgttgttggaggatttgatgagagacggcagtgatggtgctgctctcttagctgtgattcactattattgcccagagcagatgaaactggatgatatatgcttaaaggaggtaacgtcgatggccgacagtctgtataatattcggcttctgagagaattctccaatgaatatcttaataaatgtttttatctcaccttggaagatatgctgtatgcgccattagtgttgaagccgaatgttatggtttttattgcggagcttttttggtggttcgagaatgtcaagccagattttgttcagcccagggatgttcaggagctgaaagacgcgaaaacagtgttacaccagaagagcagccggcctcctgtaccgatctccaacgcgaccaaacgcagtttcctaggcagccctgctgcagggaccctggctgagctgcagccccccgtgcagctgccggcggaaggctgtcacaggcactacctgcacccggaagaacctgaatacctcgggaaaggaactgctgccttcagcccatcccatcctttattgccactgagacagaaacagcagaaatccatacagggagaggacatccctgatcagcgacatcgatcgaattctttgacccgagttgatggtcagcctcgaggagcagcaatagcctggccagaaaaaaaaaccaggcctgcgtcccagccaacaccttttgctctacatcacgctgcgagttgtgaagtggatcccagctctggcgacagcatcagcttggcccgctccatcagcaaagacagtttggcatccaacattgttaatctgaccccacagaaccagccacaccccacggccacgaagagccacgggaagagcctcctgagcaatgtcagtattgaggatgaggaagaggagcttgtggctattgttagagcagacgtggttccccagcaggctgacccggagttccccagggcctcaccccgggccttaggccttacagcaaatgcccggtctccccaaggacagctggacacctcggaaagtaagcctgacagttttttcttggagcctttgatgccagcagttcttaagccagcgaaagagaagcaggtgatcaccaaggaggatgaacggggggaagggagaccgaggagcatcgtgtctaggaggcccagcgagggcccccagcctttggtacgaaggaaaatgactggcagtcgcgacttgaataggacttttaccccgattccatgctcagaattccccatgggcatcgaccccaccgagacaggaccactgtcagtggaaaccgcaggagaggtctgtggtgggcctctggcccttggcggattcgatccgttcccccagggaccatccacggatggcttcttccttcatgtaggcagggccgatgaagacaccgagggaaggttatatgttagttgttcaaaaagccccaactcccacgattcagagccgtggactctcctcaggcaggattctgactcggatgtggtggacatagaggaagccgagcacgatttcatgggtgaggcccatcctgtggttttcagcagatacattggggaggaagagtcggccaaactgcaggaggacatgaaggtgaaggaacatgaagacaaagatgacgccagcggccgctcgagcccctgcctgagcacagcctctcagatgagcagtgtctccatggcgagtgggagcgtgaagatgaccagctttgcggagaggaagctccagagactcaacagctgtgagaccaagtccagcaccagcagctcccagaagaccacgccagatgcgtctgagagctgcccagcccctctgacgacgtggaggcagaagagggagcagagtccgagccagcatggcaaggatcccgccagcctcctggcatctgagctggtacagctgcacatgcagctggaggagaagcgcagggccatcgaggcccagaagaagaagatggaggcgctgtcggcaaggcagcgcctgaagctcggcaaggctgcattcctgcatgtggtgaagaagggcaaggccgaggctgccccacccctcaggccggagcactttgcaaaggagtactctcagcacaacggggaggactgtggggacgctgtttccaaaaccgaagactttctcgtgaaggaggagcagagagaggagctccttcacgagccacaggatgtggacaaagagagcctggcctttgctcagcaacataaagcaaaagaccctgtggctctgcacgagctggagagaaataaggtgatctccgctgccctcctggaggacactgttggggaggttgtcgacgtgaatgaatgtgacctttccatcgagaagcttaacgaaaccatcagtacgctgcagcaggccatcctgaaaatctctcagcagcaagagcagcttctgatgaagtcccccacagtcccagtgccaggctctaagaataactcgcaggaccacaaagtgaaggcaccagtccacttcgtggagccactctctcccacgggcgtggctggccaccgcaaagccccccggctgggtcaaggccggaattcccgttccggaaggccggcggagctgaaggtcccaaaagacaggccacagggctcctcccgaagtaaaaccccaacgcccagtgtagagacgctcccgcacttgagacccttccctgccagcagccaccctcggacgcccacggaccctggcctggacagtgccctggagcccagtggtgacccacatgggaagtgtctcttcgacagttacaggctccatgatgaaagcaatcagcggacacttactctgtcctcttccaaagatgccaacattctttcggagcagatgagcctcaaagaagttctggatgcgagtgtgaaggaggtggggtccagctcctcagatgtctcgggaaaagagagcgtccccgtggaggagcctctgaggagcagggccagcctcattgaagtggacctctccgacctgaaggcccccgacgaggatggggagctggtaagcctcgatggctcggcggaccttgtcagcgaaggcgaccagaagccgggggtcggcttcttcttcaaggatgaacagaaagcggaagatgagctcgccaagaagcgggcggccttcctcctgaagcagcagcgcaaggccgaggaggcccgcgtgcgcaagcagcagctggaagcggaggtggagctcaagcgtgacgaagcccggcgcaaagctgaggaagaccgggtgcggaaggaggaggagaaggcgcggcgcgagctcatcaagcaggagtacctgcggaggaagcagcagcagatcctagaggagcaggggctcggcaagcccaagtcaaagccgaagaagccgcggccgaagtcggtgcaccgggaagagtcgtgcagcgactccggcaccaagtgctcctccacccctgataacttgagccggactcagtcaggctccagcctgtccttggcctctgcggcgacgacagaacccgagagcgttcattccgggggcacaccctctcagcgagtggaatcgatggaagccctgcccatactgagccgtaacccaagcaggagcacagaccgagactgggagaccgcgtcggcggcatcttccctggcctcagtggccgagtacacaggtcccaagctctttaaggagcccagtagtaaatcaaacaagccgattattcacaatgccatatcccattgctgcctggctggaaaagtgaacgaaccccacaagaattccatattggaggagctggagaagtgtgatgccaatcactacatcatactgtttcgtgatgctggctgccagttcagggcgctttactgctactatcctgatactgaggaaatctacaaactcactggcacggggccaaagaacatcaccaagaaaatgatcgacaaactgtataaatacagctcagaccgaaaacagtttaacttgatcccagccaaaaccatgtctgtcagtgtggacgcactcacaatccacaaccacctgtggcagcccaagcggcctgcagtgccaaagaaggcccagactcgtaaatgaccccggtgcagctggcgtccaaagggtgacccagactcgtaaatgatgcccttgtggctggcatccagagggtgccacggggtccttatttattgttttcatctatttgggtacgaagtgtgcaaagtcacagaccttttgcaaagaggtttctagacagcagaagaaaacccctctctcagcgctcatctcacgcagaggatgccaggcagggtgaggatgggggagtagatgccgcttttgcagtggctcgcactgctgtggccactgctgaccactgaggctcccagcggagggtgttcacagccaggtcccgggccacggagctcccttacttgaagttctccttcagcatagattagacgtgatccactttgctttcttgcttctcacctcgcccccttgcacattgcctgacaccctcatattggccagctgtaatctcgtgactatgggactgaggctcaatcttggcttggggtgtttgaatgtctatagcaaaggaattcataatgggaaatctttttcatttgagaaattgtatgatatttattggttgtgtctactgccaacatttatatccaattctaagatttctgaaaaaaaattcttatcccttgctgctcagaaaaagtttacggaaaacaccagttcactaaaagcaccgaaatctgcaaagcctgtcttccgctagaacaacgtctacaaatgtgaagatgatgacttctggcacgcggtcatgagggtggggaatggcactaggagctgatgtttgcctcatttaaagtaggcaagccgagccaactgcagccatcattcattaagttttgggtagtgctctaatggtttgttcactttaataaagacagattttggtaaagtagaatatttttcattctgagcatgtttgtcccaaaaggtgatgcacttaagctgacagtcccttcagtggttttgttaggtcacggcttgtcctgtctggattctgcatctggaagcgctgcatgctctcagaggagcgtgccgtttcccctgtagatggatacttttgttttgttgcctatttaaaaacaattaagtggttatttgcagttatttcagaactccaagtaagtggatggctttgggttctttctgccttggtcccaatggtgttgatgcttctgtggagcgcggacattcccaggagcaggtgcgtgccagccatggctgccagacactgctgcaactgaccagctgccggaagattctggagccactaacattagttttgcacatattttcttgggagtgttacttgaatctatctcaaactgcagaaaaaatcaaaagatcaataattgggagaaaaagagacaaatttaactgttacataattttagatagacaaaaaacatgagtgagtcgtgtacataaggagggaacatggtacagaaggctagaaggaattataggtcttattcccctttcctcagtcctttgaagagaagtacagtctcttgcgattttgtatatatcgtgttcgacacagccgctctctgtcctgtaaatagggaactaaaggctgtatgatttctcaagtgctgagttacacagtcctgagtgagctttctgttaccatactttcacacgtgggctttatttctcactgtatgtttgatatgatattactgtatttattttaagaaagcactaagatgtaataaagtgatgaactaatttgctttacattgaatcgtatgtgtgaggttgctgtggctcatttcgctgaccaggcgacaccaactccttgctttataggagtttcacattgttctttaccatggccctatcgaagtcagtggaattggattctttttaatgaagagctagaaaatatctggcatagagctggaaaattgcattcccatgggacgtctgaatcaattctggattttctccatggaatgagtcagtgtgtggaacatcctgaaacttgtccttaagcgtgtagttttcactgttcgttgcgagtaagcactaatgtggcatggacattcctgatgtcccaagtccccaggccagtgttcgcctaatgattgacagaagcgtccctgcgttcttcatgcttggacacagcaacccttttaattagtcttgaaaagtttcagacacaggattaattttcgtggtggtgcttttgggcctttctggcttgggtggtggtaaagtcatgattttgcagttgataacactgacttataactctgtttatcaatgtctcctatattcaaagcccctgcagtggtatttgtgtctcgttgcaaatttctttcagcggaaagcttgcacaactttcgttgtgtctcagaattctaaccttgttatttaagacaagctgctctacccatttaggatataactttgtaaagaaagtgtaaaccaaatgattcaatgtatgatgaagtttatgtgtaaatccttggtaatgctagaattctgggagcccagaagggttgaaagagaaatgaaacttgcgtgagtcccattattttacgcatgtatgtgcagatacgttctacccacacgtgtgcgtgcacatggctgtgtgcgtgcaccaaagatggactgctttccatgtgtccttttgactttctgcacgtgtcactgcggtgcagtctcttagcagacttcaggcccaaactgtattcttcactcaggcaaaattgaaaagtggaataattctaaattacttctaggttatacttttacctccctgaaattgtagttgtcacttggagggcaaaatatttattgaaataaaattttctgttaaaaattcaaaaaaaaaaa

SEQ ID NO: 431090 - DNA, 7584 bp, Homo sapiens
aaattttgtctaacctggcttctgaaatttctcaaactaaatattcatgctgttttgtgtttttcttaatgactgaggctagtgatattactcagaaaagtaacagtaacttgggtcttctgagcgtcaggatgttcaccatttaacttgtttctcgttagtgtctagtacgtcggctttcggtagtgtaggtgtgtgttctgtgtcctttcccgtgtgtgcctgcactagtggcagcctctgcttccaggtcagtttagagtagactggctctggtattgctagcaagtagttgctgttacccagtgtagccatgaagcccagctccttggatcttgacatatatgttccaggcaaagtacgtaatccagacgtttctaactctttctagatgattgcaattgttctccatgttgtctgttaggcgttatgttaattctcgatctaacagtgtgcctgtaacatatatggtagtgaagagacatcacatgcagagaccgttttccttttatcaactacaggtccgctatcgacgagagcacctttctgctaggcagtcaccctacttcccgttgttggaggatttgatgagagacggcagtgatggtgctgctctcttagctgtgattcactattattgcccagagcagatgaaactggatgatatatgcttaaaggaggtaacgtcgatggccgacagtctgtataatattcggcttctgagagaattctccaatgaatatcttaataaatgtttttatctcaccttggaagatatgctgtatgcgccattagtgttgaaggtaataacgaattatttggcatgcagttttaaaaccatgtgtgaataaactgcttatcatactttggttttttgtttttgtcttttagccgaatgttatggtttttattgcggagcttttttggtggttcgagaatgtcaagccagattttgttcagcccagggatgttcaggagctgaaagacgcgaaaacagtgttacaccagaagagcagccggcctcctgtaccgatctccaacgcgaccaaacgcagtttcctaggcagccctgctgcagggaccctggctgagctgcagccccccgtgcagctgccggcggaaggctgtcacaggcactacctgcacccggaagaacctgaatacctcgggaaaggaactgctgccttcagcccatcccatcctttattgccactgagacagaaacagcagaaatccatacagggagaggacatccctgatcagcgacatcgatcgaattctttgacccgagttgatggtcagcctcgaggagcagcaatagcctggccagaaaaaaaaaccaggcctgcgtcccagccaacaccttttgctctacatcacgctgcgagttgtgaagtggatcccagctctggcgacagcatcagcttggcccgctccatcagcaaagacagtttggcatccaacattgttaatctgaccccacagaaccagccacaccccacggccacgaagagccacgggaagagcctcctgagcaatgtcagtattgaggatgaggaagaggagcttgtggctattgttagagcagacgtggttccccagcaggctgacccggagttccccagggcctcaccccgggccttaggccttacagcaaatgcccggtctccccaaggacagctggacacctcggaaagtaagcctgacagttttttcttggagcctttgatgccagcagttcttaagccagcgaaagagaagcaggtgatcaccaaggaggatgaacggggggaagggagaccgaggagcatcgtgtctaggaggcccagcgagggcccccagcctttggtacgaaggaaaatgactggcagtcgcgacttgaataggacttttaccccgattccatgctcagaattccccatgggcatcgaccccaccgagacaggaccactgtcagtggaaaccgcaggagaggtctgtggtgggcctctggcccttggcggattcgatccgttcccccagggaccatccacggatggcttcttccttcatgtaggcagggccgatgaagacaccgagggaaggttatatgttagttgttcaaaaagccccaactcccacgattcagagccgtggactctcctcaggcaggattctgactcggatgtggtggacatagaggaagccgagcacgatttcatgggtgaggcccatcctgtggttttcagcagatacattggggaggaagagtcggccaaactgcaggaggacatgaaggtgaaggaacatgaagacaaagatgacgccagcggccgctcgagcccctgcctgagcacagcctctcagatgagcagtgtctccatggcgagtgggagcgtgaagatgaccagctttgcggagaggaagctccagagactcaacagctgtgagaccaagtccagcaccagcagctcccagaagaccacgccagatgcgtctgagagctgcccagcccctctgacgacgtggaggcagaagagggagcagagtccgagccagcatggcaaggatcccgccagcctcctggcatctgagctggtacagctgcacatgcagctggaggagaagcgcagggccatcgaggcccagaagaagaagatggaggcgctgtcggcaaggcagcgcctgaagctcggcaaggctgcattcctgcatgtggtgaagaagggcaaggccgaggctgccccacccctcaggccggagcactttgcaaaggagtactctcagcacaacggggaggactgtggggacgctgtttccaaaaccgaagactttctcgtgaaggaggagcagagagaggagctccttcacgagccacaggatgtggacaaagagagcctggcctttgctcagcaacataaagcaaaagaccctgtggctctgcacgagctggagagaaataaggtgatctccgctgccctcctggaggacactgttggggaggttgtcgacgtgaatgaatgtgacctttccatcgagaagcttaacgaaaccatcagtacgctgcagcaggccatcctgaaaatctctcagcagcaagagcagcttctgatgaagtcccccacagtcccagtgccaggctctaagaataactcgcaggaccacaaagtgaaggcaccagtccacttcgtggagccactctctcccacgggcgtggctggccaccgcaaagccccccggctgggtcaaggccggaattcccgttccggaaggccggcggagctgaaggtcccaaaagacaggccacagggctcctcccgaagtaaaaccccaacgcccagtgtagagacgctcccgcacttgagacccttccctgccagcagccaccctcggacgcccacggaccctggcctggacagtgccctggagcccagtggtgacccacatgggaagtgtctcttcgacagttacaggctccatgatgaaagcaatcagcggacacttactctgtcctcttccaaagatgccaacattctttcggagcagatgagcctcaaagaagttctggatgcgagtgtgaaggaggtggggtccagctcctcagatgtctcgggaaaagagagcgtccccgtggaggagcctctgaggagcagggccagcctcattgaagtggacctctccgacctgaaggcccccgacgaggatggggagctggtaagcctcgatggctcggcggaccttgtcagcgaaggcgaccagaagccgggggtcggcttcttcttcaaggatgaacagaaagcggaagatgagctcgccaagaagcgggcggccttcctcctgaagcagcagcgcaaggccgaggaggcccgcgtgcgcaagcagcagctggaagcggaggtggagctcaagcgtgacgaagcccggcgcaaagctgaggaagaccgggtgcggaaggaggaggagaaggcgcggcgcgagctcatcaagcaggagtacctgcggaggaagcagcagcagatcctagaggagcaggggctcggcaagcccaagtcaaagccgaagaagccgcggccgaagtcggtgcaccgggaagagtcgtgcagcgactccggcaccaagtgctcctccacccctgataacttgagccggactcagtcaggctccagcctgtccttggcctctgcggcgacgacagaacccgagagcgttcattccgggggcacaccctctcagcgagtggaatcgatggaagccctgcccatactgagccgtaacccaagcaggagcacagaccgagactgggagaccgcgtcggcggcatcttccctggcctcagtggccgagtacacaggtcccaagctctttaaggagcccagtagtaaatcaaacaagccgattattcacaatgccatatcccattgctgcctggctggaaaagtgaacgaaccccacaagaattccatattggaggagctggagaagtgtgatgccaatcactacatcatactgtttcgtgatgctggctgccagttcagggcgctttactgctactatcctgatactgaggaaatctacaaactcactggcacggggccaaagaacatcaccaagaaaatgatcgacaaactgtataaatacagctcagaccgaaaacagtttaacttgatcccagccaaaaccatgtctgtcagtgtggacgcactcacaatccacaaccacctgtggcagcccaagcggcctgcagtgccaaagaaggcccagactcgtaaatgaccccggtgcagctggcgtccaaagggtgacccagactcgtaaatgatgcccttgtggctggcatccagagggtgccacggggtccttatttattgttttcatctatttgggtacgaagtgtgcaaagtcacagaccttttgcaaagaggtttctagacagcagaagaaaacccctctctcagcgctcatctcacgcagaggatgccaggcagggtgaggatgggggagtagatgccgcttttgcagtggctcgcactgctgtggccactgctgaccactgaggctcccagcggagggtgttcacagccaggtcccgggccacggagctcccttacttgaagttctccttcagcatagattagacgtgatccactttgctttcttgcttctcacctcgcccccttgcacattgcctgacaccctcatattggccagctgtaatctcgtgactatgggactgaggctcaatcttggcttggggtgtttgaatgtctatagcaaaggaattcataatgggaaatctttttcatttgagaaattgtatgatatttattggttgtgtctactgccaacatttatatccaattctaagatttctgaaaaaaaattcttatcccttgctgctcagaaaaagtttacggaaaacaccagttcactaaaagcaccgaaatctgcaaagcctgtcttccgctagaacaacgtctacaaatgtgaagatgatgacttctggcacgcggtcatgagggtggggaatggcactaggagctgatgtttgcctcatttaaagtaggcaagccgagccaactgcagccatcattcattaagttttgggtagtgctctaatggtttgttcactttaataaagacagattttggtaaagtagaatatttttcattctgagcatgtttgtcccaaaaggtgatgcacttaagctgacagtcccttcagtggttttgttaggtcacggcttgtcctgtctggattctgcatctggaagcgctgcatgctctcagaggagcgtgccgtttcccctgtagatggatacttttgttttgttgcctatttaaaaacaattaagtggttatttgcagttatttcagaactccaagtaagtggatggctttgggttctttctgccttggtcccaatggtgttgatgcttctgtggagcgcggacattcccaggagcaggtgcgtgccagccatggctgccagacactgctgcaactgaccagctgccggaagattctggagccactaacattagttttgcacatattttcttgggagtgttacttgaatctatctcaaactgcagaaaaaatcaaaagatcaataattgggagaaaaagagacaaatttaactgttacataattttagatagacaaaaaacatgagtgagtcgtgtacataaggagggaacatggtacagaaggctagaaggaattataggtcttattcccctttcctcagtcctttgaagagaagtacagtctcttgcgattttgtatatatcgtgttcgacacagccgctctctgtcctgtaaatagggaactaaaggctgtatgatttctcaagtgctgagttacacagtcctgagtgagctttctgttaccatactttcacacgtgggctttatttctcactgtatgtttgatatgatattactgtatttattttaagaaagcactaagatgtaataaagtgatgaactaatttgctttacattgaatcgtatgtgtgaggttgctgtggctcatttcgctgaccaggcgacaccaactccttgctttataggagtttcacattgttctttaccatggccctatcgaagtcagtggaattggattctttttaatgaagagctagaaaatatctggcatagagctggaaaattgcattcccatgggacgtctgaatcaattctggattttctccatggaatgagtcagtgtgtggaacatcctgaaacttgtccttaagcgtgtagttttcactgttcgttgcgagtaagcactaatgtggcatggacattcctgatgtcccaagtccccaggccagtgttcgcctaatgattgacagaagcgtccctgcgttcttcatgcttggacacagcaacccttttaattagtcttgaaaagtttcagacacaggattaattttcgtggtggtgcttttgggcctttctggcttgggtggtggtaaagtcatgattttgcagttgataacactgacttataactctgtttatcaatgtctcctatattcaaagcccctgcagtggtatttgtgtctcgttgcaaatttctttcagcggaaagcttgcacaactttcgttgtgtctcagaattctaaccttgttatttaagacaagctgctctacccatttaggatataactttgtaaagaaagtgtaaaccaaatgattcaatgtatgatgaagtttatgtgtaaatccttggtaatgctagaattctgggagcccagaagggttgaaagagaaatgaaacttgcgtgagtcccattattttacgcatgtatgtgcagatacgttctacccacacgtgtgcgtgcacatggctgtgtgcgtgcaccaaagatggactgctttccatgtgtccttttgactttctgcacgtgtcactgcggtgcagtctcttagcagacttcaggcccaaactgtattcttcactcaggcaaaattgaaaagtggaataattctaaattacttctaggttatacttttacctccctgaaattgtagttgtcacttggagggcaaaatatttattgaaataaaattttctgttaaaaattcaaaaaaaaaaa

SEQ ID NO: 431091 - DNA, 6523 bp, Homo sapiens
cggccgcgccgccgccgagggctggaggaagatggaggccccgccggacggcgccgccgacctcgtgcccctggaccgctacgacgcggcgcgcgccaagatcgccgccaacctgcagtggatctgcgccaaggcctacggccgagataacatccctgaggacctcagagaccctttctacgttgaccagtatgagcaggagcacattaagccgcctgttatcaagcttctcctgtccagcgagctgtactgccgtgtctgcagcctcatcctgaaaggggaccaggtggccgccttacagggacaccagtctgtcatccaggccctgtcccggaaagggatctatgtgatggagagtgatgacacccccgtgacagagtccgacctcagtcgcgcacccataaaaatgagtgcccacatggcaatggtggatgccctgatgatggcctacactgtggagatgatcagcatcgagaaggtggtggccagtgtcaagcgcttctcaacgttcagtgcctcgaaagaacttccgtacgacctcgaggatgccatggtgttctggatcaacaaggtaaatcttaaaatgagagagataacagagaaagaagttaaattaaaacaacagttattggaaagtccagctcatcaaaaggtccgctatcgacgagagcacctttctgctaggcagtcaccctacttcccgttgttggaggatttgatgagagacggcagtgatggtgctgctctcttagctgtgattcactattattgcccagagcagatgaaactggatgatatatgcttaaaggaggtaacgtcgatggccgacagtctgtataatattcggcttctgagagaattctccaatgaatatcttaataaatgtttttatctcaccttggaagatatgctgtatgcgccattagtgttgaagccgaatgttatggtttttattgcggagcttttttggtggttcgagaatgtcaagccagattttgttcagcccagggatgttcaggagctgaaagacgcgaaaacagtgttacaccagaagagcagccggcctcctgtaccgatctccaacgcgaccaaacgcagtttcctaggcagccctgctgcagggaccctggctgagctgcagccccccgtgcagctgccggcggaaggctgtcacaggcactacctgcacccggaagaacctgaatacctcgggaaaggaactgctgccttcagcccatcccatcctttattgccactgagacagaaacagcagaaatccatacagggagaggacatccctgatcagcgacatcgatcgaattctttgacccgagttgatggtcagcctcgaggagcagcaatagcctggccagaaaaaaaaaccaggcctgcgtcccagccaacaccttttgctctacatcacgctgcgagttgtgaagtggatcccagctctggcgacagcatcagcttggcccgctccatcagcaaagacagtttggcatccaacattgttaatctgaccccacagaaccagccacaccccacggccacgaagagccacgggaagagcctcctgagcaatgtcagtattgaggatgaggaagaggagcttgtggctattgttagagcagacgtggttccccagcaggctgacccggagttccccagggcctcaccccgggccttaggccttacagcaaatgcccggtctccccaaggacagctggacacctcggaaagtaagcctgacagttttttcttggagcctttgatgccagcagttcttaagccagcgaaagagaagcaggtgatcaccaaggaggatgaacggggggaagggagaccgaggagcatcgtgtctaggaggcccagcgagggcccccagcctttggtacgaaggaaaatgactggcagtcgcgacttgaataggacttttaccccgattccatgctcagaattccccatgggcatcgaccccaccgagacaggaccactgtcagtggaaaccgcaggagaggtctgtggtgggcctctggcccttggcggattcgatccgttcccccagggaccatccacggatggcttcttccttcatgtaggcagggccgatgaagacaccgagggaaggttatatgttagttgttcaaaaagccccaactcccacgattcagagccgtggactctcctcaggcaggattctgactcggatgtggtggacatagaggaagccgagcacgatttcatgggtgaggcccatcctgtggttttcagcagatacattggggaggaagagtcggccaaactgcaggaggacatgaaggtgaaggaacatgaagacaaagatgacgccagcggccgctcgagcccctgcctgagcacagcctctcagatgagcagtgtctccatggcgagtgggagcgtgaagatgaccagctttgcggagaggaagctccagagactcaacagctgtgagaccaagtccagcaccagcagctcccagaagaccacgccagatgcgtctgagagctgcccagcccctctgacgacgtggaggcagaagagggagcagagtccgagccagcatggcaaggatcccgccagcctcctggcatctgagctggtacagctgcacatgcagctggaggagaagcgcagggccatcgaggcccagaagaagaagatggaggcgctgtcggcaaggcagcgcctgaagctcggcaaggctgcattcctgcatgtggtgaagaagggcaaggccgaggctgccccacccctcaggccggagcactttgcaaaggagtactctcagcacaacggggaggactgtggggacgctgtttccaaaaccgaagactttctcgtgaaggaggagcagagagaggagctccttcacgagccacaggatgtggacaaagagagcctggcctttgctcagcaacataaagcaaaagaccctgtggctctgcacgagctggagagaaataaggtgatctccgctgccctcctggaggacactgttggggaggttgtcgacgtgaatgaatgtgacctttccatcgagaagcttaacgaaaccatcagtacgctgcagcaggccatcctgaaaatctctcagcagcaagagcagcttctgatgaagtcccccacagtcccagtgccaggctctaagaataactcgcaggaccacaaagtgaaggcaccagtccacttcgtggagccactctctcccacgggcgtggctggccaccgcaaagccccccggctgggtcaaggccggaattcccgttccggaaggccggcggagctgaaggtcccaaaagacaggccacagggctcctcccgaagtaaaaccccaacgcccagtgtagagacgctcccgcacttgagacccttccctgccagcagccaccctcggacgcccacggaccctggcctggacagtgccctggagcccagtggtgacccacatgggaagtgtctcttcgacagttacaggctccatgatgaaagcaatcagcggacacttactctgtcctcttccaaagatgccaacattctttcggagcagatgagcctcaaagaagttctggatgcgagtgtgaaggaggtggggtccagctcctcagatgtctcgggaaaagagagcgtccccgtggaggagcctctgaggagcagggccagcctcattgaagtggacctctccgacctgaaggcccccgacgaggatggggagctggtaagcctcgatggctcggcggaccttgtcagcgaaggcgaccagaagccgggggtcggcttcttcttcaaggatgaacagaaagcggaagatgagctcgccaagaagcgggcggccttcctcctgaagcagcagcgcaaggccgaggaggcccgcgtgcgcaagcagcagctggaagcggaggtggagctcaagcgtgacgaagcccggcgcaaagctgaggaagaccgggtgcggaaggaggaggagaaggcgcggcgcgagctcatcaagcaggagtacctgcggaggaagcagcagcagatcctagaggagcaggggctcggcaagcccaagtcaaagccgaagaagccgcggccgaagtcggtgcaccgggaagagtcgtgcagcgactccggcaccaagtgctcctccacccctgataacttgagccggactcagtcaggctccagcctgtccttggcctctgcggcgacgacagaacccgagagcgttcattccgggggcacaccctctcagcgagtggaatcgatggaagccctgcccatactgagccgtaacccaagcaggagcacagaccgagactgggagaccgcgtcggcggcatcttccctggcctcagtggccgagtacacaggtcccaagctctttaaggagcccagtagtaaatcaaacaagccgattattcacaatgccatatcccattgctgcctggctggaaaagtgaacgaaccccacaagaattccatattggaggagctggagaagtgtgatgccaatcactacatcatactgtttcgtgatgctggctgccagttcagggcgctttactgctactatcctgatactgaggaaatctacaaactcactggcacggggccaaagaacatcaccaagaaaatgatcgacaaactgtataaatacagctcagaccgaaaacagtttaacttgatcccagccaaaaccatgtctgtcagtgtggacgcactcacaatccacaaccacctgtggcagcccaagcggcctgcagtgccaaagaaggcccagactcgtaaatgaccccggtgcagctggcgtccaaagggtgacccagactcgtaaatgatgcccttgtggctggcatccagagggtgccacggggtccttatttattgttttcatctatttgggtacgaagtgtgcaaagtcacagaccttttgcaaagaggtttctagacagcagaagaaaacccctctctcagcgctcatctcacgcagaggatgccaggcagggtgaggatgggggagtagatgccgcttttgcagtggctcgcactgctgtggccactgctgaccactgaggctcccagcggagggtgttcacagccaggtcccgggccacggagctcccttacttgaagttctccttcagcatagattagacgtgatccactttgctttcttgcttctcacctcgcccccttgcacattgcctgacaccctcatattggccagctgtaatctcgtgactatgggactgaggctcaatcttggcttggggtgtttgaatgtctatagcaaaggaattcataatgggaaatctttttcatttgagaaattgtatgatatttattggttgtgtctactgccaacatttatatccaattctaagatttctgaaaaaaaattcttatcccttgctgctcagaaaaagtttacggaaaacaccagttcactaaaagcaccgaaatctgcaaagcctgtcttccgctagaacaacgtctacaaatgtgaagatgatgacttctggcacgcggtcatgagggtggggaatggcactaggagctgatgtttgcctcatttaaagtaggcaagccgagccaactgcagccatcattcattaagttttgggtagtgctctaatggtttgttcactttaataaagacagattttggtaaagtagaatatttttcattctgagcatgtttgtcccaaaaggtgatgcacttaagctgacagtcccttcagtggttttgttaggtcacggcttgtcctgtctggattctgcatctggaagcgctgcatgctctcagaggagcgtgccgtttcccctgtagatggatacttttgttttgttgcctatttaaaaacaattaagtggttatttgcagttatttcagaactccaagtaagtggatggctttgggttctttctgccttggtcccaatggtgttgatgcttctgtggagcgcggacattcccaggagcaggtgcgtgccagccatggctgccagacactgctgcaactgaccagctgccggaagattctggagccactaacattagttttgcacatattttcttgggagtgttacttgaatctatctcaaactgcagaaaaaatcaaaagatcaataattgggagaaaaagagacaaatttaactgttacataattttagatagacaaaaaacatgagtgagtcgtgtacataaggagggaacatggtacagaaggctagaaggaattataggtcttattcccctttcctcagtcctttgaagagaagtacagtctcttgcgattttgtatatatcgtgttcgacacagccgctctctgtcctgtaaatagggaactaaaggctgtatgatttctcaagtgctgagttacacagtcctgagtgagctttctgttaccatactttcacacgtgggctttatttctcactgtatgtttgatatgatattactgtatttattttaagaaagcactaagatgtaataaagtgatgaactaatttgcttta

SEQ ID NO: 431092 - DNA, 4805 bp, Homo sapiens
aaggaggtggggtccagctcctcagatgtctcgggaaaagagagcgtccccgtggaggagcctctgaggagcagggccagcctcattgaagtggacctctccgacctgaaggcccccgacgaggatggggagctggtaagcctcgatggctcggcggaccttgtcagcgaaggcgaccagaagccgggggtcggcttcttcttcaaggatgaacagaaagcggaagatgagctcgccaagaagcgggcggccttcctcctgaagcagcagcgcaaggccgaggaggcccgcgtgcgcaagagcagcttctgatgaagtcccccacagtcccagtgccaggctctaagaataactcgcaggaccacaaagtgaaggcaccagtccacttcgtggagccactctctcccacgggcgtggctggccaccgcaaagccccccggctgggtcaaggccggaattcccgttccggaaggccggcggagctgaaggtcccaaaagacaggccacagggctcctcccgaagtaaaaccccaacgcccagtgtagagacgctcccgcacttgagacccttccctgccagcagccaccctcggacgcccacggaccctggcctggacagtgccctggagcccagtggtgacccacatgggaagtgtctcttcgacagttacaggctccatgatgaaagcaatcagcggacacttactctgtcctcttccaaagatgccaacattctttcggagcagatgagcctcaaagaagttctggatgcgagtgtgaaggaggtggggtccagctcctcagatgtctcgggaaaagagagcgtccccgtggaggagcctctgaggagcagggccagcctcattgaagtggacctctccgacctgaaggcccccgacgaggatggggagctggtaagcctcgatggctcggcggaccttgtcagcgaaggcgaccagaagccgggggtcggcttcttcttcaaggatgaacagaaagcggaagatgagctcgccaagaagcgggcggccttcctcctgaagcagcagcgcaaggccgaggaggcccgcgtgcgcaagcagcagctggaagcggaggtggagctcaagcgtgacgaagcccggcgcaaagctgaggaagaccgggtgcggaaggaggaggagaaggcgcggcgcgagctcatcaagcaggagtacctgcggaggaagcagcagcagatcctagaggagcaggggctcggcaagcccaagtcaaagccgaagaagccgcggccgaagtcggtgcaccgggaagagtcgtgcagcgactccggcaccaagtgctcctccacccctgataacttgagccggactcagtcaggctccagcctgtccttggcctctgcggcgacgacagaacccgagagcgttcattccgggggcacaccctctcagcgagtggaatcgatggaagccctgcccatactgagccgtaacccaagcaggagcacagaccgagactgggagaccgcgtcggcggcatcttccctggcctcagtggccgagtacacaggtcccaagctctttaaggagcccagtagtaaatcaaacaagccgattattcacaatgccatatcccattgctgcctggctggaaaagtgaacgaaccccacaagaattccatattggaggagctggagaagtgtgatgccaatcactacatcatactgtttcgtgatgctggctgccagttcagggcgctttactgctactatcctgatactgaggaaatctacaaactcactggcacggggccaaagaacatcaccaagaaaatgatcgacaaactgtataaatacagctcagaccgaaaacagtttaacttgatcccagccaaaaccatgtctgtcagtgtggacgcactcacaatccacaaccacctgtggcagcccaagcggcctgcagtgccaaagaaggcccagactcgtaaatgaccccggtgcagctggcgtccaaagggtgacccagactcgtaaatgatgcccttgtggctggcatccagagggtgccacggggtccttatttattgttttcatctatttgggtacgaagtgtgcaaagtcacagaccttttgcaaagaggtttctagacagcagaagaaaacccctctctcagcgctcatctcacgcagaggatgccaggcagggtgaggatgggggagtagatgccgcttttgcagtggctcgcactgctgtggccactgctgaccactgaggctcccagcggagggtgttcacagccaggtcccgggccacggagctcccttacttgaagttctccttcagcatagattagacgtgatccactttgctttcttgcttctcacctcgcccccttgcacattgcctgacaccctcatattggccagctgtaatctcgtgactatgggactgaggctcaatcttggcttggggtgtttgaatgtctatagcaaaggaattcataatgggaaatctttttcatttgagaaattgtatgatatttattggttgtgtctactgccaacatttatatccaattctaagatttctgaaaaaaaattcttatcccttgctgctcagaaaaagtttacggaaaacaccagttcactaaaagcaccgaaatctgcaaagcctgtcttccgctagaacaacgtctacaaatgtgaagatgatgacttctggcacgcggtcatgagggtggggaatggcactaggagctgatgtttgcctcatttaaagtaggcaagccgagccaactgcagccatcattcattaagttttgggtagtgctctaatggtttgttcactttaataaagacagattttggtaaagtagaatatttttcattctgagcatgtttgtcccaaaaggtgatgcacttaagctgacagtcccttcagtggttttgttaggtcacggcttgtcctgtctggattctgcatctggaagcgctgcatgctctcagaggagcgtgccgtttcccctgtagatggatacttttgttttgttgcctatttaaaaacaattaagtggttatttgcagttatttcagaactccaagtaagtggatggctttgggttctttctgccttggtcccaatggtgttgatgcttctgtggagcgcggacattcccaggagcaggtgcgtgccagccatggctgccagacactgctgcaactgaccagctgccggaagattctggagccactaacattagttttgcacatattttcttgggagtgttacttgaatctatctcaaactgcagaaaaaatcaaaagatcaataattgggagaaaaagagacaaatttaactgttacataattttagatagacaaaaaacatgagtgagtcgtgtacataaggagggaacatggtacagaaggctagaaggaattataggtcttattcccctttcctcagtcctttgaagagaagtacagtctcttgcgattttgtatatatcgtgttcgacacagccgctctctgtcctgtaaatagggaactaaaggctgtatgatttctcaagtgctgagttacacagtcctgagtgagctttctgttaccatactttcacacgtgggctttatttctcactgtatgtttgatatgatattactgtatttattttaagaaagcactaagatgtaataaagtgatgaactaatttgctttacattgaatcgtatgtgtgaggttgctgtggctcatttcgctgaccaggcgacaccaactccttgctttataggagtttcacattgttctttaccatggccctatcgaagtcagtggaattggattctttttaatgaagagctagaaaatatctggcatagagctggaaaattgcattcccatgggacgtctgaatcaattctggattttctccatggaatgagtcagtgtgtggaacatcctgaaacttgtccttaagcgtgtagttttcactgttcgttgcgagtaagcactaatgtggcatggacattcctgatgtcccaagtccccaggccagtgttcgcctaatgattgacagaagcgtccctgcgttcttcatgcttggacacagcaacccttttaattagtcttgaaaagtttcagacacaggattaattttcgtggtggtgcttttgggcctttctggcttgggtggtggtaaagtcatgattttgcagttgataacactgacttataactctgtttatcaatgtctcctatattcaaagcccctgcagtggtatttgtgtctcgttgcaaatttctttcagcggaaagcttgcacaactttcgttgtgtctcagaattctaaccttgttatttaagacaagctgctctacccatttaggatataactttgtaaagaaagtgtaaaccaaatgattcaatgtatgatgaagtttatgtgtaaatccttggtaatgctagaattctgggagcccagaagggttgaaagagaaatgaaacttgcgtgagtcccattattttacgcatgtatgtgcagatacgttctacccacacgtgtgcgtgcacatggctgtgtgcgtgcaccaaagatggactgctttccatgtgtccttttgactttctgcacgtgtcactgcggtgcagtctcttagcagacttcaggcccaaactgtattcttcactcaggcaaaattgaaaagtggaataattctaaattacttctaggttatacttttacctccctgaaattgtagttgtcacttggagggcaaaatatttattgaaataaaattttctgttaaaaattcaaaaaaaaaaa

SEQ ID NO: 431093 - DNA, 3713 bp, Homo sapiens
cgagcagtgtctgggcgtgtgtttctctcaggcgcaaagctgaggaagaccgggtgcggaaggaggaggagaaggcgcggcgcgagctcatcaagcaggagtacctgcggaggaagcagcagcagatcctagaggagcaggggctcggcaagcccaagtcaaagccgaagaagccgcggccgaagtcggtgcaccgggaagagtcgtgcagcgactccggcaccaagtgctcctccacccctgataacttgagccggactcagtcaggctccagcctgtccttggcctctgcggcgacgacagaacccgagagcgttcattccgggggcacaccctctcagcgagtggaatcgatggaagccctgcccatactgagccgtaacccaagcaggagcacagaccgagactgggagaccgcgtcggcggcatcttccctggcctcagtggccgagtacacaggtcccaagctctttaaggagcccagtagtaaatcaaacaagccgattattcacaatgccatatcccattgctgcctggctggaaaagtgaacgaaccccacaagaattccatattggaggagctggagaagtgtgatgccaatcactacatcatactgtttcgtgatgctggctgccagttcagggcgctttactgctactatcctgatactgaggaaatctacaaactcactggcacggggccaaagaacatcaccaagaaaatgatcgacaaactgtataaatacagctcagaccgaaaacagtttaacttgatcccagccaaaaccatgtctgtcagtgtggacgcactcacaatccacaaccacctgtggcagcccaagcggcctgcagtgccaaagaaggcccagactcgtaaatgaccccggtgcagctggcgtccaaagggtgacccagactcgtaaatgatgcccttgtggctggcatccagagggtgccacggggtccttatttattgttttcatctatttgggtacgaagtgtgcaaagtcacagaccttttgcaaagaggtttctagacagcagaagaaaacccctctctcagcgctcatctcacgcagaggatgccaggcagggtgaggatgggggagtagatgccgcttttgcagtggctcgcactgctgtggccactgctgaccactgaggctcccagcggagggtgttcacagccaggtcccgggccacggagctcccttacttgaagttctccttcagcatagattagacgtgatccactttgctttcttgcttctcacctcgcccccttgcacattgcctgacaccctcatattggccagctgtaatctcgtgactatgggactgaggctcaatcttggcttggggtgtttgaatgtctatagcaaaggaattcataatgggaaatctttttcatttgagaaattgtatgatatttattggttgtgtctactgccaacatttatatccaattctaagatttctgaaaaaaaattcttatcccttgctgctcagaaaaagtttacggaaaacaccagttcactaaaagcaccgaaatctgcaaagcctgtcttccgctagaacaacgtctacaaatgtgaagatgatgacttctggcacgcggtcatgagggtggggaatggcactaggagctgatgtttgcctcatttaaagtaggcaagccgagccaactgcagccatcattcattaagttttgggtagtgctctaatggtttgttcactttaataaagacagattttggtaaagtagaatatttttcattctgagcatgtttgtcccaaaaggtgatgcacttaagctgacagtcccttcagtggttttgttaggtcacggcttgtcctgtctggattctgcatctggaagcgctgcatgctctcagaggagcgtgccgtttcccctgtagatggatacttttgttttgttgcctatttaaaaacaattaagtggttatttgcagttatttcagaactccaagtaagtggatggctttgggttctttctgccttggtcccaatggtgttgatgcttctgtggagcgcggacattcccaggagcaggtgcgtgccagccatggctgccagacactgctgcaactgaccagctgccggaagattctggagccactaacattagttttgcacatattttcttgggagtgttacttgaatctatctcaaactgcagaaaaaatcaaaagatcaataattgggagaaaaagagacaaatttaactgttacataattttagatagacaaaaaacatgagtgagtcgtgtacataaggagggaacatggtacagaaggctagaaggaattataggtcttattcccctttcctcagtcctttgaagagaagtacagtctcttgcgattttgtatatatcgtgttcgacacagccgctctctgtcctgtaaatagggaactaaaggctgtatgatttctcaagtgctgagttacacagtcctgagtgagctttctgttaccatactttcacacgtgggctttatttctcactgtatgtttgatatgatattactgtatttattttaagaaagcactaagatgtaataaagtgatgaactaatttgctttacattgaatcgtatgtgtgaggttgctgtggctcatttcgctgaccaggcgacaccaactccttgctttataggagtttcacattgttctttaccatggccctatcgaagtcagtggaattggattctttttaatgaagagctagaaaatatctggcatagagctggaaaattgcattcccatgggacgtctgaatcaattctggattttctccatggaatgagtcagtgtgtggaacatcctgaaacttgtccttaagcgtgtagttttcactgttcgttgcgagtaagcactaatgtggcatggacattcctgatgtcccaagtccccaggccagtgttcgcctaatgattgacagaagcgtccctgcgttcttcatgcttggacacagcaacccttttaattagtcttgaaaagtttcagacacaggattaattttcgtggtggtgcttttgggcctttctggcttgggtggtggtaaagtcatgattttgcagttgataacactgacttataactctgtttatcaatgtctcctatattcaaagcccctgcagtggtatttgtgtctcgttgcaaatttctttcagcggaaagcttgcacaactttcgttgtgtctcagaattctaaccttgttatttaagacaagctgctctacccatttaggatataactttgtaaagaaagtgtaaaccaaatgattcaatgtatgatgaagtttatgtgtaaatccttggtaatgctagaattctgggagcccagaagggttgaaagagaaatgaaacttgcgtgagtcccattattttacgcatgtatgtgcagatacgttctacccacacgtgtgcgtgcacatggctgtgtgcgtgcaccaaagatggactgctttccatgtgtccttttgactttctgcacgtgtcactgcggtgcagtctcttagcagacttcaggcccaaactgtattcttcactcaggcaaaattgaaaagtggaataattctaaattacttctaggttatacttttacctccctgaaattgtagttgtcacttggagggcaaaatatttattgaaataaaattttctgttaaaaattcaaaaaaaaaaa

SEQ ID NO: 431094 - DNA, 3603 bp, Homo sapiens
aagtcggtaccctatcaggctttggagcaggggctcggcaagcccaagtcaaagccgaagaagccgcggccgaagtcggtgcaccgggaagagtcgtgcagcgactccggcaccaagtgctcctccacccctgataacttgagccggactcagtcaggctccagcctgtccttggcctctgcggcgacgacagaacccgagagcgttcattccgggggcacaccctctcagcgagtggaatcgatggaagccctgcccatactgagccgtaacccaagcaggagcacagaccgagactgggagaccgcgtcggcggcatcttccctggcctcagtggccgagtacacaggtcccaagctctttaaggagcccagtagtaaatcaaacaagccgattattcacaatgccatatcccattgctgcctggctggaaaagtgaacgaaccccacaagaattccatattggaggagctggagaagtgtgatgccaatcactacatcatactgtttcgtgatgctggctgccagttcagggcgctttactgctactatcctgatactgaggaaatctacaaactcactggcacggggccaaagaacatcaccaagaaaatgatcgacaaactgtataaatacagctcagaccgaaaacagtttaacttgatcccagccaaaaccatgtctgtcagtgtggacgcactcacaatccacaaccacctgtggcagcccaagcggcctgcagtgccaaagaaggcccagactcgtaaatgaccccggtgcagctggcgtccaaagggtgacccagactcgtaaatgatgcccttgtggctggcatccagagggtgccacggggtccttatttattgttttcatctatttgggtacgaagtgtgcaaagtcacagaccttttgcaaagaggtttctagacagcagaagaaaacccctctctcagcgctcatctcacgcagaggatgccaggcagggtgaggatgggggagtagatgccgcttttgcagtggctcgcactgctgtggccactgctgaccactgaggctcccagcggagggtgttcacagccaggtcccgggccacggagctcccttacttgaagttctccttcagcatagattagacgtgatccactttgctttcttgcttctcacctcgcccccttgcacattgcctgacaccctcatattggccagctgtaatctcgtgactatgggactgaggctcaatcttggcttggggtgtttgaatgtctatagcaaaggaattcataatgggaaatctttttcatttgagaaattgtatgatatttattggttgtgtctactgccaacatttatatccaattctaagatttctgaaaaaaaattcttatcccttgctgctcagaaaaagtttacggaaaacaccagttcactaaaagcaccgaaatctgcaaagcctgtcttccgctagaacaacgtctacaaatgtgaagatgatgacttctggcacgcggtcatgagggtggggaatggcactaggagctgatgtttgcctcatttaaagtaggcaagccgagccaactgcagccatcattcattaagttttgggtagtgctctaatggtttgttcactttaataaagacagattttggtaaagtagaatatttttcattctgagcatgtttgtcccaaaaggtgatgcacttaagctgacagtcccttcagtggttttgttaggtcacggcttgtcctgtctggattctgcatctggaagcgctgcatgctctcagaggagcgtgccgtttcccctgtagatggatacttttgttttgttgcctatttaaaaacaattaagtggttatttgcagttatttcagaactccaagtaagtggatggctttgggttctttctgccttggtcccaatggtgttgatgcttctgtggagcgcggacattcccaggagcaggtgcgtgccagccatggctgccagacactgctgcaactgaccagctgccggaagattctggagccactaacattagttttgcacatattttcttgggagtgttacttgaatctatctcaaactgcagaaaaaatcaaaagatcaataattgggagaaaaagagacaaatttaactgttacataattttagatagacaaaaaacatgagtgagtcgtgtacataaggagggaacatggtacagaaggctagaaggaattataggtcttattcccctttcctcagtcctttgaagagaagtacagtctcttgcgattttgtatatatcgtgttcgacacagccgctctctgtcctgtaaatagggaactaaaggctgtatgatttctcaagtgctgagttacacagtcctgagtgagctttctgttaccatactttcacacgtgggctttatttctcactgtatgtttgatatgatattactgtatttattttaagaaagcactaagatgtaataaagtgatgaactaatttgctttacattgaatcgtatgtgtgaggttgctgtggctcatttcgctgaccaggcgacaccaactccttgctttataggagtttcacattgttctttaccatggccctatcgaagtcagtggaattggattctttttaatgaagagctagaaaatatctggcatagagctggaaaattgcattcccatgggacgtctgaatcaattctggattttctccatggaatgagtcagtgtgtggaacatcctgaaacttgtccttaagcgtgtagttttcactgttcgttgcgagtaagcactaatgtggcatggacattcctgatgtcccaagtccccaggccagtgttcgcctaatgattgacagaagcgtccctgcgttcttcatgcttggacacagcaacccttttaattagtcttgaaaagtttcagacacaggattaattttcgtggtggtgcttttgggcctttctggcttgggtggtggtaaagtcatgattttgcagttgataacactgacttataactctgtttatcaatgtctcctatattcaaagcccctgcagtggtatttgtgtctcgttgcaaatttctttcagcggaaagcttgcacaactttcgttgtgtctcagaattctaaccttgttatttaagacaagctgctctacccatttaggatataactttgtaaagaaagtgtaaaccaaatgattcaatgtatgatgaagtttatgtgtaaatccttggtaatgctagaattctgggagcccagaagggttgaaagagaaatgaaacttgcgtgagtcccattattttacgcatgtatgtgcagatacgttctacccacacgtgtgcgtgcacatggctgtgtgcgtgcaccaaagatggactgctttccatgtgtccttttgactttctgcacgtgtcactgcggtgcagtctcttagcagacttcaggcccaaactgtattcttcactcaggcaaaattgaaaagtggaataattctaaattacttctaggttatacttttacctccctgaaattgtagttgtcacttggagggcaaaatatttattgaaataaaattttctgttaaaaattcaaaaaaaaaaa

SEQ ID NO: 431095 - DNA, 3449 bp, Homo sapiens
tgcagggcgaggtgaggggaacaggtacaggggacaggtacttgtctgtcggaatccgttcatgaaccgtcgtctgtttctgtctctggcagctgataacttgagccggactcagtcaggctccagcctgtccttggcctctgcggcgacgacagaacccgagagcgttcattccgggggcacaccctctcagcggtcccaagctctttaaggagcccagtagtaaatcaaacaagccgattattcacaatgccatatcccattgctgcctggctggaaaagtgaacgaaccccacaagaattccatattggaggagctggagaagtgtgatgccaatcactacatcatactgtttcgtgatgctggctgccagttcagggcgctttactgctactatcctgatactgaggaaatctacaaactcactggcacggggccaaagaacatcaccaagaaaatgatcgacaaactgtataaatacagctcagaccgaaaacagtttaacttgatcccagccaaaaccatgtctgtcagtgtggacgcactcacaatccacaaccacctgtggcagcccaagcggcctgcagtgccaaagaaggcccagactcgtaaatgaccccggtgcagctggcgtccaaagggtgacccagactcgtaaatgatgcccttgtggctggcatccagagggtgccacggggtccttatttattgttttcatctatttgggtacgaagtgtgcaaagtcacagaccttttgcaaagaggtttctagacagcagaagaaaacccctctctcagcgctcatctcacgcagaggatgccaggcagggtgaggatgggggagtagatgccgcttttgcagtggctcgcactgctgtggccactgctgaccactgaggctcccagcggagggtgttcacagccaggtcccgggccacggagctcccttacttgaagttctccttcagcatagattagacgtgatccactttgctttcttgcttctcacctcgcccccttgcacattgcctgacaccctcatattggccagctgtaatctcgtgactatgggactgaggctcaatcttggcttggggtgtttgaatgtctatagcaaaggaattcataatgggaaatctttttcatttgagaaattgtatgatatttattggttgtgtctactgccaacatttatatccaattctaagatttctgaaaaaaaattcttatcccttgctgctcagaaaaagtttacggaaaacaccagttcactaaaagcaccgaaatctgcaaagcctgtcttccgctagaacaacgtctacaaatgtgaagatgatgacttctggcacgcggtcatgagggtggggaatggcactaggagctgatgtttgcctcatttaaagtaggcaagccgagccaactgcagccatcattcattaagttttgggtagtgctctaatggtttgttcactttaataaagacagattttggtaaagtagaatatttttcattctgagcatgtttgtcccaaaaggtgatgcacttaagctgacagtcccttcagtggttttgttaggtcacggcttgtcctgtctggattctgcatctggaagcgctgcatgctctcagaggagcgtgccgtttcccctgtagatggatacttttgttttgttgcctatttaaaaacaattaagtggttatttgcagttatttcagaactccaagtaagtggatggctttgggttctttctgccttggtcccaatggtgttgatgcttctgtggagcgcggacattcccaggagcaggtgcgtgccagccatggctgccagacactgctgcaactgaccagctgccggaagattctggagccactaacattagttttgcacatattttcttgggagtgttacttgaatctatctcaaactgcagaaaaaatcaaaagatcaataattgggagaaaaagagacaaatttaactgttacataattttagatagacaaaaaacatgagtgagtcgtgtacataaggagggaacatggtacagaaggctagaaggaattataggtcttattcccctttcctcagtcctttgaagagaagtacagtctcttgcgattttgtatatatcgtgttcgacacagccgctctctgtcctgtaaatagggaactaaaggctgtatgatttctcaagtgctgagttacacagtcctgagtgagctttctgttaccatactttcacacgtgggctttatttctcactgtatgtttgatatgatattactgtatttattttaagaaagcactaagatgtaataaagtgatgaactaatttgctttacattgaatcgtatgtgtgaggttgctgtggctcatttcgctgaccaggcgacaccaactccttgctttataggagtttcacattgttctttaccatggccctatcgaagtcagtggaattggattctttttaatgaagagctagaaaatatctggcatagagctggaaaattgcattcccatgggacgtctgaatcaattctggattttctccatggaatgagtcagtgtgtggaacatcctgaaacttgtccttaagcgtgtagttttcactgttcgttgcgagtaagcactaatgtggcatggacattcctgatgtcccaagtccccaggccagtgttcgcctaatgattgacagaagcgtccctgcgttcttcatgcttggacacagcaacccttttaattagtcttgaaaagtttcagacacaggattaattttcgtggtggtgcttttgggcctttctggcttgggtggtggtaaagtcatgattttgcagttgataacactgacttataactctgtttatcaatgtctcctatattcaaagcccctgcagtggtatttgtgtctcgttgcaaatttctttcagcggaaagcttgcacaactttcgttgtgtctcagaattctaaccttgttatttaagacaagctgctctacccatttaggatataactttgtaaagaaagtgtaaaccaaatgattcaatgtatgatgaagtttatgtgtaaatccttggtaatgctagaattctgggagcccagaagggttgaaagagaaatgaaacttgcgtgagtcccattattttacgcatgtatgtgcagatacgttctacccacacgtgtgcgtgcacatggctgtgtgcgtgcaccaaagatggactgctttccatgtgtccttttgactttctgcacgtgtcactgcggtgcagtctcttagcagacttcaggcccaaactgtattcttcactcaggcaaaattgaaaagtggaataattctaaattacttctaggttatacttttacctccctgaaattgtagttgtcacttggagggcaaaatatttattgaaataaaattttctgttaaaaattcaaaaaaaaaaa

SEQ ID NO: 431096 - DNA, 4325 bp, Homo sapiens
cggccgcgccgccgccgagggctggaggaagatggaggccccgccggacggcgccgccgacctcgtgcccctggaccgctacgacgcggcgcgcgccaagatcgccgccaacctgcagtggatctgcgccaaggcctacggccgagataacatccctgaggacctcagagaccctttctacgttgaccagtatgagcaggagcacattaagccgcctgttatcaagcttctcctgtccagcgagctgtactgccgtgtctgcagcctcatcctgaaaggggaccaggtggccgccttacagggacaccagtctgtcatccaggccctgtcccggaaagggatctatgtgatggagagtgatgacacccccgtgacagagtccgacctcagtcgcgcacccataaaaatgagtgcccacatggcaatggtggatgccctgatgatggcctacactgtggagatgatcagcatcgagaaggtggtggccagtgtcaagcgcttctcaacgttcagtgcctcgaaagaacttccgtacgacctcgaggatgccatggtgttctggatcaacaaggtaaatcttaaaatgagagagataacagagaaagaagttaaattaaaacaacagttattggaaagtccagctcatcaaaaggtccgctatcgacgagagcacctttctgctaggcagtcaccctacttcccgttgttggaggatttgatgagagacggcagtgatggtgctgctctcttagctgtgattcactattattgcccagagcagatgaaactggatgatatatgcttaaaggaggtaacgtcgatggccgacagtctgtataatattcggcttctgagagaattctccaatgaatatcttaataaatgtttttatctcaccttggaagatatgctgtatgcgccattagtgttgaagccgaatgttatggtttttattgcggagcttttttggtggttcgagaatgtcaagccagattttgttcagcccagggatgttcaggagctgaaagacgcgaaaacagtgttacaccagaagagcagccggcctcctgtaccgatctccaacgcgaccaaacgcagtttcctaggcagccctgctgcagggaccctggctgagctgcagccccccgtgcagctgccggcggaaggctgtcacaggcactacctgcacccggaagaacctgaatacctcgggaaaggaactgctgccttcagcccatcccatcctttattgccactgagacagaaacagcagaaatccatacagggagaggacatccctgatcagcgacatcgatcgaattctttgacccgagttgatggtcagcctcgaggagcagcaatagcctggccagaaaaaaaaaccaggcctgcgtcccagccaacaccttttgctctacatcacgctgcgagttgtgaagtggatcccagctctggcgacagcatcagcttggcccgctccatcagcaaagacagtttggcatccaacattgttaatctgaccccacagaaccagccacaccccacggccacgaagagccacgggaagagcctcctgagcaatgtcagtattgaggatgaggaagaggagcttgtggctattgttagagcagacgtggttccccagcaggctgacccggagttccccagggcctcaccccgggccttaggccttacagcaaatgcccggtctccccaaggacagctggacacctcggaaagtaagcctgacagttttttcttggagcctttgatgccagcagttcttaagccagcgaaagagaagcaggtgatcaccaaggaggatgaacggggggaagggagaccgaggagcatcgtgtctaggaggcccagcgagggcccccagcctttggtacgaaggaaaatgactggcagtcgcgacttgaataggacttttaccccgattccatgctcagaattccccatgggcatcgaccccaccgagacaggaccactgtcagtggaaaccgcaggagaggtctgtggtgggcctctggcccttggcggattcgatccgttcccccagggaccatccacggatggcttcttccttcatgtaggcagggccgatgaagacaccgagggaaggttatatgttagttgttcaaaaagccccaactcccacgattcagagccgtggactctcctcaggcaggattctgactcggatgtggtggacatagaggaagccgagcacgatttcatgggtgaggcccatcctgtggttttcagcagatacattggggaggaagagtcggccaaactgcaggaggacatgaaggtgaaggaacatgaagacaaagatgacgccagcggccgctcgagcccctgcctgagcacagcctctcagatgagcagtgtctccatggcgagtgggagcgtgaagatgaccagctttgcggagaggaagctccagagactcaacagctgtgagaccaagtccagcaccagcagctcccagaagaccacgccagatgcgtctgagagctgcccagcccctctgacgacgtggaggcagaagagggagcagagtccgagccagcatggcaaggatcccgccagcctcctggcatctgagctggtacagctgcacatgcagctggaggagaagcgcagggccatcgaggcccagaagaagaagatggaggcgctgtcggcaaggcagcgcctgaagctcggcaaggctgcattcctgcatgtggtgaagaagggcaaggccgaggctgccccacccctcaggccggagcactttgcaaaggagtactctcagcacaacggggaggactgtggggacgctgtttccaaaaccgaagactttctcgtgaaggaggagcagagagaggagctccttcacgagccacaggatgtggacaaagagagcctggcctttgctcagcaacataaagcaaaagaccctgtggctctgcacgagctggagagaaataaggtgatctccgctgccctcctggaggacactgttggggaggttgtcgacgtgaatgaatgtgacctttccatcgagaagcttaacgaaaccatcagtacgctgcagcaggccatcctgaaaatctctcagcagcaagagcagcttctgatgaagtcccccacagtcccagtgccaggctctaagaataactcgcaggaccacaaagtgaaggcaccagtccacttcgtggagccactctctcccacgggcgtggctggccaccgcaaagccccccggctgggtcaaggccggaattcccgttccggaaggccggcggagctgaaggtcccaaaagacaggccacagggctcctcccgaagtaaaaccccaacgcccagtgtagagacgctcccgcacttgagacccttccctgccagcagccaccctcggacgcccacggaccctggcctggacagtgccctggagcccagtggtgacccacatgggaagtgtctcttcgacagttacaggctccatgatgaaagcaatcagcggacacttactctgtcctcttccaaagatgccaacattctttcggagcagatgagcctcaaagaagttctggatgcgagtgtgaaggaggtggggtccagctcctcagatgtctcgggaaaagagagcgtccccgtggaggagcctctgaggagcagggccagcctcattgaagtggacctctccgacctgaaggcccccgacgaggatggggagctggtaagcctcgatggctcggcggaccttgtcagcgaaggcgaccagaagccgggggtcggcttcttcttcaaggatgaacagaaagcggaagatgagctcgccaagaagcgggcggccttcctcctgaagcagcagcgcaaggccgaggaggcccgcgtgcgcaagcagcagctggaagcggaggtggagctcaagcgtgacgaagcccggcgcaaagctgaggaagaccgggtgcggaaggaggaggagaaggcgcggcgcgagctcatcaagcaggagtacctgcggaggaagcagcagcagatcctagaggagcaggggctcggcaagcccaagtcaaagccgaagaagccgcggccgaagtcggtgcaccgggaagagtcgtgcagcgactccggcaccaagtgctcctccacccctgataacttgagccggactcagtcaggctccagcctgtccttggcctctgcggcgacgacagaacccgagagcgttcattccgggggcacaccctctcagcgaatagttgcaatcatgtcatcaggaataccagtgcccttcacacgggctccccagctggttaaacgtg

SEQ ID NO: 431097 - DNA, 1395 bp, Homo sapiens
cggccgcgccgccgccgagggctggaggaagatggaggccccgccggacggcgccgccgacctcgtgcccctggaccgctacgacgcggcgcgcgccaagatcgccgccaacctgcagtggatctgcgccaaggcctacggccgagataacatccctgaggacctcagagaccctttctacgttgaccagtatgagcaggagcacattaagccgcctgttatcaagcttctcctgtccagcgagctgtactgccgtgtctgcagcctcatcctgaaaggggaccaggtggccgccttacagggacaccagtctgtcatccaggccctgtcccggaaagggatctatgtgatggagagtgatgacacccccgtgacagagtccgacctcagtcgcgcacccataaaaatgagtgcccacatggcaatggtggatgccctgatgatggcctacactgtggagatgatcagcatcgagaaggtggtggccagtgtcaagcgcttctcaacgttcagtgcctcgaaagaacttccgtacgacctcgaggatgccatggtgttctggatcaacaaggtaaatcttaaaatgagagagataacagagaaagaagttaaattaaaacaacagttattggaaagtccagctcatcaaaaggtccgctatcgacgagagcacctttctgctaggcagtcaccctacttcccgttgttggaggatttgatgagagacggcagtgatggtgctgctctcttagctgtgattcactattattgcccagagcagatgaaactggatgatatatgcttaaaggaggtaacgtcgatggccgacagtctgtataatattcggcttctgagagaattctccaatgaatatcttaataaatgtttttatctcaccttggaagatatgctgtatgcgccattagtgttgaaggtaataacgaattatttggcatgcagttttaaaaccatgtgtgaataaactgcttatcatactttggttttttgtttttgtcttttagccgaatgttatggtttttattgcggagcttttttggtggttcgagaatgtcaagccagattttgttcagcccagggatgttcaggagctgaaagacggtgagtgacagatattccccaggttggcaatggtttccttgagagcctagagtatcagaaagcactctccagtggttccatgtttctcgcacagcagagttcttggaagagcctgtggagtcagaatcccagggacgggcgtgagagtttggggaaaggctttctaagtgattttgatgaactattcggttacgaatcacagctctaaaaattgcacaactctaaaagttccaggatggctgttctcacctccagaatgaacaaactgaaaaaaaa

SEQ ID NO: 431098 - DNA, 483 bp, Homo sapiens
agggctggaggaagatggaggccccgccggacggcgccgccgacctcgtgcccctggaccgctacgacgcggcgcgcgccaagatcgccgccaacctgcagtggatctgcgccaaggcctacggccgaggtgggccgggtgaggggcgcggggcgggggccaggggcgcgggccggggccgggggacgcggccggggtccggccgggtcggggtccgcgcgccgcgcctttgtgccgcgtccgcacagggtcggggctgggccggccgcctccgaggtcctggcggcgcccgggcaacgcggagcgtggggacgcggtcacctggcgagtgggcgtccctgcggcggagggcggcgtgggtcggggcttccgctcctatttcgggagtgcccccagcctcccgttggcggcggcggcggcgggaaggagctgcccggttctgggcgcagggagggaccatggggacgcggggccgccgtctga

SEQ ID NO: 431099 - DNA, 2245 bp, Homo sapiens
gccgcgcgcggtcagctagagtttggctactggacccaggaagggagggagcgggaggagctggtggctgtcgggtcggggtctgggcgccaccgagcgcccgccccacctctggagtgcgcagaaggcggtgcgtcccgggccccggcagcccagcccaggcgctctggccaagtttgcgcgcggtctccgctgactctcgggttacctgagccggcaaccacgtcagcgccacatcatctgggctttttatattgcaaggaaacaggaaaagaaggaagaaaaacatcgcccgagagagccaatcgcaggaagacggcgctgcccggaggagcggggcgggcgggcgcgcgggggagcgggcggcgggcgggagccaggcccgggcgggggcgggggcggcggggccagaagaggcggcgggccgcgctccggccggtctgcggcgttggccttggctttggctttggcggcggcggtggagaagatgctgcagtccctggccggcagctcgtgcgtgcgcctggtggagcggcaccgctcggcctggtgcttcggcttcctggtgctgggctacttgctctacctggtcttcggcgcagtggtcttctcctcggtggagctgccctatgaggacctgctgcgccaggagctgcgcaagctgaagcgacgcttcttggaggagcacgagtgcctgtctgagcagcagctggagcagttcctgggccgggtgctggaggccagcaactacggcgtgtcggtgctcagcaacgcctcgggcaactggaactgggacttcacctccgcgctcttcttcgccagcaccgtgctctccaccacaggttatggccacaccgtgcccttgtcagatggaggtaaggccttctgcatcatctactccgtcattggcattcccttcaccctcctgttcctgacggctgtggtccagcgcatcaccgtgcacgtcacccgcaggccggtcctctacttccacatccgctggggcttctccaagcaggtggtggccatcgtccatgccgtgctccttgggtttgtcactgtgtcctgcttcttcttcatcccggccgctgtcttctcagtcctggaggatgactggaacttcctggaatccttttatttttgttttatttccctgagcaccattggcctgggggattatgtgcctggggaaggctacaatcaaaaattcagagagctctataagattgggatcacgtgttacctgctacttggccttattgccatgttggtagttctggaaaccttctgtgaactccatgagctgaaaaaattcagaaaaatgttctatgtgaagaaggacaaggacgaggatcaggtgcacatcatagagcatgaccaactgtccttctcctcgatcacagaccaggcagctggcatgaaagaggaccagaagcaaaatgagccttttgtggccacccagtcatctgcctgcgtggatggccctgcaaaccattgagcgtaggatttgttgcattatgctagagcaccagggtcagggtgcaaggaagaggcttaagtatgttcatttttatcagaatgcaaaagcgaaaattatgtcactttaagaaatagctactgtttgcaatgtcttattaaaaaacaacaaaaaaagacaaatggaacaaagaagctgtgaccccagcaggatgtctaatatgtgaggaaatgagatgtccacctaaaattcatatgtgacaaaattatctcgaccttacataggaggagaatacttgaagcagtatgctgctgtggttagaagcagattttatacttttaactggaaactttggggtttgcatttagatcatttagctgatggctaaatagcaaaatttatatttagaagcaaaaaaaaaaagcatagagatgtgttttataaataggtttatgtgtactggtttgcatgtacccacccaaaatgattatttttgtagaatctaagttaaacttactatttataatgcataggtaaccattaactatgtacatataaagtataaatatgtttatattctgtacatatggtttaggtcaccagatcctagtgtagttctgaaactaagactatagatattttgtttcttttgatttctctttatactaaagaatccagagttgctacaataaaataaggggaataataaacttgagagtgaataaccatagtattctgctgcaataaatgtttctaccctcttgcgat

SEQ ID NO: 431100 - DNA, 2415 bp, Homo sapiens
gccgcgcgcggtcagctagagtttggctactggacccaggaagggagggagcgggaggagctggtggctgtcgggtcggggtctgggcgccaccgagcgcccgccccacctctggagtgcgcagaaggcggtgcgtcccgggccccggcagcccagcccaggcgctctggccaagtttgcgcgcggtctccgctgactctcgggttacctgagccggcaaccacgtcagcgccacatcatctgggctttttatattgcaaggaaacaggaaaagaaggaagaaaaacatcgcccgagagagccaatcgcaggaagacggcgctgcccggaggagcggggcgggcgggcgcgcgggggagcgggcggcgggcgggagccaggcccgggcgggggcgggggcggcggggccagaagaggcggcgggccgcgctccggccggtctgcggcgttggccttggctttggctttggcggcggcggtggagaagatgctgcagtccctggccggcagctcgtgcgtgcgcctggtggagcggcaccgctcggcctggtgcttcggcttcctggtgctgggctacttgctctacctggtcttcggcgcagtggtcttctcctcggtggagctgccctatgaggacctgctgcgccaggagctgcgcaagctgaagcgacgcttcttggaggagcacgagtgcctgtctgagcagcagctggagcagttcctgggccgggtgctggaggccagcaactacggcgtgtcggtgctcagcaacgcctcgggcaactggaactgggacttcacctccgcgctcttcttcgccagcaccgtgctctccaccacaggttatggccacaccgtgcccttgtcagatggaggtaaggccttctgcatcatctactccgtcattggcattcccttcaccctcctgttcctgacggctgtggtccagcgcatcaccgtgcacgtcacccgcaggccggtcctctacttccacatccgctggggcttctccaagcaggtggtggccatcgtccatgccgtgctccttgggtttgtcactgtgtcctgcttcttcttcatcccggccgctgtcttctcagtcctggaggatgactggaacttcctggaatccttttatttttgttttatttccctgagcaccattggcctgggggattatgtgcctggggaaggctacaatcaaaaattcagagagctctataagattgggatcacgtgttacctgctacttggccttattgccatgttggtagttctggaaaccttctgtgaactccatgagctgaaaaaattcagaaaaatgttctatgtgaagaaggacaaggacgaggatcaggtgcacatcatagagcatgaccaactgtccttctcctcgatcacagaccaggcagctggcatgaaagaggaccagaagcaaaatgagccttttgtggccacccagtcatctgcctgcgtggatggccctgcaaaccattgagcgtaggatttgttgcattatgctagagcaccagggtcagggtgcaaggaagaggcttaagtatgttcatttttatcagaatgcaaaagcgaaaattatgtcactttaagaaatagctactgtttgcaatgtcttattaaaaaacaacaaaaaaagacaaatggaacaaagaagctgtgaccccagcaggatgtctaatatgtgaggaaatgagatgtccacctaaaattcatatgtgacaaaattatctcgaccttacataggaggagaatacttgaagcagtatgctgctgtggttagaagcagattttatacttttaactggaaactttggggtttgcatttagatcatttagctgatggctaaatagcaaaatttatatttagaagcaaaaaaaaaaagcatagagatgtgttttataaataggtttatgtgtactggtttgcatgtacccacccaaaatgattatttttgtagaatctaagttaaacttactatttataatgcataggtaaccattaactatgtacatataaagtataaatatgtttatattctgtacatatggtttaggtcaccagatcctagtgtagttctgaaactaagactatagatattttgtttcttttgatttctctttatactaaagaatccagagttgctacaataaaataaggggaataataaacttgagagtgaataaccatagtattctgctgcaataaatgtttctaccctcttgcgatagaatggtgtcagatgtctaacatgtttataaacatttttttgaattgaacaggttatgaaaaggatttattaaaaggttaagatactttgttttgaaagtacattgtgatttgcagccacctagcactaaagcatagaacttaaacacgaatccctaaatgaacagatt

SEQ ID NO: 431101 - DNA, 1725 bp, Homo sapiens
acttgagtcagtagaaaatggggagcctctgtgggctcctggtcctgcaccgtgataaatagcctgtcctgcaacctggcttaaaacagggaaagccggagttaggcaacagagtgcctagctttctcagtcattcaaacacaagcacggaagaagagattgcactgaccagaggaccgccagggtgtgatgctccgtagtcgcagggatgaaggaaaaccatgggcggagcttgtcatggacagctcctaggtggacataaatggaaactcattggttctggggcacggcgggaagagggagacggccctggacggccgcaccaagaatttcacaacccaaacccgactagaaagcctgggttatggccacaccgtgcccttgtcagatggaggtaaggccttctgcatcatctactccgtcattggcattcccttcaccctcctgttcctgacggctgtggtccagcgcatcaccgtgcacgtcacccgcaggccggtcctctacttccacatccgctggggcttctccaagcaggtggtggccatcgtccatgccgtgctccttgggtttgtcactgtgtcctgcttcttcttcatcccggccgctgtcttctcagtcctggaggatgactggaacttcctggaatccttttatttttgttttatttccctgagcaccattggcctgggggattatgtgcctggggaaggctacaatcaaaaattcagagagctctataagattgggatcacgtgttacctgctacttggccttattgccatgttggtagttctggaaaccttctgtgaactccatgagctgaaaaaattcagaaaaatgttctatgtgaagaaggacaaggacgaggatcaggtgcacatcatagagcatgaccaactgtccttctcctcgatcacagaccaggcagctggcatgaaagaggaccagaagcaaaatgagccttttgtggccacccagtcatctgcctgcgtggatggccctgcaaaccattgagcgtaggatttgttgcattatgctagagcaccagggtcagggtgcaaggaagaggcttaagtatgttcatttttatcagaatgcaaaagcgaaaattatgtcactttaagaaatagctactgtttgcaatgtcttattaaaaaacaacaaaaaaagacaaatggaacaaagaagctgtgaccccagcaggatgtctaatatgtgaggaaatgagatgtccacctaaaattcatatgtgacaaaattatctcgaccttacataggaggagaatacttgaagcagtatgctgctgtggttagaagcagattttatacttttaactggaaactttggggtttgcatttagatcatttagctgatggctaaatagcaaaatttatatttagaagcaaaaaaaaaaagcatagagatgtgttttataaataggtttatgtgtactggtttgcatgtacccacccaaaatgattatttttgtagaatctaagttaaacttactatttataatgcataggtaaccattaactatgtacatataaagtataaatatgtttatattctgtacatatggtttaggtcaccagatcctagtgtagttctgaaactaagactatagatattttgtttcttttgatttctctttatactaaagaatccagagttgctacaataaaataaggggaataataaacttgagagtgaataaccat

SEQ ID NO: 431102 - DNA, 1723 bp, Homo sapiens
gtgggtagcctcggatgagtttttcctgatggtctaagatgggtgtgggccttagcttcttagtacacagaacttgtgtttgagcctgatagtgaattcaagaccagagaccctgatgtgttggaattgctggttggattttacaaagaatggtggactttcaaacttatggtgaccactgttgaattttactgggacatgacaattatactagagcccctaaagtggcagacctgaagtctcgctgttctctttggtttgaggggaataagggcagatgataggcatatattgtttaaaaacgtgtttgccactttgtctcttcctcttcgcctcagtgaccttgttctccttgcagggttatggccacaccgtgcccttgtcagatggaggtaaggccttctgcatcatctactccgtcattggcattcccttcaccctcctgttcctgacggctgtggtccagcgcatcaccgtgcacgtcacccgcaggccggtcctctacttccacatccgctggggcttctccaagcaggtggtggccatcgtccatgccgtgctccttgggtttgtcactgtgtcctgcttcttcttcatcccggccgctgtcttctcagtcctggaggatgactggaacttcctggaatccttttatttttgttttatttccctgagcaccattggcctgggggattatgtgcctggggaaggctacaatcaaaaattcagagagctctataagattgggatcacgtgttacctgctacttggccttattgccatgttggtagttctggaaaccttctgtgaactccatgagctgaaaaaattcagaaaaatgttctatgtgaagaaggacaaggacgaggatcaggtgcacatcatagagcatgaccaactgtccttctcctcgatcacagaccaggcagctggcatgaaagaggaccagaagcaaaatgagccttttgtggccacccagtcatctgcctgcgtggatggccctgcaaaccattgagcgtaggatttgttgcattatgctagagcaccagggtcagggtgcaaggaagaggcttaagtatgttcatttttatcagaatgcaaaagcgaaaattatgtcactttaagaaatagctactgtttgcaatgtcttattaaaaaacaacaaaaaaagacaaatggaacaaagaagctgtgaccccagcaggatgtctaatatgtgaggaaatgagatgtccacctaaaattcatatgtgacaaaattatctcgaccttacataggaggagaatacttgaagcagtatgctgctgtggttagaagcagattttatacttttaactggaaactttggggtttgcatttagatcatttagctgatggctaaatagcaaaatttatatttagaagcaaaaaaaaaaagcatagagatgtgttttataaataggtttatgtgtactggtttgcatgtacccacccaaaatgattatttttgtagaatctaagttaaacttactatttataatgcataggtaaccattaactatgtacatataaagtataaatatgtttatattctgtacatatggtttaggtcaccagatcctagtgtagttctgaaactaagactatagatattttgtttcttttgatttctctttatactaaagaatccagagttgctacaataaaataaggggaataataaacttgagagtgaataaccat

SEQ ID NO: 431103 - DNA, 1570 bp, Homo sapiens
tgactgagaagagctaaaccccagtagagccaagttgggaggtggtgaaaaaaatccaggtgaatggggctaagaccccatacccaggaagcgagctggcatcagaagcagaagactgaggtcatttttatggatgggagatgtgctggtgggtttttagaagagctcatgtcagttggcatccatttcttcagtaaggtgagaaggttatggccacaccgtgcccttgtcagatggaggtaaggccttctgcatcatctactccgtcattggcattcccttcaccctcctgttcctgacggctgtggtccagcgcatcaccgtgcacgtcacccgcaggccggtcctctacttccacatccgctggggcttctccaagcaggtggtggccatcgtccatgccgtgctccttgggtttgtcactgtgtcctgcttcttcttcatcccggccgctgtcttctcagtcctggaggatgactggaacttcctggaatccttttatttttgttttatttccctgagcaccattggcctgggggattatgtgcctggggaaggctacaatcaaaaattcagagagctctataagattgggatcacgtgttacctgctacttggccttattgccatgttggtagttctggaaaccttctgtgaactccatgagctgaaaaaattcagaaaaatgttctatgtgaagaaggacaaggacgaggatcaggtgcacatcatagagcatgaccaactgtccttctcctcgatcacagaccaggcagctggcatgaaagaggaccagaagcaaaatgagccttttgtggccacccagtcatctgcctgcgtggatggccctgcaaaccattgagcgtaggatttgttgcattatgctagagcaccagggtcagggtgcaaggaagaggcttaagtatgttcatttttatcagaatgcaaaagcgaaaattatgtcactttaagaaatagctactgtttgcaatgtcttattaaaaaacaacaaaaaaagacaaatggaacaaagaagctgtgaccccagcaggatgtctaatatgtgaggaaatgagatgtccacctaaaattcatatgtgacaaaattatctcgaccttacataggaggagaatacttgaagcagtatgctgctgtggttagaagcagattttatacttttaactggaaactttggggtttgcatttagatcatttagctgatggctaaatagcaaaatttatatttagaagcaaaaaaaaaaagcatagagatgtgttttataaataggtttatgtgtactggtttgcatgtacccacccaaaatgattatttttgtagaatctaagttaaacttactatttataatgcataggtaaccattaactatgtacatataaagtataaatatgtttatattctgtacatatggtttaggtcaccagatcctagtgtagttctgaaactaagactatagatattttgtttcttttgatttctctttatactaaagaatccagagttgctacaataaaataaggggaataataaacttgagagtgaataaccat

SEQ ID NO: 431104 - DNA, 1322 bp, Homo sapiens
acggccagcgcattgaccagaagcggcccacactacacgcgcgcgaacacacacacacacgttatggccacaccgtgcccttgtcagatggaggtaaggccttctgcatcatctactccgtcattggcattcccttcaccctcctgttcctgacggctgtggtccagcgcatcactgtgtcctgcttcttcttcatcccggccgctgtcttctcagtcctggaggatgactggaacttcctggaatccttttatttttgttttatttccctgagcaccattggcctgggggattatgtgcctggggaaggctacaatcaaaaattcagagagctctataagattgggatcacgtgttacctgctacttggccttattgccatgttggtagttctggaaaccttctgtgaactccatgagctgaaaaaattcagaaaaatgttctatgtgaagaaggacaaggacgaggatcaggtgcacatcatagagcatgaccaactgtccttctcctcgatcacagaccaggcagctggcatgaaagaggaccagaagcaaaatgagccttttgtggccacccagtcatctgcctgcgtggatggccctgcaaaccattgagcgtaggatttgttgcattatgctagagcaccagggtcagggtgcaaggaagaggcttaagtatgttcatttttatcagaatgcaaaagcgaaaattatgtcactttaagaaatagctactgtttgcaatgtcttattaaaaaacaacaaaaaaagacaaatggaacaaagaagctgtgaccccagcaggatgtctaatatgtgaggaaatgagatgtccacctaaaattcatatgtgacaaaattatctcgaccttacataggaggagaatacttgaagcagtatgctgctgtggttagaagcagattttatacttttaactggaaactttggggtttgcatttagatcatttagctgatggctaaatagcaaaatttatatttagaagcaaaaaaaaaaagcatagagatgtgttttataaataggtttatgtgtactggtttgcatgtacccacccaaaatgattatttttgtagaatctaagttaaacttactatttataatgcataggtaaccattaactatgtacatataaagtataaatatgtttatattctgtacatatggtttaggtcaccagatcctagtgtagttctgaaactaagactatagatattttgtttcttttgatttctctttatactaaagaatccagagttgctacaataaaataaggggaataataaacttgagagtgaataaccat

SEQ ID NO: 431105 - DNA, 504 bp, Homo sapiens
ataaaacaaaaacttttctaaaacatcactggctttttgtgagccactgattataaagcagaggtggcaaaccctccttgcataaaatatcacacttgggtaagtgcagtatgttatgtgtctttaataatgccacatcagccccaagtattttttttttctcaaaaattgcagcctgtgattctaactaatccaagttcataggaggttaaatcattcttcattgtctttcactctttaataatgggtagttcctctttgaaccatgaacttaaaaacacttctaaaaattaagaaactggcaatgagtttattccttaacaaacactgtgttggcatgaggtggggaggtaaatcactcgctacttgatttatccatgttgagatcacactaagacagtgtcctgtttctcacacaggttacctgctacttggccttattgccatgttggtagttctggaaaccttctgtgaactccatgagctgaaaaaattcagaaaaat

SEQ ID NO: 431106 - DNA, 363 bp, Homo sapiens
ccagggtcagggtgcaaggaagaggcttaagtatgttcatttttatcagaatgcaaaagcgaaaattatgtcactttaagaaatagctactgtttgcaatgtcttattaaaaaacaacaaaaaaagacaaatggaacaaagaagctgtgaccccagcaggatgtctaatatgtgaggaaatgagatgtccacctaaaattcatatgtgacaaaattatctcgaccttacataggaggagaatacttgaagcagtatgctgctgtggttagaagcagattttatacttttaactggaaactttggggtttgcatttagatcatttagctgatggctaaatagcaaaatttatatttagaagcaa

SEQ ID NO: 431107 - DNA, 2206 bp, Homo sapiens
gccgcgcgcggtcagctagagtttggctactggacccaggaagggagggagcgggaggagctggtggctgtcgggtcggggtctgggcgccaccgagcgcccgccccacctctggagtgcgcagaaggcggtgcgtcccgggccccggcagcccagcccaggcgctctggccaagtttgcgcgcggtctccgctgactctcgggttacctgagccggcaaccacgtcagcgccacatcatctgggctttttatattgcaaggaaacaggaaaagaaggaagaaaaacatcgcccgagagagccaatcgcaggaagacggcgctgcccggaggagcggggcgggcgggcgcgcgggggagcgggcggcgggcgggagccaggcccgggcgggggcgggggcggcggggccagaagaggcggcgggccgcgctccggccggtctgcggcgttggccttggctttggctttggcggcggcggtggagaagatgctgcagtccctggccggcagctcgtgcgtgcgcctggtggagcggcaccgctcggcctggtgcttcggcttcctggtgctgggctacttgctctacctggtcttcggcgcagtggtcttctcctcggtggagctgccctatgaggacctgctgcgccaggagctgcgcaagctgaagcgacgcttcttggaggagcacgagtgcctgtctgagcagcagctggagcagttcctgggccgggtgctggaggccagcaactacggcgtgtcggtgctcagcaacgcctcgggcaactggaactgggacttcacctccgcgctcttcttcgccagcaccgtgctctccaccacaggttatggccacaccgtgcccttgtcagatggaggtaaggccttctgcatcatctactccgtcattggcattcccttcaccctcctgttcctgacggctgtggtccagcgcatcaccgtgcacgtcacccgcaggccggtcctctacttccacatccgctggggcttctccaagcaggtggtggccatcgtccatgccgtgctccttgggtttgtcactgtgtcctgcttcttcttcatcccggccgctgtcttctcagtcctggaggatgactggaacttcctggaatccttttatttttgttttatttccctgagcaccattggcctgggggattatgtgcctggggaaggctacaatcaaaaattcagagagctctataagattgggatcacgtgttacctgctacttggccttattgccatgttggtagttctggaaaccttctgtgaactccatgagctgaaaaaattcagaaaaatgttctatgtgaagaaggacaaggacgaggatcaggtgcacatcatagagcatgaccaactgtccttctcctcgatcacagaccaggcagctggcatgaaagaggaccagaagcaaaatgagccttttgtggccacccagtcatctgcctgcgtggatggccctgcaaaccattgagcgtaggatttgttgcattatgctagagcaccagggtcagggtgcaaggaagaggcttaagtatgttcatttttatcagaatgcaaaagcgaaaattatgtcactttaagaaatagctactgtttgcaatgtcttattaaaaaacaacaaaaaaagacaaatggaacaaagaagctgtgaccccagcaggatgtctaatatgtgaggaaatgagatgtccacctaaaattcatatgtgacaaaattatctcgaccttacataggaggagaatacttgaagcagtatgctgctgtggttagaagcagattttatacttttaactggaaactttggggtttgcatttagatcatttagctgatggctaaatagcaaaatttatatttagaagcaaaaaaaaaaagcatagagatgtgttttataaataggtttatgtgtactggtttgcatgtacccacccaaaatgattatttttgtagaatctaagttaaacttactatttataatgcataggtaaccattaactatgtacatataaagtataaatatgtttatattctgtacatatggtttaggtcaccagatcctagtgtagttctgaaactaagactatagatattttgtttcttttgatttctctttatactaaagaatccagagttgctacaataaaataaggggaataataaacttgagagtgaataaccat

SEQ ID NO: 431108 - DNA, 1644 bp, Homo sapiens
gccgcgcgcggtcagctagagtttggctactggacccaggaagggagggagcgggaggagctggtggctgtcgggtcggggtctgggcgccaccgagcgcccgccccacctctggagtgcgcagaaggcggtgcgtcccgggccccggcagcccagcccaggcgctctggccaagtttgcgcgcggtctccgctgactctcgggttacctgagccggcaaccacgtcagcgccacatcatctgggctttttatattgcaaggaaacaggaaaagaaggaagaaaaacatcgcccgagagagccaatcgcaggaagacggcgctgcccggaggagcggggcgggcgggcgcgcgggggagcgggcggcgggcgggagccaggcccgggcgggggcgggggcggcggggccagaagaggcggcgggccgcgctccggccggtctgcggcgttggccttggctttggctttggcggcggcggtggagaagatgctgcagtccctggccggcagctcgtgcgtgcgcctggtggagcggcaccgctcggcctggtgcttcggcttcctggtgctgggctacttgctctacctggtcttcggcgcagtggtcttctcctcggtggagctgccctatgaggacctgctgcgccaggagctgcgcaagctgaagcgacgcttcttggaggagcacgagtgcctgtctgagcagcagctggagcagttcctgggccgggtgctggaggccagcaactacggcgtgtcggtgctcagcaacgcctcgggcaactggaactgggacttcacctccgcgctcttcttcgccagcaccgtgctctccaccacaggttatggccacaccgtgcccttgtcagatggaggtaaggccttctgcatcatctactccgtcattggcattcccttcaccctcctgttcctgacggctgtggtccagcgcatcaccgtgcacgtcacccgcaggccggtcctctacttccacatccgctggggcttctccaagcaggtggtggccatcgtccatgccgtgctccttgggtttgtcactgtgtcctgcttcttcttcatcccggccgctgtcttctcagtcctggaggatgactggaacttcctggaatccttttatttttgttttatttccctgagcaccattggcctgggggattatgtgcctggggaaggctacaatcaaaaattcagagagctctataagattgggatcacgtgttacctgctacttggccttattgccatgttggtagttctggaaaccttctgtgaactccatgagctgaaaaaattcagaaaaatgttctatgtgaagaaggacaaggacgaggatcaggtgcacatcatagagcatgaccaactgtccttctcctcgatcacagaccaggcagctggcatgaaagaggaccagaagcaaaatgagccttttgtggccacccagtcatctgcctgcgtggatggccctgcaaaccattgagcgtaggatttgttgcattatgctagagcaccagggtcagggtgcaaggaagaggcttaagtatgttcatttttatcagaatgcaaaagtgacataattttcgcttttgcattctgataaaaatgaacatacttaagcctcttcct

SEQ ID NO: 431109 - DNA, 2353 bp, Homo sapiens
gccgcgcgcggtcagctagagtttggctactggacccaggaagggagggagcgggaggagctggtggctgtcgggtcggggtctgggcgccaccgagcgcccgccccacctctggagtgcgcagaaggcggtgcgtcccgggccccggcagcccagcccaggcgctctggccaagtttgcgcgcggtctccgctgactctcgggttacctgagccggcaaccacgtcagcgccacatcatctgggctttttatattgcaaggaaacaggaaaagaaggaagaaaaacatcgcccgagagagccaatcgcaggaagacggcgctgcccggaggagcggggcgggcgggcgcgcgggggagcgggcggcgggcgggagccaggcccgggcgggggcgggggcggcggggccagaagaggcggcgggccgcgctccggccggtctgcggcgttggccttggctttggctttggcggcggcggtggagaagatgctgcagtccctggccggcagctcgtgcgtgcgcctggtggagcggcaccgctcggcctggtgcttcggcttcctggtgctgggctacttgctctacctggtcttcggcgcagtggtcttctcctcggtggagctgccctatgaggacctgctgcgccaggagctgcgcaagctgaagcgacgcttcttggaggagcacgagtgcctgtctgagcagcagctggagcagttcctgggccgggtgctggaggccagcaactacggcgtgtcggtgctcagcaacgcctcgggcaactggaactgggacttcacctccgcgctcttcttcgccagcaccgtgctctccaccacaggtgaatggggctaagaccccatacccaggaagcgagctggcatcagaagcagaagactgaggtcatttttatggatgggagatgtgctggtgggtttttagaagagctcatgtcagttggcatccatttcttcagtaaggtgagaaggttatggccacaccgtgcccttgtcagatggaggtaaggccttctgcatcatctactccgtcattggcattcccttcaccctcctgttcctgacggctgtggtccagcgcatcaccgtgcacgtcacccgcaggccggtcctctacttccacatccgctggggcttctccaagcaggtggtggccatcgtccatgccgtgctccttgggtttgtcactgtgtcctgcttcttcttcatcccggccgctgtcttctcagtcctggaggatgactggaacttcctggaatccttttatttttgttttatttccctgagcaccattggcctgggggattatgtgcctggggaaggctacaatcaaaaattcagagagctctataagattgggatcacgtgttacctgctacttggccttattgccatgttggtagttctggaaaccttctgtgaactccatgagctgaaaaaattcagaaaaatgttctatgtgaagaaggacaaggacgaggatcaggtgcacatcatagagcatgaccaactgtccttctcctcgatcacagaccaggcagctggcatgaaagaggaccagaagcaaaatgagccttttgtggccacccagtcatctgcctgcgtggatggccctgcaaaccattgagcgtaggatttgttgcattatgctagagcaccagggtcagggtgcaaggaagaggcttaagtatgttcatttttatcagaatgcaaaagcgaaaattatgtcactttaagaaatagctactgtttgcaatgtcttattaaaaaacaacaaaaaaagacaaatggaacaaagaagctgtgaccccagcaggatgtctaatatgtgaggaaatgagatgtccacctaaaattcatatgtgacaaaattatctcgaccttacataggaggagaatacttgaagcagtatgctgctgtggttagaagcagattttatacttttaactggaaactttggggtttgcatttagatcatttagctgatggctaaatagcaaaatttatatttagaagcaaaaaaaaaaagcatagagatgtgttttataaataggtttatgtgtactggtttgcatgtacccacccaaaatgattatttttgtagaatctaagttaaacttactatttataatgcataggtaaccattaactatgtacatataaagtataaatatgtttatattctgtacatatggtttaggtcaccagatcctagtgtagttctgaaactaagactatagatattttgtttcttttgatttctctttatactaaagaatccagagttgctacaataaaataaggggaataataaacttgagagtgaataaccat

SEQ ID NO: 431110 - DNA, 1473 bp, Homo sapiens
gtcctgagggttttatctcctgatttggttagaagattgttgaatctggctgtgagagcctttcaagtgcctaaaggagagagcttgaacttccctgagagtacaccaggttatggccacaccgtgcccttgtcagatggaggtaaggccttctgcatcatctactccgtcattggcattcccttcaccctcctgttcctgacggctgtggtccagcgcatcaccgtgcacgtcacccgcaggccggtcctctacttccacatccgctggggcttctccaagcaggtggtggccatcgtccatgccgtgctccttgggtttgtcactgtgtcctgcttcttcttcatcccggccgctgtcttctcagtcctggaggatgactggaacttcctggaatccttttatttttgttttatttccctgagcaccattggcctgggggattatgtgcctggggaaggctacaatcaaaaattcagagagctctataagattgggatcacgtgttacctgctacttggccttattgccatgttggtagttctggaaaccttctgtgaactccatgagctgaaaaaattcagaaaaatgttctatgtgaagaaggacaaggacgaggatcaggtgcacatcatagagcatgaccaactgtccttctcctcgatcacagaccaggcagctggcatgaaagaggaccagaagcaaaatgagccttttgtggccacccagtcatctgcctgcgtggatggccctgcaaaccattgagcgtaggatttgttgcattatgctagagcaccagggtcagggtgcaaggaagaggcttaagtatgttcatttttatcagaatgcaaaagcgaaaattatgtcactttaagaaatagctactgtttgcaatgtcttattaaaaaacaacaaaaaaagacaaatggaacaaagaagctgtgaccccagcaggatgtctaatatgtgaggaaatgagatgtccacctaaaattcatatgtgacaaaattatctcgaccttacataggaggagaatacttgaagcagtatgctgctgtggttagaagcagattttatacttttaactggaaactttggggtttgcatttagatcatttagctgatggctaaatagcaaaatttatatttagaagcaaaaaaaaaaagcatagagatgtgttttataaataggtttatgtgtactggtttgcatgtacccacccaaaatgattatttttgtagaatctaagttaaacttactatttataatgcataggtaaccattaactatgtacatataaagtataaatatgtttatattctgtacatatggtttaggtcaccagatcctagtgtagttctgaaactaagactatagatattttgtttcttttgatttctctttatactaaagaatccagagttgctacaataaaataaggggaataataaacttgagagtgaataaccat

SEQ ID NO: 431111 - DNA, 3045 bp, Homo sapiens
agcggctgacagagcggctgacggagccgggctcaccaggtcgctgccgcgagggagttgctgtgctggggcctgggtggcggctggaggcctgagttgggctcgcggcgggggtcggcagggggccgggtggcggaatgatggaggaggaggaactggagttcgtggaggagctggaagccgtgctgcagctcacgcccgaggtgcagctggccatcgagcaggtgtttccaagccaggaccctctagatcgagcagatttcaatgctgttgagtatatcaataccctgttcccaaccgagcaatctctggcgaacatagacgaagtcgtgaacaaaattaggctgaaaataaggagactggatgacaatattcgaactgttgtaagaggtcagacgaacgtggggcaggatggacggcaagcgcttgaagaggctcagaaagctatccaacaactctttggcaaaatcaaagatatcaaagacaaagctgaaaaatcagagcaaatggtgaaagaaatcacccgtgatattaagcaattagatcacgccaaacgccacctgaccacctcaatcaccacactgaaccacctgcacatgctggcaggaggtgtcgactccctcgaagccatgaccaggcgaagacaatacggagaagttgctaatctccttcagggtgtgatgaatgtcctggagcacttccacaagtatatggggattccgcagatccggcagctttccgaaagagtgaaggctgcacagactgagttaggacagcaaatcctggcagattttgaagaagcgtttccttcccagggcaccaagagaccaggaggacccagcaatgttctacgagatgcatgtctggttgctaatattctagatcccaggatcaaacaggaaatcatcaaaaagtttattaaacagcatctgtcagagtatctggtactttttcaagaaaaccaagatgttgcctggctggacaaaatcgacagacgctatgcctggataaaacgccagcttgtggactatgaggagaaatacggccgcatgtttccacgtgagtggtgcatggctgagaggattgcggtggaattttgccatgtgacaagggcagaacttgccaagattatgcgtaccagagcgaaggaaattgaagtgaaattgcttctttttgctattcaaagaacaactaactttgaggggtttcttgcaaaacgcttctccggctgcaccctgaccgatgggaccctgaaaaagcttgagtctccacccccatctaccaatcccttcctggaagatgagccaacaccagagatggaggaactggcaacggagaaaggagatttagatcaaccaaagaagcctaaagccccagacaatccatttcatggcattgtttccaagtgttttgagcctcatctctacgtgtatatcgaatcccaagacaagaacctcggagagctgatagatcggtttgtggctgatttcaaagcccaggggccacctaagcccaacactgatgaagggggtgccgtgctccccagctgcgccgacctctttgtctactacaagaagtgcatggtgcaatgctctcagctcagtactggggagcccatgatcgccctgaccaccattttccagaagtacctccgagaatacgcctggaaaatcctctctggcaacctgcccaaaaccacaaccagcagtggaggactgactatcagcagcctcctcaaggaaaaggagggctcagaagtagccaagttcactctggaggagctctgcctcatctgtaacatcctgagcacggcagagtactgtctggccaccacccagcagctagaagaaaaactcaaagaaaaagtggatgtaagtctgattgaacgaatcaatctgactggagagatggacacgttcagcaccgtcatctccagcagtattcagctgctggttcaggatctggatgctgcctgtgatcctgccctgactgccatgagcaagatgcagtggcagaacgtggagcacgttggtgaccagagcccctacgtcacctctgtcattctgcacatcaagcagaacgtccccatcatccgtgacaacctggcttccacacgcaagtacttcactcagttctgcgttaaatttgcaaactccttcattcccaaattcatcacccacctcttcaagtgcaagccaattagcatggtgggagcagaacaggtgagatggacgtagtatcaggcatttgcctggcagcttttgttgtagatcaagcacatattcttctagtccagatctacttggcaggaataaaattgatgatgtcccctgtttggggacagtataatgactcacccggaaggtttcttaattcgttcttccatttatttttaaaaattttgtttgaacgcctactaagttctgggtgcagggtataacacagcaagcaccatggaaaggtccctgctcctagtgctcacactccaataagaagaagtggctgggccgggcacagcggctcacgctgtaaccccagcatttcgggaggcctgggcaggcagatcacctggggtaaggaatttgagagcagcctggccaacatggtgaaatcccatctctactaaaaatacaaaaattagctgggcatgggggcaggctaccggggaggctgaggcaggagaatcacttgaacccgggaggtggaggttgcagtgagccgatatcacaccactgcactccagcctgggtgacaaagtgagactccatctcaaaaaaacaaacaaacaaaaaaactagcaaaaaacttggaatattggccgggcatggtggctcacgtctgtaatcctagcactttgggaggcccaggcaggcggatcatctgaggtcaggagttcgagaccagcctggctaacatggtgaaccctgtctctactaataatacaaaaaattagccgggcgtgatggtgggcgcctgtaatcccagctactcgggaggctgaggcagaattgcttcaacccaggaggtggaggttgcagtgagctg

SEQ ID NO: 431112 - DNA, 2856 bp, Homo sapiens
agcagtgaatcgagctctgggccctatctaggaccgtgtttccaagccaggaccctctagatcgagcagatttcaatgctgttgagtatatcaataccctgttcccaaccgagcaatctctggcgaacatagacgaagtcgtgaacaaaattaggctgaaaataaggagactggatgacaatattcgaactgttgtaagaggtcagacgaacgtggggcaggatggacggcaagcgcttgaagaggctcagaaagctatccaacaactctttggcaaaatcaaagatatcaaagacaaagctgaaaaatcagagcaaatggtgaaagaaatcacccgtgatattaagcaattagatcacgccaaacgccacctgaccacctcaatcaccacactgaaccacctgcacatgctggcaggaggtgtcgactccctcgaagccatgaccaggcgaagacaatacggagaagttgctaatctccttcagggtgtgatgaatgtcctggagcacttccacaagtatatggggattccgcagatccggcagctttccgaaagagtgaaggctgcacagactgagttaggacagcaaatcctggcagattttgaagaagcgtttccttcccagggcaccaagagaccaggaggacccagcaatgttctacgagatgcatgtctggttgctaatattctagatcccaggatcaaacaggaaatcatcaaaaagtttattaaacagcatctgtcagagtatctggtactttttcaagaaaaccaagatgttgcctggctggacaaaatcgacagacgctatgcctggataaaacgccagcttgtggactatgaggagaaatacggccgcatgtttccacgtgagtggtgcatggctgagaggattgcggtggaattttgccatgtgacaagggcagaacttgccaagattatgcgtaccagagcgaaggaaattgaagtgaaattgcttctttttgctattcaaagaacaactaactttgaggggtttcttgcaaaacgcttctccggctgcaccctgaccgatgggaccctgaaaaagcttgagtctccacccccatctaccaatcccttcctggaagatgagccaacaccagagatggaggaactggcaacggagaaaggagatttagatcaaccaaagaagcctaaagccccagacaatccatttcatggcattgtttccaagtgttttgagcctcatctctacgtgtatatcgaatcccaagacaagaacctcggagagctgatagatcggtttgtggctgatttcaaagcccaggggccacctaagcccaacactgatgaagggggtgccgtgctccccagctgcgccgacctctttgtctactacaagaagtgcatggtgcaatgctctcagctcagtactggggagcccatgatcgccctgaccaccattttccagaagtacctccgagaatacgcctggaaaatcctctctggcaacctgcccaaaaccacaaccagcagtggaggactgactatcagcagcctcctcaaggaaaaggagggctcagaagtagccaagttcactctggaggagctctgcctcatctgtaacatcctgagcacggcagagtactgtctggccaccacccagcagctagaagaaaaactcaaagaaaaagtggatgtaagtctgattgaacgaatcaatctgactggagagatggacacgttcagcaccgtcatctccagcagtattcagctgctggttcaggatctggatgctgcctgtgatcctgccctgactgccatgagcaagatgcagtggcagaacgtggagcacgttggtgaccagagcccctacgtcacctctgtcattctgcacatcaagcagaacgtccccatcatccgtgacaacctggcttccacacgcaagtacttcactcagttctgcgttaaatttgcaaactccttcattcccaaattcatcacccacctcttcaagtgcaagccaattagcatggtgggagcagaacaggtgagatggacgtagtatcaggcatttgcctggcagcttttgttgtagatcaagcacatattcttctagtccagatctacttggcaggaataaaattgatgatgtcccctgtttggggacagtataatgactcacccggaaggtttcttaattcgttcttccatttatttttaaaaattttgtttgaacgcctactaagttctgggtgcagggtataacacagcaagcaccatggaaaggtccctgctcctagtgctcacactccaataagaagaagtggctgggccgggcacagcggctcacgctgtaaccccagcatttcgggaggcctgggcaggcagatcacctggggtaaggaatttgagagcagcctggccaacatggtgaaatcccatctctactaaaaatacaaaaattagctgggcatgggggcaggctaccggggaggctgaggcaggagaatcacttgaacccgggaggtggaggttgcagtgagccgatatcacaccactgcactccagcctgggtgacaaagtgagactccatctcaaaaaaacaaacaaacaaaaaaactagcaaaaaacttggaatattggccgggcatggtggctcacgtctgtaatcctagcactttgggaggcccaggcaggcggatcatctgaggtcaggagttcgagaccagcctggctaacatggtgaaccctgtctctactaataatacaaaaaattagccgggcgtgatggtgggcgcctgtaatcccagctactcgggaggctgaggcagaattgcttcaacccaggaggtggaggttgcagtgagctg

SEQ ID NO: 431113 - DNA, 2922 bp, Homo sapiens
agcggctgacagagcggctgacggagccgggctcaccaggtcgctgccgcgagggagttgctgtgctggggcctgggtggcggctggaggcctgagttgggctcgcggcgggggtcggcagggggccgggtggcggaatgatggaggaggaggaactggagttcgtggaggagctggaagccgtgctgcagctcacgcccgaggtgcagctggccatcgagcaggtgtttccaagccaggaccctctagatcgagcagatttcaatgctgttgagtatatcaataccctgttcccaaccgagcaatctctggcgaacatagacgaagtcgtgaacaaaattaggctgaaaataaggagactggatgacaatattcgaactgttgtaagaggtcagacgaacgtggggcaggatggacggcaagcgcttgaagaggctcagaaagctatccaacaactctttggcaaaatcaaagatatcaaagacaaagctgaaaaatcagagcaaatggtgaaagaaatcacccgtgatattaagcaattagatcacgccaaacgccacctgaccacctcaatcaccacactgaaccacctgcacatgctggcaggaggtgtcgactccctcgaagccatgaccaggcgaagacaatacggagaagttgctaatctccttcagggtgtgatgaatgtcctggagcacttccacaagtatatggggattccgcagatccggcagctttccgaaagagtgaaggctgcacagactgagttaggacagcaaatcctggcagattttgaagaagcgtttccttcccagggcaccaagagaccaggaggacccagcaatgttctacgagatgcatgtctggttgctaatattctagatcccaggatcaaacaggaaatcatcaaaaagtttattaaacagcatctgtcagagtatctggtactttttcaagaaaaccaagatgttgcctggctggacaaaatcgacagacgctatgcctggataaaacgccagcttgtggactatgaggagaaatacggccgcatgtttccacgtgagtggtgcatggctgagaggattgcggtggaattttgccatgtgacaagggcagaacttgccaagattatgcgtaccagagcgaaggaaattgaagtgaaattgcttctttttgctattcaaagaacaactaactttgaggggtttcttgcaaaacgcttctccggctgcaccctgaccgatgggaccctgaaaaagcttgagtctccacccccatctaccaatcccttcctggaagatgagccaacaccagagatggaggaactggcaacggagaaaggagatttagatcaaccaaagaagcctaaagccccagacaatccatttcatggcattgtttccaagtgttttgagcctcatctctacgtgtatatcgaatcccaagacaagaacctcggagagctgatagatcggtttgtggctgatttcaaagcccaggggccacctaagcccaacactgatgaagggggtgccgtgctccccagctgcgccgacctctttgtctactacaagaagtgcatggtgcaatgctctcagctcagtactggggagcccatgatcgccctgaccaccattttccagaagtacctccgagaatacgcctggaaaatcctctctggcaacctgcccaaaaccacaaccagcagtggaggactgactatcagcagcctcctcaaggaaaaggagggctcagaagtagccaagttcactctggaggagctctgcctcatctgtaacatcctgagcacggcagagtactgtctggccaccacccagcagctagaagaaaaactcaaagaaaaagtggatgtaagtctgattgaacgaatcaatctgactggagagatggacacgttcagcaccgtcatctccagcagtattcagctgctggttcaggatctggatgctgcctgtgatcctgccctgactgccatgagcaagatgcagtggcagaacgtggagcacgttggtgaccagagcccctacgtcacctctgtcattctgcacatcaagcagaacgtccccatcatccgtgacaacctggcttccacacgcaagtacttcactcagttctgcgttaaatttgcaaactccttcattcccaaattcatcacccacctcttcaagtgcaagccaattagcatggtgggagcagaacagctgctgctggacacccactcgctgaagatggtcctgctcgatctcccctccatcagctcgcaggtggtgaggaaggcacccgccagctacaccaagatcgttgtcaaaggcatgacccgggctgagatgatcctcaaggtagtgatggcccctcatgaaccgttggtggtgtttgttgacaactacatcaaacttctcacagactgcaacacagaaacctttcagaagatactggacatgaaggggctgaagaggagtgagcagagcagcatgctggaactcctgcgccagcggctccccgcaccgccctcgggggcagaaagctccggctcactgtccctgacggcgccaacaccagagcaagagtcgtcacgcatccgcaagctcgagaaactcattaaaaagagactgtagcagcagcaaggggccctttgctcctggctggagaccctcagcgcccgttccccagaagcccccaacctctcctgtgctccccggcactctcacatcgtcggtcttcaaacttcctgggacatgtgggttgttactgagtctctcccatgccctgtcttacttcctgccctaatcggagacgctgagtaagggctgggctctaagagggcgatttaggtgatctctggttcgtgaagcagaggcagcagtggaggataggtccctgagctgcccttgactcatgtag

SEQ ID NO: 431114 - DNA, 3068 bp, Homo sapiens
ttttttttgagacagagtctcgctctgtcacccaggctggagtgcagtggcgtgatctcggctcactgcaacctccgcctcccgggttcgagcaattctcctgcctcagcctcctgagtatcggattacaggcgtgagccaccgagcccagccccttcctccatttctttactcccaccctgctcctggtttctagggaagggaaaccaggaagttcacttggaagacgtttcctaggttttctcatcagatgaagccatgggaacgcccaggaagtccatactctcaaacccctttctgcccactcaccttcaggtccacagcactttccagcgtcatctgaaatagcaaaggtgatgtgcagcatcccagtgatgtgttcctgtgttatgagaaggagtctggggttctggatgcctcaggaacagaatatggaccttaaagaccaggctgagagcctggcctggcacgcagcctgcccgccccccccgcccttcctgtccaccgcgggctctctgcagcagggcttgccgaagagactgctcccgacctctcatgtcatcctgcatccagagaacggcagcatatcaagccgttaaccctgattcactcggttcccttgaaaccaggcctcagttaaccatgaccacagctacaggcaaaccgctgctgttgctgcctgcttttgctgaagaatgatatcttgccaggcacggcggctcatgcctgtagtcgcaacactttgggagaccaaggcaggaggatcacttgagtccaggagtttgagaccagcctgggcaacatacagatgtctacaaaaataaaaatttgcaaggtgtggtggcatgcacctgtagtcccaactgctagggaggctgaggtgggcagattgcttgagctcaggagtttgagaccagtctgggcaacctggcaaaaccaaaaatacaaaaaattggctgggtgtggtggctcatgcctgtaatcacagcactttgggaggctgaggcaggtggatcacctgaggtcaggaattcgagaccagcctgcccaacatggcgaaaccctgtctcaactaaaaataaaaaaaattagccgggtgtcatggcgagtgcctgtaatcccagctactggggaggctgaggcaggagaatcacttaaacccgggaggtggaggctgcagtgagccaagatttcaccactgcactccagcctgggtgacagagcaagaccccttctcaaaaagttttcaggatagaggaaatttccttaaaatccataaaacttgtaacagccgtacagtaggaataaggtttggaaatctgcctggaaacctgatttcctcatccccaccttgtttcccaacataaccactgctctgtgcccctgccctctctgccaggctttctccccgatgccgtccagctctgatcctgagtgtcatttcttcatcggcttccaggctgtccttgctagctggtttgactctcacgcatcaagcgtctcaaatttgagaatgcggaggagaaaagaagtgttgcgagaaggaggtgcggccttcagttgaggtctattaggaaaagattccaaataagacaagggcggggggcggcagtcgggagagcccccaggaagccctgtagatgcccccaccccagcccatggagttgctatggttaagcagcctgagccgtacagttgaaaaggggcggtggggcccatctccaaatagcacagccagttcagccgtctgtcctcaacccaggagagctgggaaagccagtggactcctgcacctggttcttgtcactcctggcgtttgtgtacagatcaccacttctctttttggttcattgttgaggagtcgttttccggacggctccatcacagcattgagctatcaagctgctgttttccacagttggtggtcacagccagggaagttgctgtcttgatttgttacattgtcagtaatccccaaggaaccaatggatgtcagtaggagtttctgttaaatgtctccttgatggggactcagtactgtgtaaagacgctgtgtttctcttctgggggtgtgcatcagaaccactggggccttttaaaatctacagatgccggccgggcgccgtggctcacgcctggaatcccagcacttggggaggctgaggcgggcggatcacaagcgcaggaaattgagaccatccttgccaatatggtgaaaccccatctctacaaaaaatacaaaaattaccggggtgtggtggcgtgcacacctcccagctacttgggaggctgaggcaggagaatcgcttgaacccgggaggcaaagattgcagtgagccgagatcacgccactgcactccagcctggcgacagagtgagactctatctcaaaacaaacaaaaaaacagatgcccggagattttgagtcagtaagtttggatggggcctggcatacaggtttaaaagttccataggtagttataacgtttacaccttgttaagaaccactgcaacagagagatttgctttatggaagggctcctgccacgcattttcatacatgtctatttttctgactctaagctaaaagtgcgccgacactacacttgagctggtgccaacgtggtgaagattctctactgataacagctttcattttaaacttgtgttgggtcaggcgcggtggctcacgcctgtaatcccagcactttgggaggccgaggtgggcggatcacatgaggtcacgagtttgagaccagcctggccaacatggcaaaatcccatctctactaaaaatacaaaaaaaaaaaaaaaaaaagcaggcaggtggcgggtgcctgtaatcccagctacttgggaggctgaggcaggggaatcagttgaatccgggaggcggaggttgcagtgagccgaggtcccgccactgcactccagcctgggagacagagtgagactcagttaaaaaaaaaagacttttggtggtggtggggaccatgcccaggattgggctctctccatactgatgaggattcttcttgttttgatgaccaacccccaagcagaagctt

SEQ ID NO: 431115 - DNA, 2207 bp, Homo sapiens
agcggctgacagagcggctgacggagccgggctcaccaggtcgctgccgcgagggagttgctgtgctggggcctgggtggcggctggaggcctgagttgggctcgcggcgggggtcggcagggggccgggtggcggaatgatggaggaggaggaactggagttcgtggaggagctggaagccgtgctgcagctcacgcccgaggtgcagctggccatcgagcaggtgtttccaagccaggaccctctagatcgagcagatttcaatgctgttgagtatatcaataccctgttcccaaccgagcaatctctggcgaacatagacgaagtcgtgaacaaaattaggctgaaaataaggagactggatgacaatattcgaactgttgtaagaggtcagacgaacgtggggcaggatggacggcaagcgcttgaagaggctcagaaagctatccaacaactctttggcaaaatcaaagatatcaaagacaaagctgaaaaatcagagcaaatggtgaaagaaatcacccgtgatattaagcaattagatcacgccaaacgccacctgaccacctcaatcaccacactgaaccacctgcacatgctggcaggaggtgtcgactccctcgaagccatgaccaggcgaagacaatacggagaagttgctaatctccttcagggtgtgatgaatgtcctggagcacttccacaagtatatggggattccgcagatccggcagctttccgaaagagtgaaggctgcacagactgagttaggacagcaaatcctggcagattttgaagaagcgtttccttcccagggcaccaagagaccaggaggacccagcaatgttctacgagatgcatgtctggttgctaatattctagatcccaggatcaaacaggaaatcatcaaaaagtttattaaacagcatctgtcagagtatctggtactttttcaagaaaaccaagatgttgcctggctggacaaaatcgacagacgctatgcctggataaaacgccagcttgtggactatgaggagaaatacggccgcatgtttccacgtgagtggtgcatggctgagaggattgcggtggaattttgccatgtgacaagggcagaacttgccaagattatgcgtaccagagcgaaggaaattgaagtgaaattgcttctttttgctattcaaagaacaactaactttgaggggtttcttgcaaaacgcttctccggctgcaccctgaccgatgggaccctgaaaaagcttgagtctccacccccatctaccaatcccttcctggaagatgagccaacaccagagatggaggaactggcaacggagaaaggagatttagatcaaccaaagaagcctaaagccccagacaatccatttcatggcattgtttccaagtgttttgagcctcatctctacgtgtatatcgaatcccaagacaagaacctcggagagctgatagatcggtttgtggctgatttcaaagcccaggggccacctaagcccaacactgatgaagggggtgccgtgctccccagctgcgccgacctctttgtctactacaagaagtgcatggtgcaatgctctcagctcagtactggggagcccatgatcgccctgaccaccattttccagaagtacctccgagaatacgcctggaaaatcctctctggcaacctgcccaaaaccacaaccagcagtggaggactgactatcagcagcctcctcaaggaaaaggagggctcagaagtagccaagttcactctggaggagctctgcctcatctgtaacatcctgagcacggcagagtactgtctggccaccacccagcagctagaagaaaaactcaaagaaaaagtggatgtaagtctgattgaacgaatcaatctgactggagagatggacacgttcagcaccgtcatctccagcagtattcagctgctggttcaggatctggatgctgcctgtgatcctgccctgactgccatgagcaagatgcagtggcagaacgtggagcacgttggtgaccagagcccctacgtcacctctgtcattctgcacatcaagcagaacgtccccatcatccgtgacaacctggcttccacacgcaagtacttcactcagttctgcgttaaatttgcaaactgccttgcattgcccaacccatcacccgttcgggatcctcagagtgaccgcagc

SEQ ID NO: 431116 - DNA, 2205 bp, Homo sapiens
ttttttttgagacagagtctcgctctgtcacccaggctggagtgcagtggcgtgatctcggctcactgcaacctccgcctcccgggttcgagcaattctcctgcctcagcctcctgtaatcacagcactttgggaggctgaggcaggtggatcacctgaggtcaggaattcgagaccagcctgcccaacatggcgaaaccctgtctcaactaaaaataaaaaaaattagccgggtgtcatggcgagtgcctgtaatcccagctactggggaggctgaggcaggagaatcacttaaacccgggaggtggaggctgcagtgagccaagatttcaccactgcactccagcctgggtgacagagcaagaccccttctcaaaaagttttcaggatagaggaaatttccttaaaatccataaaacttgtaacagccgtacagtaggaataaggtttggaaatctgcctggaaacctgatttcctcatccccaccttgtttcccaacataaccactgctctgtgcccctgccctctctgccaggctttctccccgatgccgtccagctctgatcctgagtgtcatttcttcatcggcttccaggctgtccttgctagctggtttgactctcacgcatcaagcgtctcaaatttgagaatgcggaggagaaaagaagtgttgcgagaaggaggtgcggccttcagttgaggtctattaggaaaagattccaaataagacaagggcggggggcggcagtcgggagagcccccaggaagccctgtagatgcccccaccccagcccatggagttgctatggttaagcagcctgagccgtacagttgaaaaggggcggtggggcccatctccaaatagcacagccagttcagccgtctgtcctcaacccaggagagctgggaaagccagtggactcctgcacctggttcttgtcactcctggcgtttgtgtacagatcaccacttctctttttggttcattgttgaggagtcgttttccggacggctccatcacagcattgagctatcaagctgctgttttccacagttggtggtcacagccagggaagttgctgtcttgatttgttacattgtcagtaatccccaaggaaccaatggatgtcagtaggagtttctgttaaatgtctccttgatggggactcagtactgtgtaaagacgctgtgtttctcttctgggggtgtgcatcagaaccactggggccttttaaaatctacagatgccggccgggcgccgtggctcacgcctggaatcccagcacttggggaggctgaggcgggcggatcacaagcgcaggaaattgagaccatccttgccaatatggtgaaaccccatctctacaaaaaatacaaaaattaccggggtgtggtggcgtgcacacctcccagctacttgggaggctgaggcaggagaatcgcttgaacccgggaggcaaagattgcagtgagccgagatcacgccactgcactccagcctggcgacagagtgagactctatctcaaaacaaacaaaaaaacagatgcccggagattttgagtcagtaagtttggatggggcctggcatacaggtttaaaagttccataggtagttataacgtttacaccttgttaagaaccactgcaacagagagatttgctttatggaagggctcctgccacgcattttcatacatgtctatttttctgactctaagctaaaagtgcgccgacactacacttgagctggtgccaacgtggtgaagattctctactgataacagctttcattttaaacttgtgttgggtcaggcgcggtggctcacgcctgtaatcccagcactttgggaggccgaggtgggcggatcacatgaggtcacgagtttgagaccagcctggccaacatggcaaaatcccatctctactaaaaatacaaaaaaaaaaaaaaaaaaagcaggcaggtggcgggtgcctgtaatcccagctacttgggaggctgaggcaggggaatcagttgaatccgggaggcggaggttgcagtgagccgaggtcccgccactgcactccagcctgggagacagagtgagactcagttaaaaaaaaaagacttttggtggtggtggggaccatgcccaggattgggctctctccatactgatgaggattcttcttgttttgatgaccaacccccaagcagaagctt

SEQ ID NO: 431117 - DNA, 2014 bp, Homo sapiens
acctatgggacttttaaacctgtatgccaggccccatccaaacttactgactcaaaatctccgggcatctgtttttttgtttgtcttgagatagagtctcactctgtcgccaggctggagctgcagtgagccaagatttcaccactgcactccagcctgggtgacagagcaagaccccttctcaaaaagttttcaggatagaggaaatttccttaaaatccataaaacttgtaacagccgtacagtaggaataaggtttggaaatctgcctggaaacctgatttcctcatccccaccttgtttcccaacataaccactgctctgtgcccctgccctctctgccaggctttctccccgatgccgtccagctctgatcctgagtgtcatttcttcatcggcttccaggctgtccttgctagctggtttgactctcacgcatcaagcgtctcaaatttgagaatgcggaggagaaaagaagtgttgcgagaaggaggtgcggccttcagttgaggtctattaggaaaagattccaaataagacaagggcggggggcggcagtcgggagagcccccaggaagccctgtagatgcccccaccccagcccatggagttgctatggttaagcagcctgagccgtacagttgaaaaggggcggtggggcccatctccaaatagcacagccagttcagccgtctgtcctcaacccaggagagctgggaaagccagtggactcctgcacctggttcttgtcactcctggcgtttgtgtacagatcaccacttctctttttggttcattgttgaggagtcgttttccggacggctccatcacagcattgagctatcaagctgctgttttccacagttggtggtcacagccagggaagttgctgtcttgatttgttacattgtcagtaatccccaaggaaccaatggatgtcagtaggagtttctgttaaatgtctccttgatggggactcagtactgtgtaaagacgctgtgtttctcttctgggggtgtgcatcagaaccactggggccttttaaaatctacagatgccggccgggcgccgtggctcacgcctggaatcccagcacttggggaggctgaggcgggcggatcacaagcgcaggaaattgagaccatccttgccaatatggtgaaaccccatctctacaaaaaatacaaaaattaccggggtgtggtggcgtgcacacctcccagctacttgggaggctgaggcaggagaatcgcttgaacccgggaggcaaagattgcagtgagccgagatcacgccactgcactccagcctggcgacagagtgagactctatctcaaaacaaacaaaaaaacagatgcccggagattttgagtcagtaagtttggatggggcctggcatacaggtttaaaagttccataggtagttataacgtttacaccttgttaagaaccactgcaacagagagatttgctttatggaagggctcctgccacgcattttcatacatgtctatttttctgactctaagctaaaagtgcgccgacactacacttgagctggtgccaacgtggtgaagattctctactgataacagctttcattttaaacttgtgttgggtcaggcgcggtggctcacgcctgtaatcccagcactttgggaggccgaggtgggcggatcacatgaggtcacgagtttgagaccagcctggccaacatggcaaaatcccatctctactaaaaatacaaaaaaaaaaaaaaaaaaagcaggcaggtggcgggtgcctgtaatcccagctacttgggaggctgaggcaggggaatcagttgaatccgggaggcggaggttgcagtgagccgaggtcccgccactgcactccagcctgggagacagagtgagactcagttaaaaaaaaaagacttttggtggtggtggggaccatgcccaggattgggctctctccatactgatgaggattcttcttgttttgatgaccaacccccaagcagaagctt

SEQ ID NO: 431118 - DNA, 1842 bp, Homo sapiens
cagcactttgggaggccgagctagaagaaaaactcaaagaaaaagtggatgtaagtctgattgaacgaatcaatctgactggagagatggacacgttcagcaccgtcatctccagcagtattcagctgctggttcaggatctggatgctgcctgtgatcctgccctgactgccatgagcaagatgcagtggcagaacgtggagcacgttggtgaccagagcccctacgtcacctctgtcattctgcacatcaagcagaacgtccccatcatccgtgacaacctggcttccacacgcaagtacttcactcagttctgcgttaaatttgcaaactccttcattcccaaattcatcacccacctcttcaagtgcaagccaattagcatggtgggagcagaacagctgctgctggacacccactcgctgaagatggtcctgctcgatctcccctccatcagctcgcaggtggtgaggaaggcacccgccagctacaccaagatcgttgtcaaaggcatgacccgggctgagatgatcctcaaggtagtgatggcccctcatgaaccgttggtggtgtttgttgacaactacatcaaacttctcacagactgcaacacagaaacctttcagaagatactggacatgaaggggctgaagaggagtgagcagagcagcatgctggaactcctgcgccagcggctccccgcaccgccctcgggggcagaaagctccggctcactgtccctgacggcgccaacaccagagcaagagtcgtcacgcatccgcaagctcgagaaactcattaaaaagagactgtagcagcagcaaggggccctttgctcctggctggagaccctcagcgcccgttccccagaagcccccaacctctcctgtgctccccggcacttcacgcctggaatcccagcacttggggaggctgaggcgggcggatcacaagcgcaggaaattgagaccatccttgccaatatggtgaaaccccatctctacaaaaaatacaaaaattaccggggtgtggtggcgtgcacacctcccagctacttgggaggctgaggcaggagaatcgcttgaacccgggaggcaaagattgcagtgagccgagatcacgccactgcactccagcctggcgacagagtgagactctatctcaaaacaaacaaaaaaacagatgcccggagattttgagtcagtaagtttggatggggcctggcatacaggtttaaaagttccataggtagttataacgtttacaccttgttaagaaccactgcaacagagagatttgctttatggaagggctcctgccacgcattttcatacatgtctatttttctgactctaagctaaaagtgcgccgacactacacttgagctggtgccaacgtggtgaagattctctactgataacagctttcattttaaacttgtgttgggtcaggcgcggtggctcacgcctgtaatcccagcactttgggaggccgaggtgggcggatcacatgaggtcacgagtttgagaccagcctggccaacatggcaaaatcccatctctactaaaaatacaaaaaaaaaaaaaaaaaaagcaggcaggtggcgggtgcctgtaatcccagctacttgggaggctgaggcaggggaatcagttgaatccgggaggcggaggttgcagtgagccgaggtcccgccactgcactccagcctgggagacagagtgagactcagttaaaaaaaaaagacttttggtggtggtggggaccatgcccaggattgggctctctccatactgatgaggattcttcttgttttgatgaccaacccccaagcagaagctt

SEQ ID NO: 431119 - DNA, 1479 bp, Homo sapiens
aggacggggcagtggaatccgtggatcatcctcataacatggtctgtagattccaccagacgcgagcccatggagttgctatggttaagcagcctgagccgtacagttgaaaaggggcggtggggcccatctccaaatagcacagccagttcagccgtctgtcctcaacccaggagagctgggaaagccagtggactcctgcacctggttcttgtcactcctggcgtttgtgtacagatcaccacttctctttttggttcattgttgaggagtcgttttccggacggctccatcacagcattgagctatcaagctgctgttttccacagttggtggtcacagccagggaagttgctgtcttgatttgttacattgtcagtaatccccaaggaaccaatggatgtcagtaggagtttctgttaaatgtctccttgatggggactcagtactgtgtaaagacgctgtgtttctcttctgggggtgtgcatcagaaccactggggccttttaaaatctacagatgccggccgggcgccgtggctcacgcctggaatcccagcacttggggaggctgaggcgggcggatcacaagcgcaggaaattgagaccatccttgccaatatggtgaaaccccatctctacaaaaaatacaaaaattaccggggtgtggtggcgtgcacacctcccagctacttgggaggctgaggcaggagaatcgcttgaacccgggaggcaaagattgcagtgagccgagatcacgccactgcactccagcctggcgacagagtgagactctatctcaaaacaaacaaaaaaacagatgcccggagattttgagtcagtaagtttggatggggcctggcatacaggtttaaaagttccataggtagttataacgtttacaccttgttaagaaccactgcaacagagagatttgctttatggaagggctcctgccacgcattttcatacatgtctatttttctgactctaagctaaaagtgcgccgacactacacttgagctggtgccaacgtggtgaagattctctactgataacagctttcattttaaacttgtgttgggtcaggcgcggtggctcacgcctgtaatcccagcactttgggaggccgaggtgggcggatcacatgaggtcacgagtttgagaccagcctggccaacatggcaaaatcccatctctactaaaaatacaaaaaaaaaaaaaaaaaaagcaggcaggtggcgggtgcctgtaatcccagctacttgggaggctgaggcaggggaatcagttgaatccgggaggcggaggttgcagtgagccgaggtcccgccactgcactccagcctgggagacagagtgagactcagttaaaaaaaaaagacttttggtggtggtggggaccatgcccaggattgggctctctccatactgatgaggattcttcttgttttgatgaccaacccccaagcagaagctt

SEQ ID NO: 431120 - DNA, 1633 bp, Homo sapiens
tccccccctcgaaacccagtcccccggaaacccatacttcaaacagcagcgcaggtgtatttaggattcagcaaatttaggacattgctgtagtggcatgtgaagatgagatgggccactggggcgtttctagtctgggttgctgctgcttaaggaaacctctcagaatccatttagcgctcggcgggcaagtgaggagtgagttttcctgaagggcccgctcccgtctcctcctgcggtgggtagtgagttttcttgagggcccgctcctgtctcctcccgtggtggtagttttcctgaggggcttgctcctgtctcctcccgctgtaggtagtgatggcccctcatgaaccgttggtggtgtttgttgacaactacatcaaacttctcacagactgcaacacagaaacctttcagaagatactggacatgaaggggctgaagaggagtgagcagagcagcatgctggaactcctgcgccagcggctccccgcaccgccctcgggggcagaaagctccggctcactgtccctgacggcgccaacaccagagcaagagtcgtcacgcatccgcaagctcgagaaactcattaaaaagagactgtagcagcagcaaggggccctttgctcctggctggagaccctcagcgcccgttccccagaagcccccaacctctcctgtgctccccggcacttcacgcctggaatcccagcacttggggaggctgaggcgggcggatcacaagcgcaggaaattgagaccatccttgccaatatggtgaaaccccatctctacaaaaaatacaaaaattaccggggtgtggtggcgtgcacacctcccagctacttgggaggctgaggcaggagaatcgcttgaacccgggaggcaaagattgcagtgagccgagatcacgccactgcactccagcctggcgacagagtgagactctatctcaaaacaaacaaaaaaacagatgcccggagattttgagtcagtaagtttggatggggcctggcatacaggtttaaaagttccataggtagttataacgtttacaccttgttaagaaccactgcaacagagagatttgctttatggaagggctcctgccacgcattttcatacatgtctatttttctgactctaagctaaaagtgcgccgacactacacttgagctggtgccaacgtggtgaagattctctactgataacagctttcattttaaacttgtgttgggtcaggcgcggtggctcacgcctgtaatcccagcactttgggaggccgaggtgggcggatcacatgaggtcacgagtttgagaccagcctggccaacatggcaaaatcccatctctactaaaaatacaaaaaaaaaaaaaaaaaaagcaggcaggtggcgggtgcctgtaatcccagctacttgggaggctgaggcaggggaatcagttgaatccgggaggcggaggttgcagtgagccgaggtcccgccactgcactccagcctgggagacagagtgagactcagttaaaaaaaaaagacttttggtggtggtggggaccatgcccaggattgggctctctccatactgatgaggattcttcttgttttgatgaccaacccccaagcagaagctt

SEQ ID NO: 431121 - DNA, 726 bp, Homo sapiens
cccacatctctgctcctgaagagccccgcctccaggacacacacaagcttcattagccactgtggtggggccaggagagttctgctctgcctcattcagcatctcctgagcttgtcagctgagtttttggtttgactgtcatctggtacagtgatgatgagagaggctgaacaatccccgggaagccagcagcaccctcggctaggagaggcctccatgcagtgtaagctgatcactttaggtctggaagccattggggaggcctggaaatgtcaaggtggccagtggcatatttgaagagttacttttcagagcacactaacactttaatttcctttggatttttctgtccaagtctaaatttcctctcccttcatcctacagaatggtgtttttggttaactgccatgttatgacaagggaggttagagcaataaatcagaacgtttcccttctagattagtgatccctgtttttaattgtctacacttggctgctggaggattattttacggtattgttttgctccagacaccaccaaaagggaggctggctgggaggaccagctctgagaaacctgtaaccatgtactttgcagctagccctgcattcattctttcccagcaccacaagggcaggagccaagagagcagagcttccaggagcagttctgaaatgatgcaatcaaatgtgtctggtcccttgattaaatgattgtaatagaat

SEQ ID NO: 431122 - DNA, 2958 bp, Homo sapiens
agcggctgacagagcggctgacggagccgggctcaccaggtcgctgccgcgagggagttgctgtgctggggcctgggtggcggctggaggcctgagttgggctcgcggcgggggtcggcagggggccgggtggcggaatgatggaggaggaggaactggagttcgtggaggagctggaagccgtgctgcagctcacgcccgaggtgcagctggccatcgagcaggtgtttccaagccaggaccctctagatcgagcagatttcaatgctgttgagtatatcaataccctgttcccaaccgagcaatctctggcgaacatagacgaagtcgtgaacaaaattaggctgaaaataaggagactggatgacaatattcgaactgttgtaagaggtcagacgaacgtggggcaggatggacggcaagtgaaagaaatcacccgtgatattaagcaattagatcacgccaaacgccacctgaccacctcaatcaccacactgaaccacctgcacatgctggcaggaggtgtcgactccctcgaagccatgaccaggcgaagacaatacggagaagttgctaatctccttcagggtgtgatgaatgtcctggagcacttccacaagtatatggggattccgcagatccggcagctttccgaaagagtgaaggctgcacagactgagttaggacagcaaatcctggcagattttgaagaagcgtttccttcccagggcaccaagagaccaggaggacccagcaatgttctacgagatgcatgtctggttgctaatattctagatcccaggatcaaacaggaaatcatcaaaaagtttattaaacagcatctgtcagagtatctggtactttttcaagaaaaccaagatgttgcctggctggacaaaatcgacagacgctatgcctggataaaacgccagcttgtggactatgaggagaaatacggccgcatgtttccacgtgagtggtgcatggctgagaggattgcggtggaattttgccatgtgacaagggcagaacttgccaagattatgcgtaccagagcgaaggaaattgaagtgaaattgcttctttttgctattcaaagaacaactaactttgaggggtttcttgcaaaacgcttctccggctgcaccctgaccgatgggaccctgaaaaagcttgagtctccacccccatctaccaatcccttcctggaagatgagccaacaccagagatggaggaactggcaacggagaaaggagatttagatcaaccaaagaagcctaaagccccagacaatccatttcatggcattgtttccaagtgttttgagcctcatctctacgtgtatatcgaatcccaagacaagaacctcggagagctgatagatcggtttgtggctgatttcaaagcccaggggccacctaagcccaacactgatgaagggggtgccgtgctccccagctgcgccgacctctttgtctactacaagaagtgcatggtgcaatgctctcagctcagtactggggagcccatgatcgccctgaccaccattttccagaagtacctccgagaatacgcctggaaaatcctctctggcaacctgcccaaaaccacaaccagcagtggaggactgactatcagcagcctcctcaaggaaaaggagggctcagaagtagccaagttcactctggaggagctctgcctcatctgtaacatcctgagcacggcagagtactgtctggccaccacccagcagctagaagaaaaactcaaagaaaaagtggatgtaagtctgattgaacgaatcaatctgactggagagatggacacgttcagcaccgtcatctccagcagtattcagctgctggttcaggatctggatgctgcctgtgatcctgccctgactgccatgagcaagatgcagtggcagaacgtggagcacgttggtgaccagagcccctacgtcacctctgtcattctgcacatcaagcagaacgtccccatcatccgtgacaacctggcttccacacgcaagtacttcactcagttctgcgttaaatttgcaaactccttcattcccaaattcatcacccacctcttcaagtgcaagccaattagcatggtgggagcagaacaggtgagatggacgtagtatcaggcatttgcctggcagcttttgttgtagatcaagcacatattcttctagtccagatctacttggcaggaataaaattgatgatgtcccctgtttggggacagtataatgactcacccggaaggtttcttaattcgttcttccatttatttttaaaaattttgtttgaacgcctactaagttctgggtgcagggtataacacagcaagcaccatggaaaggtccctgctcctagtgctcacactccaataagaagaagtggctgggccgggcacagcggctcacgctgtaaccccagcatttcgggaggcctgggcaggcagatcacctggggtaaggaatttgagagcagcctggccaacatggtgaaatcccatctctactaaaaatacaaaaattagctgggcatgggggcaggctaccggggaggctgaggcaggagaatcacttgaacccgggaggtggaggttgcagtgagccgatatcacaccactgcactccagcctgggtgacaaagtgagactccatctcaaaaaaacaaacaaacaaaaaaactagcaaaaaacttggaatattggccgggcatggtggctcacgtctgtaatcctagcactttgggaggcccaggcaggcggatcatctgaggtcaggagttcgagaccagcctggctaacatggtgaaccctgtctctactaataatacaaaaaattagccgggcgtgatggtgggcgcctgtaatcccagctactcgggaggctgaggcagaattgcttcaacccaggaggtggaggttgcagtgagctg

SEQ ID NO: 431123 - DNA, 3663 bp, Homo sapiens
agcggctgacagagcggctgacggagccgggctcaccaggtcgctgccgcgagggagttgctgtgctggggcctgggtggcggctggaggcctgagttgggctcgcggcgggggtcggcagggggccgggtggcggaatgatggaggaggaggaactggagttcgtggaggagctggaagccgtgctgcagctcacgcccgaggtgcagctggccatcgagcaggtgtttccaagccaggaccctctagatcgagcagatttcaatgctgttgagtatatcaataccctgttcccaaccgagcaatctctggcgaacatagacgaagtcgtgaacaaaattaggctgaaaataaggagactggatgacaatattcgaactgttgtaagaggtcagacgaacgtggggcaggatggacggcaagcgcttgaagaggctcagaaagctatccaacaactctttggcaaaatcaaagatatcaaagacaaagctgaaaaatcagagcaaatggtgaaagaaatcacccgtgatattaagcaattagatcacgccaaacgccacctgaccacctcaatcaccacactgaaccacctgcacatgctggcaggaggtgtcgactccctcgaagccatgaccaggcgaagacaatacggagaagttgctaatctccttcagggtgtgatgaatgtcctggagcacttccacaagtatatggggattccgcagatccggcagctttccgaaagagtgaaggctgcacagactgagttaggacagcaaatcctggcagattttgaagaagcgtttccttcccagggcaccaagagaccaggaggacccagcaatgttctacgagatgcatgtctggttgctaatattctagatcccaggatcaaacaggaaatcatcaaaaagtttattaaacagcatctgtcagagtatctggtactttttcaagaaaaccaagatgttgcctggctggacaaaatcgacagacgctatgcctggataaaacgccagcttgtggactatgaggagaaatacggccgcatgtttccacgtgagtggtgcatggctgagaggattgcggtggaattttgccatgtgacaagggcagaacttgccaagattatgcgtaccagagcgaaggaaattgaagtgaaattgcttctttttgctattcaaagaacaactaactttgaggggtttcttgcaaaacgcttctccggctgcaccctgaccgatgggaccctgaaaaagcttgagtctccacccccatctaccaatcccttcctggaagatgagccaacaccagagatggaggaactggcaacggagaaaggagatttagatcaaccaaagaagcctaaagccccagacaatccatttcatggcattgtttccaagtgttttgagcctcatctctacgtgtatatcgaatcccaagacaagaacctcggagagctgatagatcggtttgtggctgatttcaaagcccaggggccacctaagcccaacactgatgaagggggtgccgtgctccccagctgcgccgacctctttgtctactacaagaagtgcatggtgcaatgctctcagctcagtactggggagcccatgatcgccctgaccaccattttccagaagtacctccgagaatacgcctggaaaatcctctctggcaacctgcccaaaaccacaaccagcagtggaggactgactatcagcagcctcctcaaggaaaaggagggctcagaagtagccaagttcactctggaggagctctgcctcatctgtaacatcctgagcacggcagagtactgtctggccaccacccagcagctagaagaaaaactcaaagaaaaagtggatgtaagtctgattgaacgaatcaatctgactggagagatggacacgttcagcaccgtcatctccagcagtattcagctgctggttcaggatctggatgctgcctgtgatcctgccctgactgccatgagcaagatgcagtggcagaacgtggagcacgttggtgaccagagcccctacgtcacctctgtcattctgcacatcaagcagaacgtccccatcatccgtgacaacctggcttccacacgcaagtacttcactcagttctgcgttaaatttgcaaactccttcattcccaaattcatcacccacctcttcaagtgcaagccaattagcatggtgggagcagaacagctgctgctggacacccactcgctgaagatggtcctgctcgatctcccctccatcagctcgcaggtggtgaggaaggcacccgccagctacaccaagatcgttgtcaaaggcatgacccgggctgagatgatcctcaaggtagtgatggcccctcatgaaccgttggtggtgtttgttgacaactacatcaaacttctcacagactgcaacacagaaacctttcagaagatactggacatgaaggggctgaagaggagtgagcagagcagcatgctggaactcctgcgccagcggctccccgcaccgccctcgggggcagaaagctccggctcactgtccctgacggcgccaacaccagagcaagagtcgtcacgcatccgcaagctcgagaaactcattaaaaagagactgtagcagcagcaaggggccctttgctcctggctggagaccctcagcgcccgttccccagaagcccccaacctctcctgtgctccccggcacttcacgcctggaatcccagcacttggggaggctgaggcgggcggatcacaagcgcaggaaattgagaccatccttgccaatatggtgaaaccccatctctacaaaaaatacaaaaattaccggggtgtggtggcgtgcacacctcccagctacttgggaggctgaggcaggagaatcgcttgaacccgggaggcaaagattgcagtgagccgagatcacgccactgcactccagcctggcgacagagtgagactctatctcaaaacaaacaaaaaaacagatgcccggagattttgagtcagtaagtttggatggggcctggcatacaggtttaaaagttccataggtagttataacgtttacaccttgttaagaaccactgcaacagagagatttgctttatggaagggctcctgccacgcattttcatacatgtctatttttctgactctaagctaaaagtgcgccgacactacacttgagctggtgccaacgtggtgaagattctctactgataacagctttcattttaaacttgtgttgggtcaggcgcggtggctcacgcctgtaatcccagcactttgggaggccgaggtgggcggatcacatgaggtcacgagtttgagaccagcctggccaacatggcaaaatcccatctctactaaaaatacaaaaaaaaaaaaaaaaaaagcaggcaggtggcgggtgcctgtaatcccagctacttgggaggctgaggcaggggaatcagttgaatccgggaggcggaggttgcagtgagccgaggtcccgccactgcactccagcctgggagacagagtgagactcagttaaaaaaaaaagacttttggtggtggtggggaccatgcccaggattgggctctctccatactgatgaggattcttcttgttttgatgaccaacccccaagcagaagctt

SEQ ID NO: 431124 - DNA, 3141 bp, Homo sapiens
agcggctgacagagcggctgacggagccgggctcaccaggtcgctgccgcgagggagttgctgtgctggggcctgggtggcggctggaggcctgagttgggctcgcggcgggggtcggcagggggccgggtggcggaatgatggaggaggaggaactggagttcgtggaggagctggaagccgtgctgcagctcacgcccgaggtgcagctggccatcgagcaggtgtttccaagccaggaccctctagatcgagcagatttcaatgctgttgagtatatcaataccctgttcccaaccgagcaatctctggcgaacatagacgaagtcgtgaacaaaattaggctgaaaataaggagactggatgacaatattcgaactgttgtaagaggtcagacgaacgtggggcaggatggacggcaagcgcttgaagaggctcagaaagctatccaacaactctttggcaaaatcaaagatatcaaagacaaagctgaaaaatcagagcaaatggtgaaagaaatcacccgtgatattaagcaattagatcacgccaaacgccacctgaccacctcaatcaccacactgaaccacctgcacatgctggcaggaggtgtcgactccctcgaagccatgaccaggcgaagacaatacggagaagttgctaatctccttcagggtgtgatgaatgtcctggagcacttccacaagtatatggggattccgcagatccggcagctttccgaaagagtgaaggctgcacagactgagttaggacagcaaatcctggcagattttgaagaagcgtttccttcccagggcaccaagagaccaggaggacccagcaatgttctacgagatgcatgtctggttgctaatattctagatcccaggatcaaacaggaaatcatcaaaaagtttattaaacagcatctgtcagagtatctggtactttttcaagaaaaccaagatgttgcctggctggacaaaatcgacagacgctatgcctggataaaacgccagcttgtggactatgaggagaaatacggccgcatgtttccacgtgagtggtgcatggctgagaggattgcggtggaattttgccatgtgacaagggcagaacttgccaagattatgcgtaccagagcgaaggaaattgaagtgaaattgcttctttttgctattcaaagaacaactaactttgaggggtttcttgcaaaacgcttctccggctgcaccctgaccgatgggaccctgaaaaagcttgagtctccacccccatctaccaatcccttcctggaagatgagccaacaccagagatggaggaactggcaacggagaaaggagatttagatcaaccaaagaagcctaaagccccagacaatccatttcatggcattgtttccaagtgttttgagcctcatctctacgtgtatatcgaatcccaagacaagaacctcggagagctgatagatcggtttgtggctgatttcaaagcccaggggccacctaagcccaacactgatgaagggggtgccgtgctccccagctgcgccgacctctttgtctactacaagaagtgcatggtgcaatgctctcagctcagtactggggagcccatgatcgccctgaccaccattttccagaagtacctccgagaatacgcctggaaaatcctctctggcaacctgcccaaaaccacaaccagcagtggaggactgactatcagcagcctcctcaaggaaaaggagggctcagaagtagccaagttcactctggaggagctctgcctcatctgtaacatcctgagcacggcagagtactgtctggccaccacccagcagctagaagaaaaactcaaagaaaaagtggatgtaagtctgattgaacgaatcaatctgactggagagatggacacgttcagcaccgtcatctccagcagtattcagctgctggttcaggatctggatgctgcctgtgatcctgccctgactgccatgagcaagatgcagtggcagaacgtggagcacgttggtgaccagagcccctacgtcacctctgtcattctgcacatcaagcagaacgtccccatcatccgtgacaacctggcttccacacgcaagtacttcactcagttctgcgttaaatttgcaaactccttcattcccaaattcatcacccacctcttcaagtgcaagccaattagcatggtgggagcagaacagctgctgctggacacccactcgctgaagatggtcctgctcgatctcccctccatcagctcgcaggtggtgaggaaggcacccgccagctacaccaagatcgttgtcaaaggcatgacccgggctgagatgatcctcaaggtagtgatggcccctcatgaaccgttggtggtgtttgttgacaactacatcaaacttctcacagatgcactccagcctggcgacagagtgagactctatctcaaaacaaacaaaaaaacagatgcccggagattttgagtcagtaagtttggatggggcctggcatacaggtttaaaagttccataggtagttataacgtttacaccttgttaagaaccactgcaacagagagatttgctttatggaagggctcctgccacgcattttcatacatgtctatttttctgactctaagctaaaagtgcgccgacactacacttgagctggtgccaacgtggtgaagattctctactgataacagctttcattttaaacttgtgttgggtcaggcgcggtggctcacgcctgtaatcccagcactttgggaggccgaggtgggcggatcacatgaggtcacgagtttgagaccagcctggccaacatggcaaaatcccatctctactaaaaatacaaaaaaaaaaaaaaaaaaagcaggcaggtggcgggtgcctgtaatcccagctacttgggaggctgaggcaggggaatcagttgaatccgggaggcggaggttgcagtgagccgaggtcccgccactgcactccagcctgggagacagagtgagactcagttaaaaaaaaaagacttttggtggtggtggggaccatgcccaggattgggctctctccatactgatgaggattcttcttgttttgatgaccaacccccaagcagaagctt

SEQ ID NO: 431125 - DNA, 2228 bp, Homo sapiens
agcggctgacagagcggctgacggagccgggctcaccaggtcgctgccgcgagggagttgctgtgctggggcctgggtggcggctggaggcctgagttgggctcgcggcgggggtcggcagggggccgggtggcggaatgatggaggaggaggaactggagttcgtggaggagctggaagccgtgctgcagctcacgcccgaggtgcagctggccatcgagcaggtgtttccaagccaggaccctctagatcgagcagatttcaatgctgttgagtatatcaataccctgttcccaaccgagcaatctctggcgaacatagacgaagtcgtgaacaaaattaggctgaaaataaggagactggatgacaatattcgaactgttgtaagaggtcagacgaacgtggggcaggatggacggcaagcgcttgaagaggctcagaaagctatccaacaactctttggcaaaatcaaagatatcaaagacaaagctgaaaaatcagagcaaatggtgaaagaaatcacccgtgatattaagcaattagatcacgccaaacgccacctgaccacctcaatcaccacactgaaccacctgcacatgctggcaggaggtgtcgactccctcgaagccatgaccaggcgaagacaatacggagaagttgctaatctccttcagggtgtgatgaatgtcctggagcacttccacaagtatatggggattccgcagatccggcagctttccgaaagagtgaaggctgcacagactgagttaggacagcaaatcctggcagattttgaagaagcgtttccttcccagggcaccaagagaccaggaggacccagcaatgttctacgagatgcatgtctggttgctaatattctagatcccaggatcaaacaggaaatcatcaaaaagtttattaaacagcatctgtcagagtatctggtactttttcaagaaaaccaagatgttgcctggctggacaaaatcgacagacgctatgcctggataaaacgccagcttgtggactatgaggagaaatacggccgcatgtttccacgtgagtggtgcatggctgagaggattgcggtggaattttgccatgtgacaagggcagaacttgccaagattatgcgtaccagagcgaaggaaattgaagtgaaattgcttctttttgctattcaaagaacaactaactttgaggggtttcttgcaaaacgcttctccggctgcaccctgaccgatgggaccctgaaaaagcttgagtctccacccccatctaccaatcccttcctggaagatgagccaacaccagagatggaggaactggcaacggagaaaggagatttagatcaaccaaagaagcctaaagccccagacaatccatttcatggcattgtttccaagtgttttgagcctcatctctacgtgtatatcgaatcccaagacaagaacctcggagagctgatagatcggtttgtggctgatttcaaagcccaggggccacctaagcccaacactgatgaagggggtgccgtgctccccagctgcgccgacctctttgtctactacaagaagtgcatggtgcaatgctctcagctcagtactggggagcccatgatcgccctgaccaccattttccagaagtacctccgagaatacgcctggaaaatcctctctggcaacctgcccaaaaccacaaccagcagtggaggactgactatcagcagcctcctcaaggaaaaggagggctcagaagtagccaagttcactctggaggagctctgcctcatctgtaacatcctgagcacggcagagtactgtctggccaccacccagcagctagaagaaaaactcaaagaaaaagtggatgtaagtctgattgaacgaatcaatctgactggagagatggacacgttcagcaccgtcatctccagcagtattcagctgctggttcaggatctggatgctgcctgtgatcctgccctgactgccatgagcaagatgcagtggcagaacgtggagcacgttggtgaccagagcccctacgtcacctctgtcattctgcacatcaagcagaacgtccccatcatccgtgacaacctggcttccacacgcaagtacttcactcagttctgcgttaaatttgcaaactccttcattcccaaattcatcacccacccccaccctctccttgagtttctgtgaattaaaatatttgcaaatcca

SEQ ID NO: 431126 - DNA, 1814 bp, Homo sapiens
cgttgtctgcttggtgaccatgtggttccattctcctaagccatctcaacaggccagagtacacccttctgtcttcagccatttctctgctccctggttgccaagagcagcggcggcagcagagcagggcagtcagcaggagtcagtgtgagctcgtcaccaaaaccacccagggacatttacctgggcaaccggaaatggaattccagcttcccttccaccttttgtctaaccccgttacctgggcaaccggaaatggaattccagcttccagtccaccttttctctaaccccgttacctggcaaccggaaatgaattccagcttcccgtccaacttttgtctaaccccgtccgttgcatgagatgagtttgctgctgctggacacccactcgctgaagatggtcctgctcgatctcccctccatcagctcgcaggtggtgaggaaggcacccgccagctacaccaagatcgttgtcaaaggcatgacccgggctgagatgatcctcaaggtagtgatggcccctcatgaaccgttggtggtgtttgttgacaactacatcaaacttctcacagactgcaacacagaaacctttcagaagatactggacatgaaggggctgaagaggagtgagcagagcagcatgctggaactcctgcgccagcggctccccgcaccgccctcgggggcagaaagctccggctcactgtccctgacggcgccaacaccagagcaagagtcgtcacgcatccgcaagctcgagaaactcattaaaaagagactgtagcagcagcaaggggccctttgctcctggctggagaccctcagcgcccgttccccagaagcccccaacctctcctgtgctccccggcacttcacgcctggaatcccagcacttggggaggctgaggcgggcggatcacaagcgcaggaaattgagaccatccttgccaatatggtgaaaccccatctctacaaaaaatacaaaaattaccggggtgtggtggcgtgcacacctcccagctacttgggaggctgaggcaggagaatcgcttgaacccgggaggcaaagattgcagtgagccgagatcacgccactgcactccagcctggcgacagagtgagactctatctcaaaacaaacaaaaaaacagatgcccggagattttgagtcagtaagtttggatggggcctggcatacaggtttaaaagttccataggtagttataacgtttacaccttgttaagaaccactgcaacagagagatttgctttatggaagggctcctgccacgcattttcatacatgtctatttttctgactctaagctaaaagtgcgccgacactacacttgagctggtgccaacgtggtgaagattctctactgataacagctttcattttaaacttgtgttgggtcaggcgcggtggctcacgcctgtaatcccagcactttgggaggccgaggtgggcggatcacatgaggtcacgagtttgagaccagcctggccaacatggcaaaatcccatctctactaaaaatacaaaaaaaaaaaaaaaaaaagcaggcaggtggcgggtgcctgtaatcccagctacttgggaggctgaggcaggggaatcagttgaatccgggaggcggaggttgcagtgagccgaggtcccgccactgcactccagcctgggagacagagtgagactcagttaaaaaaaaaagacttttggtggtggtggggaccatgcccaggattgggctctctccatactgatgaggattcttcttgttttgatgaccaacccccaagcagaagctt

SEQ ID NO: 431127 - DNA, 1453 bp, Homo sapiens
agcggctgacagagcggctgacggagccgggctcaccaggtcgctgccgcgagggagttgctgtgctggggcctgggtggcggctggaggcctgagttgggctcgcggcgggggtcggcagggggccgggtggcggaatgatggaggaggaggaactggagttcgtggaggagctggaagccgtgctgcagctcacgcccgaggtgcagctggccatcgagcaggtgtttccaagccaggaccctctagatcgagcagatttcaatgctgttgagtatatcaataccctgttcccaaccgagcaatctctggcgaacatagacgaagtcgtgaacaaaattaggctgaaaataaggagactggatgacaatattcgaactgttgtaagaggtcagacgaacgtggggcaggatggacggcaagcgcttgaagaggctcagaaagctatccaacaactctttggcaaaatcaaagatatcaaagacaaagctgaaaaatcagagcaaatggtgaaagaaatcacccgtgatattaagcaattagatcacgccaaacgccacctgaccacctcaatcaccacactgaaccacctgcacatgctggcaggaggtgtcgactccctcgaagccatgaccaggcgaagacaatacggagaagttgctaatctccttcagggtgtgatgaatgtcctggagcacttccacaagtatatggggattccgcagatccggcagctttccgaaagagtgaaggctgcacagactgagttaggacagcaaatcctggcagattttgaagaagcgtttccttcccagggcaccaagagaccaggaggacccagcaatgttctacgagatgcatgtctggttgctaatattctagatcccaggatcaaacaggaaatcatcaaaaagtttattaaacagcatctgtcagagtatctggtactttttcaagaaaaccaagatgttgcctggctggacaaaatcgacagacgctatgcctggataaaacgccagcttgtggactatgaggagaaatacggccgcatgtttccacgtgagtggtgcatggctgagaggattgcggtggaattttgccatgtgacaagggcagaacttgccaagattatgcgtaccagagcgaaggaaattgaagtgaaattgcttctttttgctattcaaagaacaactaactttgaggggtttcttgcaaaacgcttctccggctgcaccctgaccgatgggaccctggtaagaccttccctagggagctgccacgtgaaatcagtgggttgggtggttgggattcagggtttcactgtatggtgactctatccaggggatccggagttaagaccctcgttgaagggatatctaaaaaaatgatgtactgcgtaagagacaaacaataaatccacacagagtgttctgtatcatcactttcccagcag

SEQ ID NO: 431128 - DNA, 2228 bp, Homo sapiens
atgtcactgcgtccgcacgcgccccgcccctgagcagtccttgctgccccgcccccgctcggctcgccgccagggacgctagtgggtccagtctccttggcaaccacttgctcctccccctccgcccctttaacctttagggtgcgcgggtgcagtatatctcgcgctctctcccctttccccctcccctttccccaccccgggcgctcaggttggtctggaccggaagcgaagatggcgacttctggcgcggcctcggcggagctggtgatcggctggtgcatattcggcctcttactactggctattttggcattctgctggatatatgttcgtaaataccaaagtcggcgggaaagtgaagttgtctccaccataacagcaattttttctctagcaattgcacttatcacatcagcacttctaccagtggatatatttttggtttcttacatgaaaaatcaaaatggtacatttaaggactgggctaatgctaatgtcagcagacagattgaggacactgtattatacggttactatactttatattctgttatattgttctgtgtgttcttctggatcccttttgtctacttctattatgaagaaaaggatgatgatgatactagtaaatgtactcaaattaaaacggcactcaagtatactttgggatttgttgtgatttgtgcactgcttcttttagttggtgcctttgttccattgaatgttcccaataacaaaaattctacagagtgggaaaaagtgaagtccctatttgaagaacttggaagtagtcatggtttagctgcattgtcattttctatcagttctctgaccttgattggaatgttggcagctataacttacacagcctatggcatgtctgcgttacctttaaatctgataaaaggcactagaagcgctgcttatgaacgtttggaaaacactgaagacattgaagaagtagaacaacacattcaaacgattaaatcaaaaagcaaagatggtcgacctttgccagcaagggataaacgcgccttaaaacaatttgaagaaaggttacgaacacttaagaagagagagaggcatttagaattcattgaaaacagctggtggacaaaattttgtggcgctctgcgtcccctgaagatcgtctggggaatatttttcatcttagttgcattgctgtttgtaatttctctcttcttgtcaaatttagataaagctcttcattcagctggaatagattctggtttcataatttttggagctaacctgagtaatccactgaatatgcttttgcctttactacaaacagttttccctcttgattatattcttataacaattattattatgtactttatttttacttcaatggcaggaattcgaaatattggcatatggttcttttggattagattatataaaatcagaagaggtagaaccaggccccaagcactcctttttctctgcatgatacttctgcttattgtccttcacactagctacatgatttatagtcttgctccccaatatgttatgtatggaagccaaaattacttaatagagactaatataacttctgataatcataaaggcaattcaaccctttctgtgccaaagagatgtgatgcagatgctcctgaagatcagtgtactgttacccggacatacctattccttcacaagttctggttcttcagtgctgcttactattttggtaactgggcctttcttggggtatttttgattggattaattgtatcctgttgtaaagggaagaaatcggttattgaaggagtagatgaagattcagacataagtgatgatgagccctctgtctattctgcttgacagccttctgtcttaaaggttttataatgctgactgaatatctgttatgcatttttaaagtattaaactaacattaggatttgctaactagctttcatcaaaaatgggagcatggctataagacaactatattttattatatgttttctgaagtaacattgtatcatagattaacattttaaattaccataatcatgctatgtaaatataagactactggctttgtgagggaatgtttgtgcaaaattttttcctctaatgtataatagtgttaaattgattaaaaatcttccagaattaatattcccttttgtcactttttgaaaacataataaatcatttgtatctgtgccttaggttctccagagtga

SEQ ID NO: 431129 - DNA, 2144 bp, Homo sapiens
  misc_feature (2131)..(2131): n is a, c, g, or t
gtactgcattcatgaagtaggctttgaaaattatacatcttggacaagtttttaagggatagtgggctttccttacacaactaaaataacctttccttcacataagttttcctgctagaaactttcaaacacatacaaaaatcagagaaaatacactgggtagtaacaaacatctctttttgttctatttctggctattttggcattctgctggatatatgttcgtaaataccaaagtcggcgggaaagtgaagttgtctccaccataacagcaattttttctctagcaattgcacttatcacatcagcacttctaccagtggatatatttttggtttcttacatgaaaaatcaaaatggtacatttaaggactgggctaatgctaatgtcagcagacagattgaggacactgtattatacggttactatactttatattctgttatattgttctgtgtgttcttctggatcccttttgtctacttctattatgaagaaaaggatgatgatgatactagtaaatgtactcaaattaaaacggcactcaagtatactttgggatttgttgtgatttgtgcactgcttcttttagttggtgcctttgttccattgaatgttcccaataacaaaaattctacagagtgggaaaaagtgaagtccctatttgaagaacttggaagtagtcatggtttagctgcattgtcattttctatcagttctctgaccttgattggaatgttggcagctataacttacacagcctatggcatgtctgcgttacctttaaatctgataaaaggcactagaagcgctgcttatgaacgtttggaaaacactgaagacattgaagaagtagaacaacacattcaaacgattaaatcaaaaagcaaagatggtcgacctttgccagcaagggataaacgcgccttaaaacaatttgaagaaaggttacgaacacttaagaagagagagaggcatttagaattcattgaaaacagctggtggacaaaattttgtggcgctctgcgtcccctgaagatcgtctggggaatatttttcatcttagttgcattgctgtttgtaatttctctcttcttgtcaaatttagataaagctcttcattcagctggaatagattctggtttcataatttttggagctaacctgagtaatccactgaatatgcttttgcctttactacaaacagttttccctcttgattatattcttataacaattattattatgtactttatttttacttcaatggcaggaattcgaaatattggcatatggttcttttggattagattatataaaatcagaagaggtagaaccaggccccaagcactcctttttctctgcatgatacttctgcttattgtccttcacactagctacatgatttatagtcttgctccccaatatgttatgtatggaagccaaaattacttaatagagactaatataacttctgataatcataaaggcaattcaaccctttctgtgccaaagagatgtgatgcagatgctcctgaagatcagtgtactgttacccggacatacctattccttcacaagttctggttcttcagtgctgcttactattttggtaactgggcctttcttggggtatttttgattggattaattgtatcctgttgtaaagggaagaaatcggttattgaaggagtagatgaagattcagacataagtgatgatgagccctctgtctattctgcttgacagccttctgtcttaaaggttttataatgctgactgaatatctgttatgcatttttaaagtattaaactaacattaggatttgctaactagctttcatcaaaaatgggagcatggctataagacaactatattttattatatgttttctgaagtaacattgtatcatagattaacattttaaattaccataatcatgctatgtaaatataagactactggctttgtgagggaatgtttgtgcaaaattttttcctctaatgtataatagtgttaaattgattaaaaatcttccagaattaatattcccttttgtcactttttgaaaacataataaatcatggcgtcgttggcctcaagcggtggagctagttcgcccacgagcnccttctcctcttt

SEQ ID NO: 431130 - DNA, 899 bp, Homo sapiens
atgtcactgcgtccgcacgcgccccgcccctgagcagtccttgctgccccgcccccgctcggctcgccgccagggacgctagtgggtccagtctccttggcaaccacttgctcctccccctccgcccctttaacctttagggtgcgcgggtgcagtatatctcgcgctctctcccctttccccctcccctttccccaccccgggcgctcaggttggtctggaccggaagcgaagatggcgacttctggcgcggcctcggcggagctggtgatcggctggtgcatattcggcctcttactactggctattttggcattctgctggatatatgttcgtaaataccaaagtcggcgggaaagtgaagttgtctccaccataacagcaattttttctctagcaattgcacttatcacatcagcacttctaccagtggatatatttttggtttcttacatgaaaaatcaaaatggtacatttaaggactgggctaatgctaatgtcagcagacagattgaggacactgtattatacggttactatagtaagtatctttcagtttctttccctatttggactgctaaccaaaatactgatacgactccgatgagtggagaaccccaggttcttcctcttgggtcgaattagaaaaaaatgacatggacacacatggagtagttttaaggagcagggagtttagtaggcaagaaagaagggggaagaaagaaataagctcccctgtacagagacagagggaggggagctccaaaaccaagagagggaaccccacctgccacggataccagtcaggtatatgaagaggctgaaggtgccagtgtttgatttgcatagggctcgggattggtttgaccaggcatgtcatccacatagcctgttaaaaa

SEQ ID NO: 431131 - DNA, 784 bp, Homo sapiens
tgctgtcatttcaccgatgacgtctagggttgcagggtcctttttggaagctcttgccgtcatcgctgacttgggcaatggggccggtggggtttgggggcggaagagaccctcggggttgagaagtatgtggtggcctttcgtcccctgtaaaacattgtcacacggtgtggggcggcagcgctggatctttgcaagtatacctgtggagggcggagctgtagccctctttattaccagtatcggagtatatactactacctgtctgacctcaggctattttggcattctgctggatatatgttcgtaaataccaaagtcggcgggaaagtgaagttgtctccaccataacagcaattttttctctagcaattgcacttatcacatcagcacttctaccagtggatatatttttggtttcttacatgaaaaatcaaaatggtacatttaaggactgggctaatgctaatgtcagcagacagattgaggacactgtattatacggttactatactttatattctgttatattgttctgtgtgttcttctggatcccttttgtctacttctattatgaagaaaaggatgatgatgatactagtaaatgtactcaacttaaacggcactcagtatacttgggatttgttgtgattggcctggttctttagtgggtgctttgttccctgatggtcccataacaaaatctccgagtgggcaaggtgatcccatttgagactggactgccgggttagcgattggattaaaaaacctgactgatgaattg

SEQ ID NO: 431132 - DNA, 2236 bp, Homo sapiens
  misc_feature (2236)..(2236): n is a, c, g, or t
atgtcactgcgtccgcacgcgccccgcccctgagcagtccttgctgccccgcccccgctcggctcgccgccagggacgctagtgggtccagtctccttggcaaccacttgctcctccccctccgcccctttaacctttagggtgcgcgggtgcagtatatctcgcgctctctcccctttccccctcccctttccccaccccgggcgctcaggttggtctggaccggaagcgaagatggcgacttctggcgcggcctcggcggagctggtgatcggctggtgcatattcggcctcttactactggctattttggcattctgctggatatatgttcgtaaataccaaagtcggcgggaaagtgaagttgtctccaccataacagcaattttttctctagcaattgcacttatcacatcagcacttctaccagtggatatatttttggtttcttacatgaaaaatcaaaatggtacatttaaggactgggctaatgctaatgtcagcagacagattgaggacactgtattatacggttactatactttatattctgttatattgttctgtgtgttcttctggatcccttttgtctacttctattatgaagaaaaggatgatgatgatactagtaaatgtactcaaattaaaacggcactcaagtatactttgggatttgttgtgatttgtgcactgcttcttttagttggtgcctttgttccattgaatgttcccaataacaaaaattctacagagtgggaaaaagtgaagtccctatttgaagaacttggaagtagtcatggtttagctgcattgtcattttctatcagttctctgaccttgattggaatgttggcagctataacttacacagcctatggcatgtctgcgttacctttaaatctgataaaaggcactagaagcgctgcttatgaacgtttggaaaacactgaagacattgaagaagtagaacaacacattcaaacgattaaatcaaaaagcaaagatggtcgacctttgccagcaagggataaacgcgccttaaaacaatttgaagaaaggttacgaacacttaagaagagagagaggcatttagaattcattgaaaacagctggtggacaaaattttgtggcgctctgcgtcccctgaagatcgtctggggaatatttttcatcttagttgcattgctgtttgtaatttctctcttcttgtcaaatttagataaagctcttcattcagctggaatagattctggtttcataatttttggagctaacctgagtaatccactgaatatgcttttgcctttactacaaacagttttccctcttgattatattcttataacaattattattatgtactttatttttacttcaatggcaggaattcgaaatattggcatatggttcttttggattagattatataaaatcagaagaggtagaaccaggccccaagcactcctttttctctgcatgatacttctgcttattgtccttcacactagctacatgatttatagtcttgctccccaatatgttatgtatggaagccaaaattacttaatagagactaatataacttctgataatcataaaggcaattcaaccctttctgtgccaaagagatgtgatgcagatgctcctgaagatcagtgtactgttacccggacatacctattccttcacaagttctggttcttcagtgctgcttactattttggtaactgggcctttcttggggtatttttgattggattaattgtatcctgttgtaaagggaagaaatcggttattgaaggagtagatgaagattcagacataagtgatgatgagccctctgtctattctgcttgacagccttctgtcttaaaggttttataatgctgactgaatatctgttatgcatttttaaagtattaaactaacattaggatttgctaactagctttcatcaaaaatgggagcatggctataagacaactatattttattatatgttttctgaagtaacattgtatcatagattaacattttaaattaccataatcatgctatgtaaatataagactactggctttgtgagggaatgtttgtgcaaaattttttcctctaatgtataatagtgttaaattgattaaaaatcttccagaattaatattcccttttgtcactttttgaaaacataataaatcatggcctcgttggcctcagcggtggagctctgccgccggan

SEQ ID NO: 431133 - DNA, 2254 bp, Homo sapiens
  misc_feature (2241)..(2241): n is a, c, g, or t
atgtcactgcgtccgcacgcgccccgcccctgagcagtccttgctgccccgcccccgctcggctcgccgccagggacgctagtgggtccagtctccttggcaaccacttgctcctccccctccgcccctttaacctttagggtgcgcgggtgcagtatatctcgcgctctctcccctttccccctcccctttccccaccccgggcgctcaggttggtctggaccggaagcgaagatggcgacttctggcgcggcctcggcggagctggtgatcggctggtgcatattcggcctcttactactggctattttggcattctgctggatatatgttcgtaaataccaaagtcggcgggaaagtgaagttgtctccaccataacagcaattttttctctagcaattgcacttatcacatcagcacttctaccagtggatatatttttggtttcttacatgaaaaatcaaaatggtacatttaaggactgggctaatgctaatgtcagcagacagattgaggacactgtattatacggttactatactttatattctgttatattgttctgtgtgttcttctggatcccttttgtctacttctattatgaagaaaaggatgatgatgatactagtaaatgtactcaaattaaaacggcactcaagtatactttgggatttgttgtgatttgtgcactgcttcttttagttggtgcctttgttccattgaatgttcccaataacaaaaattctacagagtgggaaaaagtgaagtccctatttgaagaacttggaagtagtcatggtttagctgcattgtcattttctatcagttctctgaccttgattggaatgttggcagctataacttacacagcctatggcatgtctgcgttacctttaaatctgataaaaggcactagaagcgctgcttatgaacgtttggaaaacactgaagacattgaagaagtagaacaacacattcaaacgattaaatcaaaaagcaaagatggtcgacctttgccagcaagggataaacgcgccttaaaacaatttgaagaaaggttacgaacacttaagaagagagagaggcatttagaattcattgaaaacagctggtggacaaaattttgtggcgctctgcgtcccctgaagatcgtctggggaatatttttcatcttagttgcattgctgtttgtaatttctctcttcttgtcaaatttagataaagctcttcattcagctggaatagattctggtttcataatttttggagctaacctgagtaatccactgaatatgcttttgcctttactacaaacagttttccctcttgattatattcttataacaattattattatgtactttatttttacttcaatggcaggaattcgaaatattggcatatggttcttttggattagattatataaaatcagaagaggtagaaccaggccccaagcactcctttttctctgcatgatacttctgcttattgtccttcacactagctacatgatttatagtcttgctccccaatatgttatgtatggaagccaaaattacttaatagagactaatataacttctgataatcataaaggcaattcaaccctttctgtgccaaagagatgtgatgcagatgctcctgaagatcagtgtactgttacccggacatacctattccttcacaagttctggttcttcagtgctgcttactattttggtaactgggcctttcttggggtatttttgattggattaattgtatcctgttgtaaagggaagaaatcggttattgaaggagtagatgaagattcagacataagtgatgatgagccctctgtctattctgcttgacagccttctgtcttaaaggttttataatgctgactgaatatctgttatgcatttttaaagtattaaactaacattaggatttgctaactagctttcatcaaaaatgggagcatggctataagacaactatattttattatatgttttctgaagtaacattgtatcatagattaacattttaaattaccataatcatgctatgtaaatataagactactggctttgtgagggaatgtttgtgcaaaattttttcctctaatgtataatagtgttaaattgattaaaaatcttccagaattaatattcccttttgtcactttttgaaaacataataaatcatggcgtcgttggcctcaagcggtggagctagttcgcccacgagcnccttctcctcttt

SEQ ID NO: 431134 - DNA, 2124 bp, Homo sapiens
tgctgtcatttcaccgatgacgtctagggttgcagggtcctttttggaagctcttgccgtcatcgctgacttgggcaatggggccggtggggtttgggggcggaagagaccctcggggttgagaagtatgtggtggcctttcgtcccctgtaaaacattgtcacacggtgtggggcggcagcgctggatctttgcaagtgctattttggcattctgctggatatatgttcgtaaataccaaagtcggcgggaaagtgaagttgtctccaccataacagcaattttttctctagcaattgcacttatcacatcagcacttctaccagtggatatatttttggtttcttacatgaaaaatcaaaatggtacatttaaggactgggctaatgctaatgtcagcagacagattgaggacactgtattatacggttactatactttatattctgttatattgttctgtgtgttcttctggatcccttttgtctacttctattatgaagaaaaggatgatgatgatactagtaaatgtactcaaattaaaacggcactcaagtatactttgggatttgttgtgatttgtgcactgcttcttttagttggtgcctttgttccattgaatgttcccaataacaaaaattctacagagtgggaaaaagtgaagtccctatttgaagaacttggaagtagtcatggtttagctgcattgtcattttctatcagttctctgaccttgattggaatgttggcagctataacttacacagcctatggcatgtctgcgttacctttaaatctgataaaaggcactagaagcgctgcttatgaacgtttggaaaacactgaagacattgaagaagtagaacaacacattcaaacgattaaatcaaaaagcaaagatggtcgacctttgccagcaagggataaacgcgccttaaaacaatttgaagaaaggttacgaacacttaagaagagagagaggcatttagaattcattgaaaacagctggtggacaaaattttgtggcgctctgcgtcccctgaagatcgtctggggaatatttttcatcttagttgcattgctgtttgtaatttctctcttcttgtcaaatttagataaagctcttcattcagctggaatagattctggtttcataatttttggagctaacctgagtaatccactgaatatgcttttgcctttactacaaacagttttccctcttgattatattcttataacaattattattatgtactttatttttacttcaatggcaggaattcgaaatattggcatatggttcttttggattagattatataaaatcagaagaggtagaaccaggccccaagcactcctttttctctgcatgatacttctgcttattgtccttcacactagctacatgatttatagtcttgctccccaatatgttatgtatggaagccaaaattacttaatagagactaatataacttctgataatcataaaggcaattcaaccctttctgtgccaaagagatgtgatgcagatgctcctgaagatcagtgtactgttacccggacatacctattccttcacaagttctggttcttcagtgctgcttactattttggtaactgggcctttcttggggtatttttgattggattaattgtatcctgttgtaaagggaagaaatcggttattgaaggagtagatgaagattcagacataagtgatgatgagccctctgtctattctgcttgacagccttctgtcttaaaggttttataatgctgactgaatatctgttatgcatttttaaagtattaaactaacattaggatttgctaactagctttcatcaaaaatgggagcatggctataagacaactatattttattatatgttttctgaagtaacattgtatcatagattaacattttaaattaccataatcatgctatgtaaatataagactactggctttgtgagggaatgtttgtgcaaaattttttcctctaatgtataatagtgttaaattgattaaaaatcttccagaattaatattcccttttgtcactttttgaaaacataataaatcatttgtatctgtgccttaggttctccagagtga

SEQ ID NO: 431135 - DNA, 2387 bp, Homo sapiens
tgctgtcatttcaccgatgacgtctagggttgcagggtcctttttggaagctcttgccgtcatcgctgacttgggcaatggggccggtggggtttgggggcggaagagaccctcggggttgagaagtatgtggtggcctttcgtcccctgtaaaacattgtcacacggtgtggggcggcagcgctggatctttgcaagttaagtaggcgctggcgttgtttacttgtcaccttctctgtatgttttttccctcattttccctacccttggggctagtgagtctccaacctctgtgcccattgtgtgattctgccttgatgacgtgagttgctcgttctgacttccaggtgtcacattctcttctaatctttttttgattggtgtagatacctgtggagggcggagctgtagccctctttattaccagtatcggagtatatactactacctgtctgacctcaggctattttggcattctgctggatatatgttcgtaaataccaaagtcggcgggaaagtgaagttgtctccaccataacagcaattttttctctagcaattgcacttatcacatcagcacttctaccagtggatatatttttggtttcttacatgaaaaatcaaaatggtacatttaaggactgggctaatgctaatgtcagcagacagattgaggacactgtattatacggttactatactttatattctgttatattgttctgtgtgttcttctggatcccttttgtctacttctattatgaagaaaaggatgatgatgatactagtaaatgtactcaaattaaaacggcactcaagtatactttgggatttgttgtgatttgtgcactgcttcttttagttggtgcctttgttccattgaatgttcccaataacaaaaattctacagagtgggaaaaagtgaagtccctatttgaagaacttggaagtagtcatggtttagctgcattgtcattttctatcagttctctgaccttgattggaatgttggcagctataacttacacagcctatggcatgtctgcgttacctttaaatctgataaaaggcactagaagcgctgcttatgaacgtttggaaaacactgaagacattgaagaagtagaacaacacattcaaacgattaaatcaaaaagcaaagatggtcgacctttgccagcaagggataaacgcgccttaaaacaatttgaagaaaggttacgaacacttaagaagagagagaggcatttagaattcattgaaaacagctggtggacaaaattttgtggcgctctgcgtcccctgaagatcgtctggggaatatttttcatcttagttgcattgctgtttgtaatttctctcttcttgtcaaatttagataaagctcttcattcagctggaatagattctggtttcataatttttggagctaacctgagtaatccactgaatatgcttttgcctttactacaaacagttttccctcttgattatattcttataacaattattattatgtactttatttttacttcaatggcaggaattcgaaatattggcatatggttcttttggattagattatataaaatcagaagaggtagaaccaggccccaagcactcctttttctctgcatgatacttctgcttattgtccttcacactagctacatgatttatagtcttgctccccaatatgttatgtatggaagccaaaattacttaatagagactaatataacttctgataatcataaaggcaattcaaccctttctgtgccaaagagatgtgatgcagatgctcctgaagatcagtgtactgttacccggacatacctattccttcacaagttctggttcttcagtgctgcttactattttggtaactgggcctttcttggggtatttttgattggattaattgtatcctgttgtaaagggaagaaatcggttattgaaggagtagatgaagattcagacataagtgatgatgagccctctgtctattctgcttgacagccttctgtcttaaaggttttataatgctgactgaatatctgttatgcatttttaaagtattaaactaacattaggatttgctaactagctttcatcaaaaatgggagcatggctataagacaactatattttattatatgttttctgaagtaacattgtatcatagattaacattttaaattaccataatcatgctatgtaaatataagactactggctttgtgagggaatgtttgtgcaaaattttttcctctaatgtataatagtgttaaattgattaaaaatcttccagaattaatattcccttttgtcactttttgaaaacataataaatcatttgtatctgtgccttaggttctccagagtga

SEQ ID NO: 431136 - DNA, 2118 bp, Homo sapiens
gtactgcattcatgaagtaggctttgaaaattatacatcttggacaagtttttaagggatagtgggctttccttacacaactaaaataacctttccttcacataagttttcctgctagaaactttcaaacacatacaaaaatcagagaaaatacactgggtagtaacaaacatctctttttgttctatttctggctattttggcattctgctggatatatgttcgtaaataccaaagtcggcgggaaagtgaagttgtctccaccataacagcaattttttctctagcaattgcacttatcacatcagcacttctaccagtggatatatttttggtttcttacatgaaaaatcaaaatggtacatttaaggactgggctaatgctaatgtcagcagacagattgaggacactgtattatacggttactatactttatattctgttatattgttctgtgtgttcttctggatcccttttgtctacttctattatgaagaaaaggatgatgatgatactagtaaatgtactcaaattaaaacggcactcaagtatactttgggatttgttgtgatttgtgcactgcttcttttagttggtgcctttgttccattgaatgttcccaataacaaaaattctacagagtgggaaaaagtgaagtccctatttgaagaacttggaagtagtcatggtttagctgcattgtcattttctatcagttctctgaccttgattggaatgttggcagctataacttacacagcctatggcatgtctgcgttacctttaaatctgataaaaggcactagaagcgctgcttatgaacgtttggaaaacactgaagacattgaagaagtagaacaacacattcaaacgattaaatcaaaaagcaaagatggtcgacctttgccagcaagggataaacgcgccttaaaacaatttgaagaaaggttacgaacacttaagaagagagagaggcatttagaattcattgaaaacagctggtggacaaaattttgtggcgctctgcgtcccctgaagatcgtctggggaatatttttcatcttagttgcattgctgtttgtaatttctctcttcttgtcaaatttagataaagctcttcattcagctggaatagattctggtttcataatttttggagctaacctgagtaatccactgaatatgcttttgcctttactacaaacagttttccctcttgattatattcttataacaattattattatgtactttatttttacttcaatggcaggaattcgaaatattggcatatggttcttttggattagattatataaaatcagaagaggtagaaccaggccccaagcactcctttttctctgcatgatacttctgcttattgtccttcacactagctacatgatttatagtcttgctccccaatatgttatgtatggaagccaaaattacttaatagagactaatataacttctgataatcataaaggcaattcaaccctttctgtgccaaagagatgtgatgcagatgctcctgaagatcagtgtactgttacccggacatacctattccttcacaagttctggttcttcagtgctgcttactattttggtaactgggcctttcttggggtatttttgattggattaattgtatcctgttgtaaagggaagaaatcggttattgaaggagtagatgaagattcagacataagtgatgatgagccctctgtctattctgcttgacagccttctgtcttaaaggttttataatgctgactgaatatctgttatgcatttttaaagtattaaactaacattaggatttgctaactagctttcatcaaaaatgggagcatggctataagacaactatattttattatatgttttctgaagtaacattgtatcatagattaacattttaaattaccataatcatgctatgtaaatataagactactggctttgtgagggaatgtttgtgcaaaattttttcctctaatgtataatagtgttaaattgattaaaaatcttccagaattaatattcccttttgtcactttttgaaaacataataaatcatttgtatctgtgccttaggttctccagagtga

SEQ ID NO: 431137 - DNA, 1790 bp, Homo sapiens
tgttcatcttcttcatcataaaggtcagctttcttctttgccagtcgctggttttcatccagagcacgaagctcgtggtctgaatacaggcttctctctatctcaatctgctgcagtagagacaaagggaaacaccggtgtttcccttttgtctacttctattatgaagaaaaggatgatgatgatactagtaaatgtactcaaattaaaacggcactcaagtatactttgggatttgttgtgatttgtgcactgcttcttttagttggtgcctttgttccattgaatgttcccaataacaaaaattctacagagtgggaaaaagtgaagtccctatttgaagaacttggaagtagtcatggtttagctgcattgtcattttctatcagttctctgaccttgattggaatgttggcagctataacttacacagcctatggcatgtctgcgttacctttaaatctgataaaaggcactagaagcgctgcttatgaacgtttggaaaacactgaagacattgaagaagtagaacaacacattcaaacgattaaatcaaaaagcaaagatggtcgacctttgccagcaagggataaacgcgccttaaaacaatttgaagaaaggttacgaacacttaagaagagagagaggcatttagaattcattgaaaacagctggtggacaaaattttgtggcgctctgcgtcccctgaagatcgtctggggaatatttttcatcttagttgcattgctgtttgtaatttctctcttcttgtcaaatttagataaagctcttcattcagctggaatagattctggtttcataatttttggagctaacctgagtaatccactgaatatgcttttgcctttactacaaacagttttccctcttgattatattcttataacaattattattatgtactttatttttacttcaatggcaggaattcgaaatattggcatatggttcttttggattagattatataaaatcagaagaggtagaaccaggccccaagcactcctttttctctgcatgatacttctgcttattgtccttcacactagctacatgatttatagtcttgctccccaatatgttatgtatggaagccaaaattacttaatagagactaatataacttctgataatcataaaggcaattcaaccctttctgtgccaaagagatgtgatgcagatgctcctgaagatcagtgtactgttacccggacatacctattccttcacaagttctggttcttcagtgctgcttactattttggtaactgggcctttcttggggtatttttgattggattaattgtatcctgttgtaaagggaagaaatcggttattgaaggagtagatgaagattcagacataagtgatgatgagccctctgtctattctgcttgacagccttctgtcttaaaggttttataatgctgactgaatatctgttatgcatttttaaagtattaaactaacattaggatttgctaactagctttcatcaaaaatgggagcatggctataagacaactatattttattatatgttttctgaagtaacattgtatcatagattaacattttaaattaccataatcatgctatgtaaatataagactactggctttgtgagggaatgtttgtgcaaaattttttcctctaatgtataatagtgttaaattgattaaaaatcttccagaattaatattcccttttgtcactttttgaaaacataataaatcatttgtatctgtgccttaggttctccagagtga

SEQ ID NO: 431138 - DNA, 2173 bp, Homo sapiens
atgtcactgcgtccgcacgcgccccgcccctgagcagtccttgctgccccgcccccgctcggctcgccgccagggacgctagtgggtccagtctccttggcaaccacttgctcctccccctccgcccctttaacctttagggtgcgcgggtgcagtatatctcgcgctctctcccctttccccctcccctttccccaccccgggcgctcaggttggtctggaccggaagcgaagatggcgacttctggcgcggcctcggcggagctggtgatcggctggtgcatattcggcctcttactactggctattttggcattctgctggatatatgttcgtaaataccaaagtcggcgggaaagtgaagttgtctccaccataacagcaattttttctctagcaattgcacttatcacatcagcacttctaccagtggatatatttttggtttcttacatgaaaaatcaaaatggtacatttaaggactgggctaatgctaatgtcagcagacagattgaggacactgtattatacggttactatactttatattctgttatattgttctgtgtgttcttctggatcccttttgtctacttctattatgaagaaaaggatgatgatgatactagtaaatgtactcaaattaaaacggcactcaagtatactttgggatttgttgtgatttgtgcactgcttcttttagttggtgcctttgttccattgaatgttcccaataacaaaaattctacagagtgggaaaaagtgaagtccctatttgaagaacttggaagtagtcatggtttagctgcattgtcattttctatcagttctctgaccttgattggaatgttggcagctataacttacacagcctatggcatgtctgcgttacctttaaatctgataaaaggcactagaagcgctgcttatgaacgtttggaaaacactgaagacattgaagaagtagaacaacacattcaaacgattaaatcaaaaagcaaagatggtcgacctttgccagcaagggataaacgcgccttaaaacaatttgaagaaaggttacgaacacttaagaagagagagaggcatttagaattcattgaaaacagctggtggacaaaattttgtggcgctctgcgtcccctgaagatcgtctggggaatatttttcatcttagttgcattgctgtttgtaatttctctcttcttgtcaaatttagataaagctcttcattcagctggaatagattctggtttcataatttttggagctaacctgagtaatccactgaatatgcttttgcctttactacaaacagttttccctcttgattatattcttataacaattattattatgtactttatttttacttcaatggcaggaattcgaaatattggcatatggttcttttggattagatgatacttctgcttattgtccttcacactagctacatgatttatagtcttgctccccaatatgttatgtatggaagccaaaattacttaatagagactaatataacttctgataatcataaaggcaattcaaccctttctgtgccaaagagatgtgatgcagatgctcctgaagatcagtgtactgttacccggacatacctattccttcacaagttctggttcttcagtgctgcttactattttggtaactgggcctttcttggggtatttttgattggattaattgtatcctgttgtaaagggaagaaatcggttattgaaggagtagatgaagattcagacataagtgatgatgagccctctgtctattctgcttgacagccttctgtcttaaaggttttataatgctgactgaatatctgttatgcatttttaaagtattaaactaacattaggatttgctaactagctttcatcaaaaatgggagcatggctataagacaactatattttattatatgttttctgaagtaacattgtatcatagattaacattttaaattaccataatcatgctatgtaaatataagactactggctttgtgagggaatgtttgtgcaaaattttttcctctaatgtataatagtgttaaattgattaaaaatcttccagaattaatattcccttttgtcactttttgaaaacataataaatcatttgtatctgtgccttaggttctccagagtga

SEQ ID NO: 431139 - DNA, 1995 bp, Homo sapiens
atgtcactgcgtccgcacgcgccccgcccctgagcagtccttgctgccccgcccccgctcggctcgccgccagggacgctagtgggtccagtctccttggcaaccacttgctcctccccctccgcccctttaacctttagggtgcgcgggtgcagtatatctcgcgctctctcccctttccccctcccctttccccaccccgggcgctcaggttggtctggaccggaagcgaagatggcgacttctggcgcggcctcggcggagctggtgatcggctggtgcatattcggcctcttactactggctattttggcattctgctggatatatgttcgtaaataccaaagtcggcgggaaagtgaagttgtctccaccataacagcaattttttctctagcaattgcacttatcacatcagcacttctaccagtggatatatttttggtttcttacatgaaaaatcaaaatggtacatttaaggactgggctaatgctaatgtcagcagacagattgaggacactgtattatacggttactatatgcctttgttccattgaatgttcccaataacaaaaattctacagagtgggaaaaagtgaagtccctatttgaagaacttggaagtagtcatggtttagctgcattgtcattttctatcagttctctgaccttgattggaatgttggcagctataacttacacagcctatggcatgtctgcgttacctttaaatctgataaaaggcactagaagcgctgcttatgaacgtttggaaaacactgaagacattgaagaagtagaacaacacattcaaacgattaaatcaaaaagcaaagatggtcgacctttgccagcaagggataaacgcgccttaaaacaatttgaagaaaggttacgaacacttaagaagagagagaggcatttagaattcattgaaaacagctggtggacaaaattttgtggcgctctgcgtcccctgaagatcgtctggggaatatttttcatcttagttgcattgctgtttgtaatttctctcttcttgtcaaatttagataaagctcttcattcagctggaatagattctggtttcataatttttggagctaacctgagtaatccactgaatatgcttttgcctttactacaaacagaattcgaaatattggcatatggttcttttggattagattatataaaatcagaagaggtagaaccaggccccaagcactcctttttctctgcatgatacttctgcttattgtccttcacactagctacatgatttatagtcttgctccccaatatgttatgtatggaagccaaaattacttaatagagactaatataacttctgataatcataaaggcaattcaaccctttctgtgccaaagagatgtgatgcagatgctcctgaagatcagtgtactgttacccggacatacctattccttcacaagttctggttcttcagtgctgcttactattttggtaactgggcctttcttggggtatttttgattggattaattgtatcctgttgtaaagggaagaaatcggttattgaaggagtagatgaagattcagacataagtgatgatgagccctctgtctattctgcttgacagccttctgtcttaaaggttttataatgctgactgaatatctgttatgcatttttaaagtattaaactaacattaggatttgctaactagctttcatcaaaaatgggagcatggctataagacaactatattttattatatgttttctgaagtaacattgtatcatagattaacattttaaattaccataatcatgctatgtaaatataagactactggctttgtgagggaatgtttgtgcaaaattttttcctctaatgtataatagtgttaaattgattaaaaatcttccagaattaatattcccttttgtcactttttgaaaacataataaatcatttgtatctgtgccttaggttctccagagtga

SEQ ID NO: 431140 - DNA, 995 bp, Homo sapiens
  misc_feature (8)..(8): n is a, c, g, or t
attttaanaataataattgttataagaatataatcaagagggaaaactgtttgtagtaaaggcaaaagcatattcagtggattagttttccctcttgattatattcttataacaattattattatgtactttatttttacttcaatggcaggaattcgaaatattggcatatggttcttttggattagattatataaaatcagaagaggtagaaccaggccccaagcactcctttttctctgcatgatacttctgcttattgtccttcacactagctacatgatttatagtcttgctccccaatatgttatgtatggaagccaaaattacttaatagagactaatataacttctgataatcataaaggcaattcaaccctttctgtgccaaagagatgtgatgcagatgctcctgaagatcagtgtactgttacccggacatacctattccttcacaagttctggttcttcagtgctgcttactattttggtaactgggcctttcttggggtatttttgattggattaattgtatcctgttgtaaagggaagaaatcggttattgaaggagtagatgaagattcagacataagtgatgatgagccctctgtctattctgcttgacagccttctgtcttaaaggttttataatgctgactgaatatctgttatgcatttttaaagtattaaactaacattaggatttgctaactagctttcatcaaaaatgggagcatggctataagacaactatattttattatatgttttctgaagtaacattgtatcatagattaacattttaaattaccataatcatgctatgtaaatataagactactggctttgtgagggaatgtttgtgcaaaattttttcctctaatgtataatagtgttaaattgattaaaaatcttccagaattaatattcccttttgtcactttttgaaaacataataaatcatttgtatctgtgccttaggttctccagagtga

SEQ ID NO: 431141 - DNA, 2192 bp, Homo sapiens
  misc_feature (2192)..(2192): n is a, c, g, or t
atgtcactgcgtccgcacgcgccccgcccctgagcagtccttgctgccccgcccccgctcggctcgccgccagggacgctagtgggtccagtctccttggcaaccacttgctcctccccctccgcccctttaacctttagggtgcgcgggtgcagtatatctcgcgctctctcccctttccccctcccctttccccaccccgggcgctcaggttggtctggaccggaagcgaagatggcgacttctggcgcggcctcggcggagctggtgatcggctggtgcatattcggcctcttactactggctattttggcattctgctggatatatgttcgtaaataccaaagtcggcgggaaagtgaagttgtctccaccataacagcaattttttctctagcaattgcacttatcacatcagcacttctaccagtggatatatttttggtttcttacatgaaaaatcaaaatggtacatttaaggactgggctaatgctaatgtcagcagacagattgaggacactgtattatacggttactatactttatattctgttatattgttctgtgtgttcttctggatcccttttgtctacttctattatgaagaaaaggatgatgatgatactagtaaatgtactcaaattaaaacggcactcaagtatactttgggatttgttgtgatttgtgcactgcttcttttagttggtgcctttgttccattgaatgttcccaataacaaaaattctacagagtgggaaaaagtgaagtccctatttgaagaacttggaagtagtcatggtttagctgcattgtcattttctatcagttctctgaccttgattggaatgttggcagctataacttacacagcctatggcatgtctgcgttacctttaaatctgataaaaggcactagaagcgctgcttatgaacgtttggaaaacactgaagacattgaagaagtagaacaacacattcaaacgattaaatcaaaaagcaaagatggtcgacctttgccagcaagggataaacgcgccttaaaacaatttgaagaaaggttacgaacacttaagaagagagagaggcatttagaattcattgaaaacagctggtggacaaaattttgtggcgctctgcgtcccctgaagatcgtctggggaatatttttcatcttagttgcattgctgtttgtaatttctctcttcttgtcaaatttagataaagctcttcattcagctggaatagattctggtttcataatttttggagctaacctgagtaatccactgaatatgcttttgcctttactacaaacagttttccctcttgattatattcttataacaattattattatgtactttatttttacttcaatggcaggaattcgaaatattggcatatggttcttttggattagattatataaaatcagaagaggtagaaccaggccccaagcactcctttttctctgcatgatacttctgcttattgtccttcacactagctacatgatttatagtcttgctccccaatatgttatgtatggaagccaaaattacttaatagagactaatataacttctgataatcataaaggcaattcaaccctttctgtgccaaagagatgtgatgcagatgctcctgaagatcagtgtactgttacccggacatacctattccttcacaagttctggttcttcagtgctgcttactattttggtaactgggcctttcttggggtatttttgattggattaattgtatcctgttgtaaagggaagaaatcggttattgaaggagtagatgaagattcagacataagtgatgatgagccctctgtctattctgcttgacagccttctgtcttaaaggttttataatgctgactgaatatctgttatgcatttttaaagtattaaactaacattaggatttgctaactagctttcatcaaaaatgggagcatggctataagacaactatattttattatatgttttctgaagtaacattgtatcatagattaacattttaaattaccataatcatgctatgtaaatataagactactggctttgtgagggaatgtttgtgcaaaattttttcctctaatgtataatagtgttaaattgattaaaaatcttccagtggcctcgttggcctcagcggtggagctctgccgccggan

SEQ ID NO: 431142 - DNA, 790 bp, Homo sapiens
tttgtcactcttttctttccagttatataaaatcagaagaggtagaaccaggccccaagcactcctttttctctgcatgatacttctgcttattgtccttcacactagctacatgatttatagtcttgctccccaatatgttatgtatggaagccaaaattacttaatagagcctttctgtgccaaagagatgtgatgcagatgctcctgaagatcagtgtactgttacccggacatacctattccttcacaagttctggttcttcagtgctgcttactattttggtaactgggcctttcttggggtatttttgattggattaattgtatcctgttgtaaagggaagaaatcggttattgaaggagtagatgaagattcagacataagtgatgatgagccctctgtctattctgcttgacagccttctgtcttaaaggttttataatgctgactgaatatctgttatgcatttttaaagtattaaactaacattaggatttgctaactagctttcatcaaaaatgggagcatggctataagacaactatattttattatatgttttctgaagtaacattgtatcatagattaacattttaaattaccataatcatgctatgtaaatataagactactggctttgtgagggaatgtttgtgcaaaattttttcctctaatgtataatagtgttaaattgattaaaaatcttccagaattaatattcccttttgtcactttttgaaaacataataaatcatttgtatctgtgccttaggttctccagagtga

SEQ ID NO: 431143 - DNA, 637 bp, Homo sapiens
agttcttttatgaccagtgtttgttaagcttttcgtattccaccgaaaaaagtttctagtatcagtgtactgttacccggacatacctattccttcacaagttctggttcttcagtgctgcttactattttggtaactgggcctttcttggggtatttttgattggattaattgtatcctgttgtaaagggaagaaatcggttattgaaggagtagatgaagattcagacataagtgatgatgagccctctgtctattctgcttgacagccttctgtcttaaaggttttataatgctgactgaatatctgttatgcatttttaaagtattaaactaacattaggatttgctaactagctttcatcaaaaatgggagcatggctataagacaactatattttattatatgttttctgaagtaacattgtatcatagattaacattttaaattaccataatcatgctatgtaaatataagactactggctttgtgagggaatgtttgtgcaaaattttttcctctaatgtataatagtgttaaattgattaaaaatcttccagaattaatattcccttttgtcactttttgaaaacataataaatcatttgtatctgtgccttaggttctccagagtga

SEQ ID NO: 431144 - DNA, 2024 bp, Homo sapiens
atgtcactgcgtccgcacgcgccccgcccctgagcagtccttgctgccccgcccccgctcggctcgccgccagggacgctagtgggtccagtctccttggcaaccacttgctcctccccctccgcccctttaacctttagggtgcgcgggtgcagtatatctcgcgctctctcccctttccccctcccctttccccaccccgggcgctcaggttggtctggaccggaagcgaagatggcgacttctggcgcggcctcggcggagctggtgatcggctggtgcatattcggcctcttactactggctattttggcattctgctggatatatgttcgtaaataccaaagtcggcgggaaagtgaagttgtctccaccataacagcaattttttctctagcaattgcacttatcacatcagcacttctaccagtggatatatttttggtttcttacatgaaaaatcaaaatggtacatttaaggactgggctaatgctaatgtcagcagacagattgaggacactgtattatacggttactatactttatattctgttatattgttctgtgtgttcttctggatcccttttgtctacttctattatgaagaaaaggatgatgatgatactagtaaatgtactcaaattaaaacggcactcaagtatactttgggatttgttgtgatttgtgcactgcttcttttagttggtgcctttgttccattgaatgttcccaataacaaaaattctacagagtgggaaaaagtgaagtccctatttgaagaacttggaagtagtcatggtttagctgcattgtcattttctatcagttctctgaccttgattggaatgttggcagctataacttacacagcctatggcatgtctgcgttacctttaaatctgataaaaggcactagaagcgctgcttatgaacgtttggaaaacactgaagacattgaagaagtagaacaacacattcaaacgattaaatcaaaaagcaaagatggtcgacctttgccagcaagggataaacgcgccttaaaacaatttgaagaaaggttacgaacacttaagaagagagagaggcatttagaattcattgaaaacagctggtggacaaaattttgtggcgctctgcgtcccctgaagatcgtctggggaatatttttcatcttagttgcattgctgtttgtaatttctctcttcttgtcaaatttagataaagctcttcattcagctggaatagattctggtttcataatttttggagctaacctgagtaatccactgaatatgcttttgcctttactacaaacagttttccctcttgattatattcttataacaattattattatgtactttatttttacttcaatggcaggaattcgaaatattggcatatggttcttttggattagattatataaaatcagaagaggtagaaccaggccccaagcactcctttttctctgcatgatacttctgcttattgtccttcacactagctacatgatttatagtcttgctccccaatatgttatgtatggaagccaaaattacttaatagagactaatataacttctgataatcataaaggcaattcaaccctttctgtgccaaagagatgtgatgcagatgctcctgaagatcagtgtactgttacccggacatacctattccttcacaagttctggttcttcagtgctgcttactattttggtaactgggcctttcttggggtatttttgattggattaattgtatcctgttgtaaagggaagaaatcggttattgaaggagtagatgaagattcagacataagtgatgatgagccctctgtctattctgcttgacagccttctgtcttaaaggttttataatgctgactgaatatctgttatgcatttttaaagtattaaactaacattaggtaatagctatattcgcgttcatcgtgttgcgtgcttatagatgtattccaggttatagcagtatccgggtaataggcggtttcctgggt

SEQ ID NO: 431145 - DNA, 1774 bp, Homo sapiens
atgtcactgcgtccgcacgcgccccgcccctgagcagtccttgctgccccgcccccgctcggctcgccgccagggacgctagtgggtccagtctccttggcaaccacttgctcctccccctccgcccctttaacctttagggtgcgcgggtgcagtatatctcgcgctctctcccctttccccctcccctttccccaccccgggcgctcaggttggtctggaccggaagcgaagatggcgacttctggcgcggcctcggcggagctggtgatcggctggtgcatattcggcctcttactactggctattttggcattctgctggatatatgttcgtaaataccaaagtcggcgggaaagtgaagttgtctccaccataacagcaattttttctctagcaattgcacttatcacatcagcacttctaccagtggatatatttttggtttcttacatgaaaaatcaaaatggtacatttaaggactgggctaatgctaatgtcagcagacagattgaggacactgtattatacggttactatactttatattctgttatattgttctgtgtgttcttctggatcccttttgtctacttctattatgaagaaaaggatgatgatgatactagtaaatgtactcaaattaaaacggcactcaagtatactttgggatttgttgtgatttgtgcactgcttcttttagttggtgcctttgttccattgaatgttcccaataacaaaaattctacagagtgggaaaaagtgaagtccctatttgaagaacttggaagtagtcatggtttagctgcattgtcattttctatcagttctctgaccttgattggaatgttggcagctataacttacacagcctatggcatgtctgcgttacctttaaatctgataaaaggcactagaagcgctgcttatgaacgtttggaaaacactgaagacattgaagaagtagaacaacacattcaaacgattaaatcaaaaagcaaagatggtcgacctttgccagcaagggataaacgcgccttaaaacaatttgaagaaaggttacgaacacttaagaagagagagaggcatttagaattcattgaaaacagctggtggacaaaattttgtggcgctctgcgtcccctgaagatcgtctggggaatatttttcatcttagttgcattgctgtttgtaatttctctcttcttgtcaaatttagataaagctcttcattcagctggaatagattctggtttcataatttttggagctaacctgagtaatccactgaatatgcttttgcctttactacaaacagttttccctcttgattatattcttataacaattattattatgtactttatttttacttcaatggcaggaattcgaaatattggcatatggttcttttggattagattatataaaatcagaagaggtagaaccaggccccaagcactcctttttctctgcatgatacttctgcttattgtccttcacactagctacatgatttatagtcttgctccccaatatgttatgtatggaagccaaaattacttaatagagactaatatacttctggtaatcattaagggattcaaccttctgggcaagagaggatgcgaagccgagaacggtatggtccggatactatctcaagttcggttttcaggggacaagggagggctcggggaggggggaagtccggagggaccgtggggaaacaaataaccctttggacttagtagcgattaacaatggccgggaa

SEQ ID NO: 431146 - DNA, 1530 bp, Homo sapiens
  misc_feature (1299)..(1299): n is a, c, g, or t
  misc_feature (1530)..(1530): n is a, c, g, or t
atgtcactgcgtccgcacgcgccccgcccctgagcagtccttgctgccccgcccccgctcggctcgccgccagggacgctagtgggtccagtctccttggcaaccacttgctcctccccctccgcccctttaacctttagggtgcgcgggtgcagtatatctcgcgctctctcccctttccccctcccctttccccaccccgggcgctcaggttggtctggaccggaagcgaagatggcgacttctggcgcggcctcggcggagctggtgatcggctggtgcatattcggcctcttactactggctattttggcattctgctggatatatgttcgtaaataccaaagtcggcgggaaagtgaagttgtctccaccataacagcaattttttctctagcaattgcacttatcacatcagcacttctaccagtggatatatttttggtttcttacatgaaaaatcaaaatggtacatttaaggactgggctaatgctaatgtcagcagacagattgaggacactgtattatacggttactatactttatattctgttatattgttctgtgtgttcttctggatcccttttgtctacttctattatgaagaaaaggatgatgatgatactagtaaatgtactcaaattaaaacggcactcaagtatactttgggatttgttgtgatttgtgcactgcttcttttagttggtgcctttgttccattgaatgttcccaataacaaaaattctacagagtgggaaaaagtgaagtccctatttgaagaacttggaagtagtcatggtttagctgcattgtcattttctatcagttctctgaccttgattggaatgttggcagctataacttacacagcctatggcatgtctgcgttacctttaaatctgataaaaggcactagaagcgctgcttatgaacgtttggaaaacactgaagacattgaagaagtagaacaacacattcaaacgattaaatcaaaaagcaaagatggtcgacctttgccagcaagggataaacgcgccttaaaacaatttgaagaaaggttacgaacacttaagaagagagagaggcatttagaattcattgaaaacagctggtggacaaaattttgtggcgctctgcgtcccctgaagatcgtctggggaatatttttcatcttagttgcattgctgtttgtaatttctctcttcttgtcaaatttagataaagctcttcattcagctgggaaaacttaaggcattttttcttggggggtttcactaaaatttttggagctaaccctngatggttacactcctcaaacttggtaaaatttattggccttgttttttttttgggccccctttttactacaaaaacaggttttttttccccccccctttccttttttggggaaacttttttctaacttttaaatttttccccttttttaaattttaaaaacccaaaaaaatttttttaaacttttcttaaacttttttaatttgtactttatttttacttcaatggcaggn

SEQ ID NO: 431147 - DNA, 1090 bp, Homo sapiens
tgctgtcatttcaccgatgacgtctagggttgcagggtcctttttggaagctcttgccgtcatcgctgacttgggcaatggggccggtggggtttgggggcggaagagaccctcggggttgagaagtatgtggtggcctttcgtcccctgtaaaacattgtcacacggtgtggggcggcagcgctggatctttgcaagttaagtaggcgctggcgttgtttacttgtcaccttctctgtatgttttttccctcattttccctacccttggggctagtgagtctccaacctctgtgcccattgtgtgattctgccttgatgacgtgagttgctcgttctgacttccaggtgtcacattctcttctaatctttttttgattggtgtagatacctgtggagggcggagctgtagccctctttattaccagtatcggagtatatactactacctgtctgacctcaggtgctttcttttccaacgatcttatttctgcatattcagtgagcaaagtgtagatagaaatgtctcagagtggcctggctattacttccctgttcatattaaaaccctttggtttatttgggagttcaatttatttcctttcataacttctctaccttctcaaatcttctcttttctcatcgtccgaggctgtagttactttctgttctcacgtattttgacctttttgcattgcaaaacaaaaacctccagttctggaaatcaggcttgtttggttttactttaattgtcagatccagttggtgtctggtacctatgtagtatgttctagtagatttttgcagtagagactaaaaaaagaaaataaaagaaaagaatggtgtgaaaatttaagaaaaggatcctcttgttactgccatcactgtcacagataaaaacactgcctttaccctggaacatgttagtcctctcttggaggaaatgaaaccctaaaggttgactgtggtctctgcagccacccagtcctgtatttggagagccccctggcttttccagtccatcagatttagtttgtttagaaaaaaataaataagcatgtaatgtatgaaagttacgtgagactatcttg

SEQ ID NO: 431148 - DNA, 445 bp, Homo sapiens
ttttttttttaatatgtcatattaattggcagtttttaacactacattaaggtgattgaaagagtgggctttggagagagacctaagtttcagtaccatctctgacacttactagccatatgatcttagtcattagctttggttaataatcttttagagaaagtattaatcatcaattttatgaaagaacctatctcaccatagtcttttatttgctttcacagatcagtgtactgttacccggacatacctattccttcacaagttctggttcttcagtgctgcttactattttggtaactgggcctttcttggggtaagtgcagatatcccacgcgtgatttgaccttcctttataaattatagttaaatgtgtaaactctttttatcttactaggccatttgtatcatagtactgtcattgaattttaaagcattactttcc

SEQ ID NO: 431149 - DNA, 318 bp, Homo sapiens
cataagtgatgatgagccctctgtctattctgcttgacagccttctgtcttaaaggttttataatgctgactgaatatctgttatgcatttttaaagtattaaactaacattaggatttgctaactagctttcatcaaaaatgggagcatggctataagacaactatattttattatatgttttctgaagtaacattgtatcatagattaacattttaaattaccataatcatgctatgtaaatataagactactggctttgtgagggaatgtttgtgcaaaattttttcctctaatgtataatagtgttaaattgat

SEQ ID NO: 431150 - DNA, 404 bp, Homo sapiens
ggacttcgaatcagaatattttgttcaattgtaatagccttcacaaatttagtttgtttctgtgtttaagtctcttttgacttaaaaaaaaaaatttgaggccgggcgcagtggctcacacctgtaatcctagcacactgggaggccgaggtgggaggattgcctgaggccagaagtttgagaccagcctgggcagcataacgaaacctccctgtacagaaaaaatttttaaaattagcagggcgtggtgatgtgcacctgtagtctcaagcttgagcggttgaagtgggaggaccctttgagctcaggagtttgaggttacagtgagctgtgatgaggcaactgcactccagcctgggcaacagagcaagaagactctgtttccctgtctcttaaaaaaaaaa

SEQ ID NO: 431151 - DNA, 4065 bp, Homo sapiens
cgagccgaagcgcgggaagcagctcttgtggatcctcagtggcggaggctcggtcacccggataggtaaaggaaaacatgcctgccacacggaagccaatgagatatgggcatacagagggacacacggaggtctgttttgatgattctgggagttttattgtgacttgtggaagtgatggtgatgtgaggatttgggaagacttggatgatgatgatcctaagttcattaatgttggagaaaaggcatattcatgtgctttgaagagtggaaaactggtcactgcagtttctaataatactattcaagtccacacatttcctgaaggagttccagatggtatattgactcgcttcactacaaatgcaaaccatgtggtctttaatggggatggtactaaaattgctgctggatctagtgattttctagtcaaaattgtggatgtgatggatagcagccaacagaaaacatttcgaggacatgatgcccctgttttaagtctttcctttgatcctaaggacatctttctggcatcagctagttgtgatggatctgtcagagtgtggcaaatttcagatcagacatgtgctattagttggccactgctacaaaaatgcaacgatgtgataaatgcaaaatcaatctgcagacttgcttggcagccaaaaagtgggaagttactggcaattcctgtggaaaaatctgttaagctatatagaagagaatcttggagtcatcaatttgatctttcagataatttcatctctcagaccctcaatatagtaacctggtctccctgtgggcaatatttagctgcaggtagtattaatggtctaatcatagtttggaatgtggaaaccaaagactgcatggaaagggtgaaacatgagaaaggttatgcaatttgtggtctggcatggcatcctacttgtggtcgaatatcgtatactgatgcggaaggaaatctagggcttctagagaatgtttgtgaccccagtggaaagacatcaagcagtaaggtatctagcagagtggaaaaggattataatgatctttttgatggagatgatatgagtaatgctggtgattttctaaatgacaatgcagttgagatcccttctttttcaaaagggattataaatgatgatgaggatgatgaagacctcatgatggcttcaggtcgtcctagacagcgaagtcacatcctagaagatgatgaaaactcagttgatatttcaatgctaaaaactggttctagtcttctcaaagaggaggaggaagatggtcaagaaggcagcattcacaatctaccacttgtaacatcccaaaggccattttatgatggacccatgccaactccccggcaaaagccatttcagtcaggttctacaccgttgcatctcactcacagattcatggtgtggaactctattggaattattcgctgctataatgatgagcaagacaatgccatagatgtggagttccatgatacctccatacaccatgcaacacacttatcaaacactttgaattatacaatagcagatctttcccacgaagctattttgttggcatgtgaaagcactgatgaactagcaagcaagcttcactgcctgcactttagttcttgggattcaagcaaagagtggataatagacttgcctcagaatgaggatattgaagccatatgtctcggtcaaggatgggctgctgccgctactagtgccctgcttcttcgattgtttactattggaggggttcaaaaagaggtattcagccttgctggacctgtggtgtcaatggcaggacatggagaacagcttttcattgtttatcacagaggtacaggatttgatggggatcagtgccttggagttcaactgctagagctggggaaaaagaaaaaacaaattttgcatggtgaccctcttcctcttacaaggaaatcctaccttgcatggattgggttttcagctgaaggtaccccttgttacgtggattcagaaggaattgttcgaatgcttaacagaggacttggtaatacgtggactcctatatgtaatacaagagagcactgcaaaggaaaatctgatcactactgggtggttggtatccatgaaaatccccagcaactaaggtgcattccttgtaaaggttctcggtttcccccaacccttccacgccctgctgttgctatattatcctttaagcttccttactgtcagattgcaacagagaaaggacaaatggaggagcaattttggcgttcagttatatttcacaaccaccttgattatttagctaaaaatggttatgaatatgaagagagcactaaaaatcaagcaacaaaagagcaacaggaacttttaatgaaaatgcttgcgctttcttgtaaactggagcgagaattccgttgtgtggaacttgctgatctaatgactcaaaatgctgtgaatttagccattaaatatgcttctcgctctcggaaattaatactggctcaaaaactaagtgaactggctgtagagaaggcagccgaattgacagcaacccaggtggaagaggaagaagaagaagaagatttcagaaaaaagctgaatgctggttacagcaatactgctacagagtggagccaaccaaggttcagaaatcaagttgaagaagatgctgaggacagtggagaagctgatgatgaagaaaaaccagaaatacataagcctggacagaactcgttttccaaaagtacaaattcctctgatgtttcagctaagtcaggtgcagttacctttagcagccaaggacgagtaaatccctttaaggtatcagccagttccaaagaaccagccatgtcaatgaattcagcacgttcaactaatattttagacaatatgggcaaatcatccaagaaatccactgcacttagtcgaactacaaataatgaaaagtctcccattataaagcctctgattccaaagccgaagcctaagcaggcatctgcagcatcctatttccagaaaagaaattctcaaactaataaaactgaggaagtgaaagaagaaaatcttaaaaatgtattatctgaaaccccagctatatgtcctcctcaaaacactgaaaaccaaaggccaaagaccgggttccagatgtggttagaagaaaatagaagtaatattttgtctgacaatcctgacttttcagatgaagcagacataataaaagaaggaatgattcgatttagagtattgtcaactgaagaaagaaaggtgtgggctaacaaagccaaaggagaaacggcaagtgaaggaactgaagcaaagaagcgaaaacgtgtggttgatgaaagtgatgaaacagaaaaccaggaagaaaaagcaaaagagaacctgaatttgtctaaaaagcagaaacctttagatttttctacaaatcagaaactatcagcttttgcatttaagcaggagtaaaggaagaaagtgaccctagggaagtaatggatttttttttactcatctttgaatatagactcgagtctttgggaaactcattatatatatattttttaaagagtttgaagcaactgtttgtctttataagataatgtagtaattatattggtgtaggtaacaggacatatgtaaaaactatcatctttgcagattactctgcctccaaatgcagggcctttcagagatgcattgtgattgtaattactgagttgaagctccaaccaatttgaatttgtttcttaaccttgaaaaatcattaaagccaaggtattaaaacctttgtgcattaataccttctaggggtttggttcatttggtttttgtcatgtgcaaggaaggacaatagtcctctttccaagtgtgttagcatagacttctctatatgtttctactagacctaggggatgacgtcttttaataatactggccctaaacatgtaaataatcttgtaggtgagactttttcttttgtgtttcggaaatttcctatgtggctttcagttgtctgtttgtatagcctggatttttttgaggtaaatgaaactttctcatttgt

SEQ ID NO: 431152 - DNA, 587 bp, Homo sapiens
aaagaaagggaaagatttgcgtttaagagtattgtcaaccaaaaaaaaagaaaaggtgtgggctaacaaagccaaaggagaaacggcaagtgaaggaactgaagcaaagaagcgaaaacgtgtggttgatgaaagtgatgaaacagaaaaccaggaagaaaaagcaaaagagaacctgaatttgtctaaaaagcagaaacctttagatttttctacaaatcagaaactatcagcttttgcatttaagcaggagtaaaggaagaaagtgaccctagggaagtaatggatttttttttactcatctttgaatatagactcgagtctttgggaaactcattatatatatattttttaaagagtttgaagcaactgtttgtctttataagataatgtagtaattatattggtgtaggtaacaggacatatgtaaaaactatcatctttgcagattactctgcctccaaatgcagggcctttcagagatgcattgtgattgtaattactgagttgaagctccaaccaatttgaatttgtttcttaaccttgaaaaatcattaaagccaaggtattaaaacctttgtgcatta

SEQ ID NO: 431153 - DNA, 5446 bp, Homo sapiens
cgagccgaagcgcgggaagcagctcttgtggatcctcagtggcggaggctcggtcacccggataggtaaaggaaaacatgcctgccacacggaagccaatgagatatgggcatacagagggacacacggaggtctgttttgatgattctgggagttttattgtgacttgtggaagtgatggtgatgtgaggatttgggaagacttggatgatgatgatcctaagttcattaatgttggagaaaaggcatattcatgtgctttgaagagtggaaaactggtcactgcagtttctaataatactattcaagtccacacatttcctgaaggagttccagatggtatattgactcgcttcactacaaatgcaaaccatgtggtctttaatggggatggtactaaaattgctgctggatctagtgattttctagtcaaaattgtggatgtgatggatagcagccaacagaaaacatttcgaggacatgatgcccctgttttaagtctttcctttgatcctaaggacatctttctggcatcagctagttgtgatggatctgtcagagtgtggcaaatttcagatcagacatgtgctattagttggccactgctacaaaaatgcaacgatgtgataaatgcaaaatcaatctgcagacttgcttggcagccaaaaagtgggaagttactggcaattcctgtggaaaaatctgttaagctatatagaagagaatcttggagtcatcaatttgatctttcagataatttcatctctcagaccctcaatatagtaacctggtctccctgtgggcaatatttagctgcaggtagtattaatggtctaatcatagtttggaatgtggaaaccaaagactgcatggaaagggtgaaacatgagaaaggttatgcaatttgtggtctggcatggcatcctacttgtggtcgaatatcgtatactgatgcggaaggaaatctagggcttctagagaatgtttgtgaccccagtggaaagacatcaagcagtaaggtatctagcagagtggaaaaggattataatgatctttttgatggagatgatatgagtaatgctggtgattttctaaatgacaatgcagttgagatcccttctttttcaaaagggattataaatgatgatgaggatgatgaagacctcatgatggcttcaggtcgtcctagacagcgaagtcacatcctagaagatgatgaaaactcagttgatatttcaatgctaaaaactggttctagtcttctcaaagaggaggaggaagatggtcaagaaggcagcattcacaatctaccacttgtaacatcccaaaggccattttatgatggacccatgccaactccccggcaaaagccatttcagtcaggttctacaccgttgcatctcactcacagattcatggtgtggaactctattggaattattcgctgctataatgatgagcaagacaatgccatagatgtggagttccatgatacctccatacaccatgcaacacacttatcaaacactttgaattatacaatagcagatctttcccacgaagctattttgttggcatgtgaaagcactgatgaactagcaagcaagcttcactgcctgcactttagttcttgggattcaagcaaagagtggataatagacttgcctcagaatgaggatattgaagccatatgtctcggtcaaggatgggctgctgccgctactagtgccctgcttcttcgattgtttactattggaggggttcaaaaagaggtattcagccttgctggacctgtggtgtcaatggcaggacatggagaacagcttttcattgtttatcacagaggtacaggatttgatggggatcagtgccttggagttcaactgctagagctggggaaaaagaaaaaacaaattttgcatggtgaccctcttcctcttacaaggaaatcctaccttgcatggattgggttttcagctgaaggtaccccttgttacgtggattcagaaggaattgttcgaatgcttaacagaggacttggtaatacgtggactcctatatgtaatacaagagagcactgcaaaggaaaatctgatcactactgggtggttggtatccatgaaaatccccagcaactaaggtgcattccttgtaaaggttctcggtttcccccaacccttccacgccctgctgttgctatattatcctttaagcttccttactgtcagattgcaacagagaaaggacaaatggaggagcaattttggcgttcagttatatttcacaaccaccttgattatttagctaaaaatggttatgaatatgaagagagcactaaaaatcaagcaacaaaagagcaacaggaacttttaatgaaaatgcttgcgctttcttgtaaactggagcgagaattccgttgtgtggaacttgctgatctaatgactcaaaatgctgtgaatttagccattaaatatgcttctcgctctcggaaattaatactggctcaaaaactaagtgaactggctgtagagaaggcagccgaattgacagcaacccaggtggaagaggaagaagaagaagaagatttcagaaaaaagctgaatgctggttacagcaatactgctacagagtggagccaaccaaggttcagaaatcaagttgaagaagatgctgaggacagtggagaagctgatgatgaagaaaaaccagaaatacataagcctggacagaactcgttttccaaaagtacaaattcctctgatgtttcagctaagtcaggtgcagttacctttagcagccaaggacgagtaaatccctttaaggtatcagccagttccaaagaaccagccatgtcaatgaattcagcacgttcaactaatattttagacaatatgggcaaatcatccaagaaatccactgcacttagtcgaactacaaataatgaaaagtctcccattataaagcctctgattccaaagccgaagcctaagcaggcatctgcagcatcctatttccagaaaagaaattctcaaactaataaaactgaggaagtgaaagaagaaaatcttaaaaatgtattatctgaaaccccagctatatgtcctcctcaaaacactgaaaaccaaaggccaaagaccgggttccagatgtggttagaagaaaatagaagtaatattttgtctgacaatcctgacttttcagatgaagcagacataataaaagaaggaatgattcgatttagagtattgtcaactgaagaaagaaaggtgtgggctaacaaagccaaaggagaaacggcaagtgaaggaactgaagcaaagaagcgaaaacgtgtggttgatgaaagtgatgaaacagaaaaccaggaagaaaaagcaaaagagaacctgaatttgtctaaaaagcagaaacctttagatttttctacaaatcagaaactatcagcttttgcatttaagcaggagtaaaggaagaaagtgaccctagggaagtaatggatttttttttactcatctttgaatatagactcgagtctttgggaaactcattatatatatattttttaaagagtttgaagcaactgtttgtctttataagataatgtagtaattatattggtgtaggtaacaggacatatgtaaaaactatcatctttgcagattactctgcctccaaatgcagggcctttcagagatgcattgtgattgtaattactgagttgaagctccaaccaatttgaatttgtttcttaaccttgaaaaatcattaaagccaaggtattaaaacctttgtgcattaataccttctaggggtttggttcatttggtttttgtcatgtgcaaggaaggacaatagtcctctttccaagtgtgttagcatagacttctctatatgtttctactagacctaggggatgacgtcttttaataatactggccctaaacatgtaaataatcttgtaggtgagactttttcttttgtgtttcggaaatttcctatgtggctttcagttgtctgtttgtatagcctggatttttttgaggtaaatgaaactttctcatttgtatatttggcttgatatggtcttaatattatctttccacgaaatggatatatttctagaaaatatatatttactaccataatttctaccaccacccccattttgctctgcattatacacagtagagaagaactgaagacactgctgtgacagtattgcagtccaaggcatcatgtgctcttggtgggatactctgattatcagcatcaacagtactttactgagcaagactttgaaggcctgagaagagagcaaagttatggaaagtatttaactcttattttatattgaacaaacaaggtttaatcatgtcatacatttttggttttctaagcagagactaatacaaatgcagccacataaaggcagtgtactgggggtgggagggaaggaaacaatcacataaaatcagctgactcaaaattgaggatagttaataggttgaaagggaaaaagtatgttgaaaatttagacataaatgaaccaagaatattccttatctggtgatgattaaagttaggaaaacatacattttttattttttaattagtagctgctatcagagacattatagcacagtggttatgagcacagattccaaagccagattacctaggttcggagacccgcttctctacctactactaatagttgggtcatgttgggccggtgacccaaattctagccttcattcactcatctgtaaaatggatataatgatagtacctactttataggttgttatgagaattgaatgaaatgaaagcccttagtttctgacacatagtaatcttttatataaatgttagttactattctgataatgatgatgctgttggttatttcatcttgctttgtcattaggtttgattctgaatactatacaaactaattttgatttcaagatcttaagtaaaggtttatttatagtacattggaaagcatgtttgtagacatgtattttgtgtttggttcctcaacttgctttgtatatattttataatactaggttgatataaaagtaaatgcagtttcgccatttcagtggcaaaaaccgcgatttcttttgtgccaacctaatgcttaaggatataatctgtgtatattgtatttcagattcatagcaacctaataacaaggatttacaaaagggtttttacttccctacttttttttggctgaaggaaggtttttgtattgacttggtttaacttacaaatcagaactttgaaaccaagaaacattatccttatttctctgctatataatagtaaacctgtttttttccagtgttctttttttttttttccagagaattgggactgaatagtatgaaagtgaaaatggaaataaattaattattaatcatcatcatatcaataa

SEQ ID NO: 431154 - DNA, 3798 bp, Homo sapiens
cgagccgaagcgcgggaagcagctcttgtggatcctcagtggcggaggctcggtcacccggataggtaaaggaaaacatgcctgccacacggaagccaatgagatatgggcatacagagggacacacggaggtctgttttgatgattctgggagttttattgtgacttgtggaagtgatggtgatgtgaggatttgggaagacttggatgatgatgatcctaagttcattaatgttggagaaaaggcatattcatgtgctttgaagagtggaaaactggtcactgcagtttctaataatactattcaagtccacacatttcctgaaggagttccagatggtatattgactcgcttcactacaaatgcaaaccatgtggtctttaatggggatggtactaaaattgctgctggatctagtgattttctagtcaaaattgtggatgtgatggatagcagccaacagaaaacatttcgaggacatgatgcccctgttttaagtctttcctttgatcctaaggacatctttctggcatcagctagttgtgatggatctgtcagagtgtggcaaatttcagatcagacatgtgctattagttggccactgctacaaaaatgcaacgatgtgataaatgcaaaatcaatctgcagacttgcttggcagccaaaaagtgggaagttactggcaattcctgtggaaaaatctgttaagctatatagaagagaatcttggagtcatcaatttgatctttcagataatttcatctctcagaccctcaatatagtaacctggtctccctgtgggcaatatttagctgcaggtagtattaatggtctaatcatagtttggaatgtggaaaccaaagactgcatggaaagggtgaaacatgagaaaggttatgcaatttgtggtctggcatggcatcctacttgtggtcgaatatcgtatactgatgcggaaggaaatctagggcttctagagaatgtttgtgaccccagtggaaagacatcaagcagtaaggtatctagcagagtggaaaaggattataatgatctttttgatggagatgatatgagtaatgctggtgattttctaaatgacaatgcagttgagatcccttctttttcaaaagggattataaatgatgatgaggatgatgaagacctcatgatggcttcaggtcgtcctagacagcgaagtcacatcctagaagatgatgaaaactcagttgatatttcaatgctaaaaactggttctagtcttctcaaagaggaggaggaagatggtcaagaaggcagcattcacaatctaccacttgtaacatcccaaaggccattttatgatggacccatgccaactccccggcaaaagccatttcagtcaggttctacaccgttgcatctcactcacagattcatggtgtggaactctattggaattattcgctgctataatgatgagcaagacaatgccatagatgtggagttccatgatacctccatacaccatgcaacacacttatcaaacactttgaattatacaatagcagatctttcccacgaagctattttgttggcatgtgaaagcactgatgaactagcaagcaagcttcactgcctgcactttagttcttgggattcaagcaaagagtggataatagacttgcctcagaatgaggatattgaagccatatgtctcggtcaaggatgggctgctgccgctactagtgccctgcttcttcgattgtttactattggaggggttcaaaaagaggtattcagccttgctggacctgtggtgtcaatggcaggacatggagaacagcttttcattgtttatcacagaggtacaggatttgatggggatcagtgccttggagttcaactgctagagctggggaaaaagaaaaaacaaattttgcatggtgaccctcttcctcttacaaggaaatcctaccttgcatggattgggttttcagctgaaggtaccccttgttacgtggattcagaaggaattgttcgaatgcttaacagaggacttggtaatacgtggactcctatatgtaatacaagagagcactgcaaaggaaaatctgatcactactgggtggttggtatccatgaaaatccccagcaactaaggtgcattccttgtaaaggttctcggtttcccccaacccttccacgccctgctgttgctatattatcctttaagcttccttactgtcagattgcaacagagaaaggacaaatggaggagcaattttggcgttcagttatatttcacaaccaccttgattatttagctaaaaatggttatgaatatgaagagagcactaaaaatcaagcaacaaaagagcaacaggaacttttaatgaaaatgcttgcgctttcttgtaaactggagcgagaattccgttgtgtggaacttgctgatctaatgactcaaaatgctgtgaatttagccattaaatatgcttctcgctctcggaaattaatactggctcaaaaactaagtgaactggctgtagagaaggcagccgaattgacagcaacccaggtggaagaggaagaagaagaagaagatttcagaaaaaagctgaatgctggttacagcaatactgctacagagtggagccaaccaaggttcagaaatcaagttgaagaagatgctgaggacagtggagaagctgatgatgaagaaaaaccagaaatacataagcctggacagaactcgttttccaaaagtacaaattcctctgatgtttcagctaagtcaggtgcagttacctttagcagccaaggacgagtaaatccctttaaggtatcagccagttccaaagaaccagccatgtcaatgaattcagcacgttcaactaatattttagacaatatgggcaaatcatccaagaaatccactgcacttagtcgaactacaaataatgaaaagtctcccattataaagcctctgattccaaagccgaagcctaagcaggcatctgcagcatcctatttccagaaaagaaattctcaaactaataaaactgaggaagtgaaagaagaaaatcttaaaaatgtattatctgaaaccccagctatatgtcctcctcaaaacactgaaaaccaaaggccaaagaccgggttccagatgtggttagaagaaaatagaagtaatattttgtctgacaatcctgacttttcagatgaagcagacataataaaagaaggaatgattcgatttagagtattgtcaactgaagaaagaaaggtgtgggctaacaaagccaaaggagaaacggcaagtgaaggaactgaagcaaagaagcgaaaacgtgtggttgatgaaagtgatgaaacagaaaaccaggaagaaaaagcaaaagagaacctgaatttgtctaaaaagcagaaacctttagatttttctacaaatcagaaactatcagcttttgcatttaagcaggagtaaaggaagaaagtgaccctagggaagtaatggatttttttttactcatctttgaatatagactcgagtctttgggaaactcattatatatatattttttaaagagtttgaagcaactgtttgtctttataagataatgtagtaattatattggtgtaggtaacaggacatatgtaaaaactatcatctttgcagattactctgcctccaaatgcagggcctttcagagatgcattgtgattgtaattactgagttgaagctccaaccaatttgaatttgtttcttaaccttgaaaaatcattaaagccaaggtattaaaacctttgtgcatta

SEQ ID NO: 431155 - DNA, 5261 bp, Homo sapiens
cgagccgaagcgcgggaagcagctcttgtggatcctcagtggcggaggctcggtcacccggataggtaaaggaaaacatgcctgccacacggaagccaatgagatatgggcatacagagggacacacggaggtctgttttgatgattctgggagttttattgtgacttgtggaagtgatggtgatgtgaggatttgggaagacttggatgatgatgatcctaagttcattaatgttggagaaaaggcatattcatgtgctttgaagagtggaaaactggtcactgcagtttctaataatactattcaagtccacacatttcctgaaggagttccagatggtatattgactcgcttcactacaaatgcaaaccatgtggtctttaatggggatggtactaaaattgctgctggatctagtgattttctagtcaaaattgtggatgtgatggatagcagccaacagaaaacatttcgaggacatgatgcccctgttttaagtctttcctttgatcctaaggacatctttctggcatcagctagttgtgatggatctgtcagagtgtggcaaatttcagatcagacatgtgctattagttggccactgctacaaaaatgcaacgatgtgataaatgcaaaatcaatctgcagacttgcttggcagccaaaaagtgggaagttactggcaattcctgtggaaaaatctgttaagctatatagaagagaatcttggagtcatcaatttgatctttcagataatttcatctctcagaccctcaatatagtaacctggtctccctgtgggcaatatttagctgcaggtagtattaatggtctaatcatagtttggaatgtggaaaccaaagactgcatggaaagggtgaaacatgagaaaggttatgcaatttgtggtctggcatggcatcctacttgtggtcgaatatcgtatactgatgcggaaggaaatctagggcttctagagaatgtttgtgaccccagtggaaagacatcaagcagtaaggtatctagcagagtggaaaaggattataatgatctttttgatggagatgatatgagtaatgctggtgattttctaaatgacaatgcagttgagatcccttctttttcaaaagggattataaatgatgatgaggatgatgaagacctcatgatggcttcaggtcgtcctagacagcgaagtcacatcctagaagatgatgaaaactcagttgatatttcaatgctaaaaactggttctagtcttctcaaagaggaggaggaagatggtcaagaaggcagcattcacaatctaccacttgtaacatcccaaaggccattttatgatggacccatgccaactccccggcaaaagccatttcagtcaggttctacaccgttgcatctcactcacagattcatgcaagcttcactgcctgcactttagttcttgggattcaagcaaagagtggataatagacttgcctcagaatgaggatattgaagccatatgtctcggtcaaggatgggctgctgccgctactagtgccctgcttcttcgattgtttactattggaggggttcaaaaagaggtattcagccttgctggacctgtggtgtcaatggcaggacatggagaacagcttttcattgtttatcacagaggtacaggatttgatggggatcagtgccttggagttcaactgctagagctggggaaaaagaaaaaacaaattttgcatggtgaccctcttcctcttacaaggaaatcctaccttgcatggattgggttttcagctgaaggtaccccttgttacgtggattcagaaggaattgttcgaatgcttaacagaggacttggtaatacgtggactcctatatgtaatacaagagagcactgcaaaggaaaatctgatcactactgggtggttggtatccatgaaaatccccagcaactaaggtgcattccttgtaaaggttctcggtttcccccaacccttccacgccctgctgttgctatattatcctttaagcttccttactgtcagattgcaacagagaaaggacaaatggaggagcaattttggcgttcagttatatttcacaaccaccttgattatttagctaaaaatggttatgaatatgaagagagcactaaaaatcaagcaacaaaagagcaacaggaacttttaatgaaaatgcttgcgctttcttgtaaactggagcgagaattccgttgtgtggaacttgctgatctaatgactcaaaatgctgtgaatttagccattaaatatgcttctcgctctcggaaattaatactggctcaaaaactaagtgaactggctgtagagaaggcagccgaattgacagcaacccaggtggaagaggaagaagaagaagaagatttcagaaaaaagctgaatgctggttacagcaatactgctacagagtggagccaaccaaggttcagaaatcaagttgaagaagatgctgaggacagtggagaagctgatgatgaagaaaaaccagaaatacataagcctggacagaactcgttttccaaaagtacaaattcctctgatgtttcagctaagtcaggtgcagttacctttagcagccaaggacgagtaaatccctttaaggtatcagccagttccaaagaaccagccatgtcaatgaattcagcacgttcaactaatattttagacaatatgggcaaatcatccaagaaatccactgcacttagtcgaactacaaataatgaaaagtctcccattataaagcctctgattccaaagccgaagcctaagcaggcatctgcagcatcctatttccagaaaagaaattctcaaactaataaaactgaggaagtgaaagaagaaaatcttaaaaatgtattatctgaaaccccagctatatgtcctcctcaaaacactgaaaaccaaaggccaaagaccgggttccagatgtggttagaagaaaatagaagtaatattttgtctgacaatcctgacttttcagatgaagcagacataataaaagaaggaatgattcgatttagagtattgtcaactgaagaaagaaaggtgtgggctaacaaagccaaaggagaaacggcaagtgaaggaactgaagcaaagaagcgaaaacgtgtggttgatgaaagtgatgaaacagaaaaccaggaagaaaaagcaaaagagaacctgaatttgtctaaaaagcagaaacctttagatttttctacaaatcagaaactatcagcttttgcatttaagcaggagtaaaggaagaaagtgaccctagggaagtaatggatttttttttactcatctttgaatatagactcgagtctttgggaaactcattatatatatattttttaaagagtttgaagcaactgtttgtctttataagataatgtagtaattatattggtgtaggtaacaggacatatgtaaaaactatcatctttgcagattactctgcctccaaatgcagggcctttcagagatgcattgtgattgtaattactgagttgaagctccaaccaatttgaatttgtttcttaaccttgaaaaatcattaaagccaaggtattaaaacctttgtgcattaataccttctaggggtttggttcatttggtttttgtcatgtgcaaggaaggacaatagtcctctttccaagtgtgttagcatagacttctctatatgtttctactagacctaggggatgacgtcttttaataatactggccctaaacatgtaaataatcttgtaggtgagactttttcttttgtgtttcggaaatttcctatgtggctttcagttgtctgtttgtatagcctggatttttttgaggtaaatgaaactttctcatttgtatatttggcttgatatggtcttaatattatctttccacgaaatggatatatttctagaaaatatatatttactaccataatttctaccaccacccccattttgctctgcattatacacagtagagaagaactgaagacactgctgtgacagtattgcagtccaaggcatcatgtgctcttggtgggatactctgattatcagcatcaacagtactttactgagcaagactttgaaggcctgagaagagagcaaagttatggaaagtatttaactcttattttatattgaacaaacaaggtttaatcatgtcatacatttttggttttctaagcagagactaatacaaatgcagccacataaaggcagtgtactgggggtgggagggaaggaaacaatcacataaaatcagctgactcaaaattgaggatagttaataggttgaaagggaaaaagtatgttgaaaatttagacataaatgaaccaagaatattccttatctggtgatgattaaagttaggaaaacatacattttttattttttaattagtagctgctatcagagacattatagcacagtggttatgagcacagattccaaagccagattacctaggttcggagacccgcttctctacctactactaatagttgggtcatgttgggccggtgacccaaattctagccttcattcactcatctgtaaaatggatataatgatagtacctactttataggttgttatgagaattgaatgaaatgaaagcccttagtttctgacacatagtaatcttttatataaatgttagttactattctgataatgatgatgctgttggttatttcatcttgctttgtcattaggtttgattctgaatactatacaaactaattttgatttcaagatcttaagtaaaggtttatttatagtacattggaaagcatgtttgtagacatgtattttgtgtttggttcctcaacttgctttgtatatattttataatactaggttgatataaaagtaaatgcagtttcgccatttcagtggcaaaaaccgcgatttcttttgtgccaacctaatgcttaaggatataatctgtgtatattgtatttcagattcatagcaacctaataacaaggatttacaaaagggtttttacttccctacttttttttggctgaaggaaggtttttgtattgacttggtttaacttacaaatcagaactttgaaaccaagaaacattatccttatttctctgctatataatagtaaacctgtttttttccagtgttctttttttttttttccagagaattgggactgaatagtatgaaagtgaaaatggaaataaattaattattaatcatcatcatatcaataa

SEQ ID NO: 431156 - DNA, 3078 bp, Homo sapiens
  misc_feature (3034)..(3034): n is a, c, g, or t
  misc_feature (3078)..(3078): n is a, c, g, or t
cgagccgaagcgcgggaagcagctcttgtggatcctcagtggcggaggctcggtcacccggataggtaaaggaaaacatgcctgccacacggaagccaatgagatatgggcatacagagggacacacggaggtctgttttgatgattctgggagttttattgtgacttgtggaagtgatggtgatgtgaggatttgggaagacttggatgatgatgatcctaagttcattaatgttggagaaaaggcatattcatgtgctttgaagagtggaaaactggtcactgcagtttctaataatactattcaagtccacacatttcctgaaggagttccagatggtatattgactcgcttcactacaaatgcaaaccatgtggtctttaatggggatggtactaaaattgctgctggatctagtgattttctagtcaaaattgtggatgtgatggatagcagccaacagaaaacatttcgaggacatgatgcccctgttttaagtctttcctttgatcctaaggacatctttctggcatcagctagttgtgatggatctgtcagagtgtggcaaatttcagatcagacatgtgctattagttggccactgctacaaaaatgcaacgatgtgataaatgcaaaatcaatctgcagacttgcttggcagccaaaaagtgggaagttactggcaattcctgtggaaaaatctgttaagctatatagaagagaatcttggagtcatcaatttgatctttcagataatttcatctctcagaccctcaatatagtaacctggtctccctgtgggcaatatttagctgcaggtagtattaatggtctaatcatagtttggaatgtggaaaccaaagactgcatggaaagggtgaaacatgagaaaggttatgcaatttgtggtctggcatggcatcctacttgtggtcgaatatcgtatactgatgcggaaggaaatctagggcttctagagaatgtttgtgaccccagtggaaagacatcaagcagtaaggtatctagcagagtggaaaaggattataatgatctttttgatggagatgatatgagtaatgctggtgattttctaaatgacaatgcagttgagatcccttctttttcaaaagggattataaatgatgatgaggatgatgaagacctcatgatggcttcaggtcgtcctagacagcgaagtcacatcctagaagatgatgaaaactcagttgatatttcaatgctaaaaactggttctagtcttctcaaagaggaggaggaagatggtcaagaaggcagcattcacaatctaccacttgtaacatcccaaaggccattttatgatggacccatgccaactccccggcaaaagccatttcagtcaggttctacaccgttgcatctcactcacagattcatggtgtggaactctattggaattattcgctgctataatgatgagcaagacaatgccatagatgtggagttccatgatacctccatacaccatgcaacacacttatcaaacactttgaattatacaatagcagatctttcccacgaagctattttgttggcatgtgaaagcactgatgaactagcaagcaagcttcactgcctgcactttagttcttgggattcaagcaaagagtggataatagacttgcctcagaatgaggatattgaagccatatgtctcggtcaaggatgggctgctgccgctactagtgccctgcttcttcgattgtttactattggaggggttcaaaaagaggtattcagccttgctggacctgtggtgtcaatggcaggacatggagaacagcttttcattgtttatcacagaggtacaggatttgatggggatcagtgccttggagttcaactgctagagctggggaaaaagaaaaaacaaattttgcatggtgaccctcttcctcttacaaggaaatcctaccttgcatggattgggttttcagctgaaggtaccccttgttacgtggattcagaaggaattgttcgaatgcttaacagaggacttggtaatacgtggactcctatatgtaatacaagagagcactgcaaaggaaaatctgatcactactgggtggttggtatccatgaaaatccccagcaactaaggtgcattccttgtaaaggttctcggtttcccccaacccttccacgccctgctgttgctatattatcctttaagcttccttactgtcagattgcaacagagaaaggacaaatggaggagcaattttggcgttcagttatatttcacaaccaccttgattatttagctaaaaatggttatgaatatgaagagagcactaaaaatcaagcaacaaaagagcaacaggaacttttaatgaaaatgcttgcgctttcttgtaaactggagcgagaattccgttgtgtggaacttgctgatctaatgactcaaaatgctgtgaatttagccattaaatatgcttctcgctctcggaaattaatactggctcaaaaactaagtgaactggctgtagagaaggcagccgaattgacagcaacccaggtggaagaggaagaagaagaagaagatttcagaaaaaagctgaatgctggttacagcaatactgctacagagtggagccaaccaaggttcagaaatcaagttgaagaagatgctgaggacagtggagaagctgatgatgaagaaaaaccagaaatacataagcctggacagaactcgttttccaaaagtacaaattcctctgatgtttcagctaagtcaggtgcagttacctttagcagccaaggacgagtaaatccctttaaggtatcagccagttccaaagaaccagccatgtcaatgaattcagcacgttcaactaatattttagacaatatgggcaaatcatccaagaaatccactgcacttagtcgaactacaaataatgaaaagtctcccattataaagcctctgattccaaagccgaagcctaagcagcatttgcagcatctattcagaaagaatctaactataactgngagtgaagaagaaatttaaagttattgaaccctttgctctcaan

SEQ ID NO: 431157 - DNA, 4062 bp, Homo sapiens
cgagccgaagcgcgggaagcagctcttgtggatcctcagtggcggaggctcggtcacccggataggtaaaggaaaacatgcctgccacacggaagccaatgagatatgggcatacagagggacacacggaggtctgttttgatgattctgggagttttattgtgacttgtggaagtgatggtgatgtgaggatttgggaagacttggatgatgatgatcctaagttcattaatgttggagaaaaggcatattcatgtgctttgaagagtgggccgagatcgcgccactgccctccagcctgggtacacagcaagactccatctcgaaaaaagtggcatagttttcactgaaactcagttttttcactttatttgtgtaaattttagtcatatcaaatccaatgttttttctttttttagttaggtcttactttatatggttaatgaaattttacgtaataatcttagattatttgcttctgttttgtgttttgcttttgaaagcaaagttgaatccttggtatgtataatatatttgaaatagggttcctttaacaacatgtagctatgtctccaagtgatttttctgttggtgtttaggtaccccttgttacgtggattcagaaggaattgttcgaatgcttaacagaggacttggtaatacgtggactcctatatgtaatacaagagagcactgcaaaggaaaatctgatcactactgggtggttggtatccatgaaaatccccagcaactaaggtgcattccttgtaaaggttctcggtttcccccaacccttccacgccctgctgttgctatattatcctttaagcttccttactgtcagattgcaacagagaaaggacaaatggaggagcaattttggcgttcagttatatttcacaaccaccttgattatttagctaaaaatggttatgaatatgaagagagcactaaaaatcaagcaacaaaagagcaacaggaacttttaatgaaaatgcttgcgctttcttgtaaactggagcgagaattccgttgtgtggaacttgctgatctaatgactcaaaatgctgtgaatttagccattaaatatgcttctcgctctcggaaattaatactggctcaaaaactaagtgaactggctgtagagaaggcagccgaattgacagcaacccaggtggaagaggaagaagaagaagaagatttcagaaaaaagctgaatgctggttacagcaatactgctacagagtggagccaaccaaggttcagaaatcaagttgaagaagatgctgaggacagtggagaagctgatgatgaagaaaaaccagaaatacataagcctggacagaactcgttttccaaaagtacaaattcctctgatgtttcagctaagtcaggtgcagttacctttagcagccaaggacgagtaaatccctttaaggtatcagccagttccaaagaaccagccatgtcaatgaattcagcacgttcaactaatattttagacaatatgggcaaatcatccaagaaatccactgcacttagtcgaactacaaataatgaaaagtctcccattataaagcctctgattccaaagccgaagcctaagcaggcatctgcagcatcctatttccagaaaagaaattctcaaactaataaaactgaggaagtgaaagaagaaaatcttaaaaatgtattatctgaaaccccagctatatgtcctcctcaaaacactgaaaaccaaaggccaaagaccgggttccagatgtggttagaagaaaatagaagtaatattttgtctgacaatcctgacttttcagatgaagcagacataataaaagaaggaatgattcgatttagagtattgtcaactgaagaaagaaaggtgtgggctaacaaagccaaaggagaaacggcaagtgaaggaactgaagcaaagaagcgaaaacgtgtggttgatgaaagtgatgaaacagaaaaccaggaagaaaaagcaaaagagaacctgaatttgtctaaaaagcagaaacctttagatttttctacaaatcagaaactatcagcttttgcatttaagcaggagtaaaggaagaaagtgaccctagggaagtaatggatttttttttactcatctttgaatatagactcgagtctttgggaaactcattatatatatattttttaaagagtttgaagcaactgtttgtctttataagataatgtagtaattatattggtgtaggtaacaggacatatgtaaaaactatcatctttgcagattactctgcctccaaatgcagggcctttcagagatgcattgtgattgtaattactgagttgaagctccaaccaatttgaatttgtttcttaaccttgaaaaatcattaaagccaaggtattaaaacctttgtgcattaataccttctaggggtttggttcatttggtttttgtcatgtgcaaggaaggacaatagtcctctttccaagtgtgttagcatagacttctctatatgtttctactagacctaggggatgacgtcttttaataatactggccctaaacatgtaaataatcttgtaggtgagactttttcttttgtgtttcggaaatttcctatgtggctttcagttgtctgtttgtatagcctggatttttttgaggtaaatgaaactttctcatttgtatatttggcttgatatggtcttaatattatctttccacgaaatggatatatttctagaaaatatatatttactaccataatttctaccaccacccccattttgctctgcattatacacagtagagaagaactgaagacactgctgtgacagtattgcagtccaaggcatcatgtgctcttggtgggatactctgattatcagcatcaacagtactttactgagcaagactttgaaggcctgagaagagagcaaagttatggaaagtatttaactcttattttatattgaacaaacaaggtttaatcatgtcatacatttttggttttctaagcagagactaatacaaatgcagccacataaaggcagtgtactgggggtgggagggaaggaaacaatcacataaaatcagctgactcaaaattgaggatagttaataggttgaaagggaaaaagtatgttgaaaatttagacataaatgaaccaagaatattccttatctggtgatgattaaagttaggaaaacatacattttttattttttaattagtagctgctatcagagacattatagcacagtggttatgagcacagattccaaagccagattacctaggttcggagacccgcttctctacctactactaatagttgggtcatgttgggccggtgacccaaattctagccttcattcactcatctgtaaaatggatataatgatagtacctactttataggttgttatgagaattgaatgaaatgaaagcccttagtttctgacacatagtaatcttttatataaatgttagttactattctgataatgatgatgctgttggttatttcatcttgctttgtcattaggtttgattctgaatactatacaaactaattttgatttcaagatcttaagtaaaggtttatttatagtacattggaaagcatgtttgtagacatgtattttgtgtttggttcctcaacttgctttgtatatattttataatactaggttgatataaaagtaaatgcagtttcgccatttcagtggcaaaaaccgcgatttcttttgtgccaacctaatgcttaaggatataatctgtgtatattgtatttcagattcatagcaacctaataacaaggatttacaaaagggtttttacttccctacttttttttggctgaaggaaggtttttgtattgacttggtttaacttacaaatcagaactttgaaaccaagaaacattatccttatttctctgctatataatagtaaacctgtttttttccagtgttctttttttttttttccagagaattgggactgaatagtatgaaagtgaaaatggaaataaattaattattaatcatcatcatatcaataa

SEQ ID NO: 431158 - DNA, 3613 bp, Homo sapiens
cgagccgaagcgcgggaagcagctcttgtggatcctcagtggcggaggctcggtcacccggataggtaaaggaaaacatgcctgccacacggaagccaatgagatatgggcatacagagggacacacggaggtctgttttgatgattctgggagttttattgtgacttgtggaagtgatggtgatgtgaggatttgggaagacttggatgatgatgatcctaagttcattaatgttggagaaaaggcatattcatgtgctttgaagagtggaaaactggtcactgcagtttctaataatactattcaagtccacacatttcctgaaggagttccagatggtatattgactcgcttcactacaaatgcaaaccatgtggtctttaatggggatggtactaaaattgctgctggatctagtgattttctagtcaaaattgtggatgtgatggatagcagccaacagaaaacatttcgaggacatgatgcccctgttttaagtctttcctttgatcctaaggacatctttctggcatcagctagttgtgatggatctgtcagagtgtggcaaatttcagatcagacatgtgctattagttggccactgctacaaaaatgcaacgatgtgataaatgcaaaatcaatctgcagacttgcttggcagccaaaaagtgggaagttactggcaattcctgtggaaaaatctgttaagctatatagaagagaatcttggagtcatcaatttgatctttcagataatttcatctctcagaccctcaatatagtaacctggtctccctgtgggcaatatttagctgcaggtagtattaatggtctaatcatagtttggaatgtggaaaccaaagactgcatggaaagggtgaaacatgagaaaggttatgcaatttgtggtctggcatggcatcctacttgtggtcgaatatcgtatactgatgcggaaggaaatctagggcttctagagaatgtttgtgaccccagtggaaagacatcaagcagtaaggtatctagcagagtggaaaaggattataatgatctttttgatggagatgatatgagtaatgctggtgattttctaaatgacaatgcagttgagatcccttctttttcaaaagggattataaatgatgatgaggatgatgaagacctcatgatggcttcaggtcgtcctagacagcgaagtcacatcctagaagatgatgaaaactcagttgatatttcaatgctaaaaactggttctagtcttctcaaagaggaggaggaagatggtcaagaaggcagcattcacaatctaccacttgtaacatcccaaaggccattttatgatggacccatgccaactccccggcaaaagccatttcagtcaggttctacaccgttgcatctcactcacagattcatgcaagcttcactgcctgcactttagttcttgggattcaagcaaagagtggataatagacttgcctcagaatgaggatattgaagccatatgtctcggtcaaggatgggctgctgccgctactagtgccctgcttcttcgattgtttactattggaggggttcaaaaagaggtattcagccttgctggacctgtggtgtcaatggcaggacatggagaacagcttttcattgtttatcacagaggtacaggatttgatggggatcagtgccttggagttcaactgctagagctggggaaaaagaaaaaacaaattttgcatggtgaccctcttcctcttacaaggaaatcctaccttgcatggattgggttttcagctgaaggtaccccttgttacgtggattcagaaggaattgttcgaatgcttaacagaggacttggtaatacgtggactcctatatgtaatacaagagagcactgcaaaggaaaatctgatcactactgggtggttggtatccatgaaaatccccagcaactaaggtgcattccttgtaaaggttctcggtttcccccaacccttccacgccctgctgttgctatattatcctttaagcttccttactgtcagattgcaacagagaaaggacaaatggaggagcaattttggcgttcagttatatttcacaaccaccttgattatttagctaaaaatggttatgaatatgaagagagcactaaaaatcaagcaacaaaagagcaacaggaacttttaatgaaaatgcttgcgctttcttgtaaactggagcgagaattccgttgtgtggaacttgctgatctaatgactcaaaatgctgtgaatttagccattaaatatgcttctcgctctcggaaattaatactggctcaaaaactaagtgaactggctgtagagaaggcagccgaattgacagcaacccaggtggaagaggaagaagaagaagaagatttcagaaaaaagctgaatgctggttacagcaatactgctacagagtggagccaaccaaggttcagaaatcaagttgaagaagatgctgaggacagtggagaagctgatgatgaagaaaaaccagaaatacataagcctggacagaactcgttttccaaaagtacaaattcctctgatgtttcagctaagtcaggtgcagttacctttagcagccaaggacgagtaaatccctttaaggtatcagccagttccaaagaaccagccatgtcaatgaattcagcacgttcaactaatattttagacaatatgggcaaatcatccaagaaatccactgcacttagtcgaactacaaataatgaaaagtctcccattataaagcctctgattccaaagccgaagcctaagcaggcatctgcagcatcctatttccagaaaagaaattctcaaactaataaaactgaggaagtgaaagaagaaaatcttaaaaatgtattatctgaaaccccagctatatgtcctcctcaaaacactgaaaaccaaaggccaaagaccgggttccagatgtggttagaagaaaatagaagtaatattttgtctgacaatcctgacttttcagatgaagcagacataataaaagaaggaatgattcgatttagagtattgtcaactgaagaaagaaaggtgtgggctaacaaagccaaaggagaaacggcaagtgaaggaactgaagcaaagaagcgaaaacgtgtggttgatgaaagtgatgaaacagaaaaccaggaagaaaaagcaaaagagaacctgaatttgtctaaaaagcagaaacctttagatttttctacaaatcagaaactatcagcttttgcatttaagcaggagtaaaggaagaaagtgaccctagggaagtaatggatttttttttactcatctttgaatatagactcgagtctttgggaaactcattatatatatattttttaaagagtttgaagcaactgtttgtctttataagataatgtagtaattatattggtgtaggtaacaggacatatgtaaaaactatcatctttgcagattactctgcctccaaatgcagggcctttcagagatgcattgtgattgtaattactgagttgaagctccaaccaatttgaatttgtttcttaaccttgaaaaatcattaaagccaaggtattaaaacctttgtgcatta

SEQ ID NO: 431159 - DNA, 2083 bp, Homo sapiens
gtctctccgtcttcctgttccaaaccacgtggacgcgtctgggctgctggaggcagcccgagccgccgccgtcggtgtcgccgccaccaccaccatcggagtcacgagtcccgcgtctgtccgaagtcgccgctctcgggctgctcacgtctcttcggagagcgcgcacatggcgactcaggcgcactccctcagctacgcagggtgcaacttcttgcgccaacgtctggtcctgtctaccctgagcgggcgccccgtcaaaatccgaaagattcgggccagagacgacaacccgggcctccgagattttgaagccagcttcataaggctattggacaaaataacgaatggttctcgaattgaaataaaccaaacaggaacaaccttatattatcagcctggcctcctgtatggtggatctgtggaacatgactgtagcgtccttcgtggcattgggtattacctggagagtcttctttgcttggctccatttatgaagcacccgttaaaaatagttctacgaggagtgaccaatgatcaggttgacccttcagttgatgttcttaaggcaacagcactccctttgttgaaacaatttgggattgatggtgaatcatttgaactgaagattgtgcgacggggaatgcctcccggaggaggaggcgaagtggttttctcatgtcctgtgaggaaggtcttgaagcccattcaactcacagatccaggaaaaatcaaacgtattagaggaatggcgtactctgtacgtgtgtcacctcagatggcgaaccggattgtggattctgcaaggagcatcctcaacaagttcatacctgatatctatatttacacagatcacatgaaaggagtcaactctgggaagtctccgggctttgggttgtcactggttgctgagaccaccagtggcaccttcctcagtgctgaactggcctccaacccccagggccagggagcagcagtacttccagaggaccttggcaggaactgtgcccggctgctgctggaggaaatctacaggggtggatgcgtagactcgaccaaccaaagcctggcgctactactcatgacccttggacagcaggatgtttccaaagtcctgctaggccctctctctccctacacgatagaatttttgcggcatttgaagagctttttccagattatgtttaaaattgaaaccaagccatgtggtgaagaactcaagggtggggataaagtgctgatgacctgtgttggcattggtttctccaaccttagcaagaccctcaagtgataaccatcacaagataaggccccagtgcctacagacaaagcagaagctgccacggacaccaatgggaccaagtccaaatggattaatccaggacagaatagccacttgcttaattttctgtgaagaaatatcaatatacaaataaaagacatccctgtagcatatggtttccagctgtttctccagtggcattgccattgcccaggaggggcccagtcaccatgagagctcccttgccttacctggaggaagaatgtgccttcaggccacagtcgtgctgctagaacagtctcatagctgcagttcagctgtgcttcctcagcctactatcataggcttcctcagccctctgtcatatggctgttttgcaaacctgtggagtctgttactgttctttctgcaaggactcacctccttgagccttggtttttgttgtagggattaaatgagataatatgagtggcagctcttcatgagtcctgcagtgctaagcaaatgtcagaaattggtgtattagactatttatctttgatcttctgaatggattgctgtcatggacacggacacggatcttcatctggttcattgtatttatatgtgagggatggatggctgcggggctccaagtaagttattgggatgttttttatattccaggtgtgctgtacattcttattttattttcacaatagctctgtgatgtaaatgctatctccatgagaaaattcataaagggtgttttgttcctttgaaatgtataatgtaaagacattaaatctcctcatttaagga

SEQ ID NO: 431160 - DNA, 3347 bp, Homo sapiens
  misc_feature (2279)..(2279): n is a, c, g, or t
  misc_feature (2467)..(2467): n is a, c, g, or t
  misc_feature (2523)..(2524): n is a, c, g, or t
  misc_feature (2612)..(2612): n is a, c, g, or t
  misc_feature (2697)..(2697): n is a, c, g, or t
gtctctccgtcttcctgttccaaaccacgtggacgcgtctgggctgctggaggcagcccgagccgccgccgtcggtgtcgccgccaccaccaccatcggagtcacgagtcccgcgtctgtccgaagtcgccgctctcgggctgctcacgtctcttcggagagcgcgcacatggcgactcaggcgcactccctcagctacgcagggtgcaacttcttgcgccaacgtctggtcctgtctaccctgagcgggcgccccgtcaaaatccgaaagattcgggccagagacgacaacccgggcctccgagattttgaagccagcttcataaggctattggacaaaataacgaatggttctcgaattgaaataaaccaaacaggaacaaccttatattatcagcctggcctcctgtatggtggatctgtggaacatgactgtagcgtccttcgtggcattgggtattacctggagagtcttctttgcttggctccatttatgaagcacccgttaaaaatagttctacgaggagtgaccaatgatcaggttgacccttcagttgatgttcttaaggcaacagcactccctttgttgaaacaatttgggattgatggtgaatcatttgaactgaagattgtgcgacggggaatgcctcccggaggaggaggcgaagtggttttctcatgtcctgtgaggaaggtcttgaagcccattcaactcacagatccaggaaaaatcaaacgtattagaggaatggcgtactctgtacgtgtgtcacctcagatggcgaaccggattgtggattctgcaaggagcatcctcaacaagttcatacctgatatctatatttacacagatcacatgaaaggagtcaactctgggaagtctccgggctttgggttgtcactggttgctgagaccaccagtggcaccttcctcagtgctgaactggcctccaacccccagggccagggagcagcagtacttccagaggaccttggcaggaactgtgcccggctgctgctggaggaaatctacaggggtggatgcgtagactcgaccaaccaaagcctggcgctactactcatgacccttggacagcaggatgtttccaaagtcctgctaggccctctctctccctacacgatagaatttttgcggcatttgaagagctttttccagattatgtttaaaattgaaaccaagccatgtggtgaagaactcaagggtggggataaagtgctgatgacctgtgttggcattggtttctccaaccttagcaagaccctcaagtgataaccatcacaagataaggccccagtgcctacagacaaagcagaagctgccacggacaccaatgggaccaagtccaaatggattaatccaggacagaatagccacttgcttaattttctgtgaagaaatatcaatatacaaataaaagacatccctgtagcatatggtttccagctgtttctccagtggcattgccattgcccaggaggggcccagtcaccatgagagctcccttgccttacctggaggaagaatgtgccttcaggccacagtcgtgctgctagaacagtctcatagctgcagttcagctgtgcttcctcagcctactatcataggcttcctcagccctctgtcatatggctgttttgcaaacctgtggagtctgttactgttctttctgcaaggactcacctccttgagccttggtttttgttgtagggattaaatgagataatatgagtggcagctcttcatgagtcctgcagtgctaagcaaatgtcagaaattggtgtattagactatttatctttgatcttctgaatggattgctgtcatggacacggacacggatcttcatctggttcattgtatttatatgtgagggatggatggctgcggggctccaagagcagcctcctgaagtgagggtggcaagtatgtgacagggcacccacaaaggcagacgaggactctgagaaccaacaggacttctctggtcttattctgaggctaagacaaaaaccgcacctgagccagatctctcagcctggcagctccaggacccgtgggccctgccactggcccatctcaacggctaggacctagagcatcatcaagctgcaggttaaacaggttggttggttctgatttgactgcacctctacaaggacctatggctgcacttgttgatactttcccgaggagccacaacactgagcaatgaggggaggagcatgtgttagttcattcatcaagtcctaaatgttanctactatgtgccaggtgctgagccaggcaccagagataccatgatgaacaagacacataaatcttaccctcattgagcttacaccatgtgaaagagaagtatgaaataattatacgttatttttttttagtttttgagatggagtttcacttttgtcccccaggctggagtgcggtggtgtgacctcngctcactgcaacctctgcctcccaggttcaagcgattctcctgcctcagcctcccnngtagctgggattacaggcacctgccaccatgcctggctaaattttgtatttttagtagagacgggctttcaccatgttggtcaggctngtcttgaactcctggcctcaggtgatcctcccaccttggcctcccaaagtgctgggattgcaggcgtgagccacggcacctcacnaattacacattattcaactgtaactgtgaaagtgattctaaggaaaaagtacagagagctgtgggaaaacataataggaaatctttgtcattctgtcactattgtctattaggctgtcactgttgtcattgtcacccctaccctctcgcagagagtggttcccatttgccagagctcatttattgtcctgaaggtctgtgaaaagatgacaaagtcgtgttgccttctttccactttcccaagtctcacgtgagcacccctaactggcagaatcaattcacacccacaagcctagctgcaaggggacctgggaaatgtattcccagctttccaacctctccacccaggagatgaaacagccaatttaggccaggtgcaatggcttacacatgtaaaaccagcactatgggaggctgaggagggaagattacttgagcccaggagtttgagaccggcctggacaacagggcgagaccatcatctctacaaaaaatacaaaaaaaattagctaggcgtggtgtcctgtgcctgtggtcccagctcctcgggaggctgaggcaggaggatcgcttgagatcgaggctgcagtgagccgtgatcgcgccgctgcactccagtctgggtgacagcgagaccctatctcaaaaaag

SEQ ID NO: 431161 - DNA, 1893 bp, Homo sapiens
gtctctccgtcttcctgttccaaaccacgtggacgcgtctgggctgctggaggcagcccgagccgccgccgtcggtgtcgccgccaccaccaccatcggagtcacgagtcccgcgtctgtccgaagtcgccgctctcgggctgctcacgtctcttcggagagcgcgcacatggcgactcaggcgcactccctcagctacgcagggtgcaacttcttgcgccaacgtctggtcctgtctaccctgagcgggcgccccgtcaaaatccgaaagattcgggccagagacgacaacccgggcctccgagattttgaagccagcttcataaggctattggacaaaataacgaatggttctcgaattgaaataaaccaaacaggaacaaccttatattatcagcctggcctcctgtatggtggatctgtggaacatgactgtagcgtccttcgtggcattgggtattacctggagagtcttctttgcttggctccatttatgaagcacccgttaaaaatagttctacgaggagtgaccaatgatcaggttgacccttcagttgatgttcttaaggcaacagcactccctttgttgaaacaatttgggattgatggtgaatcatttgaactgaagattgtgcgacggggaatgcctcccggaggaggaggcgaagtggttttctcatgtcctgtgaggaaggtcttgaagcccattcaactcacagatccaggaaaaatcaaacgtattagaggaatggcgtactctgtacgtgtgtcacctcagatggcgaaccggattgtggattctgcaaggagcatcctcaacaagttcatacctgatatctatatttacacagatcacatgaaaggagtcaactctgggaagtctccgggctttgggttgtcactggttgctgagaccaccagtggcaccttcctcagtgctgaactggcctccaacccccagggccagggagcagcagtacttccagaggaccttggcaggaactgtgcccggctgctgctggaggaaatctacaggggtggatgcgtagactcgaccaaccaaagcctggcgctactactcatgacccttggacagcaggatgtttccaaagtcctgctaggccctctctctccctacacgatagaatttttgcggcatttgaagagctttttccagattatgtttaaaattgaaaccaagccatgtggtgaagaactcaagggtggggataaagtgctgatgacctgtgttggcattggtttctccaaccttagcaagaccctcaagtgataaccatcacaagataaggccccagtgcctacagacaaagcagaagctgccacggacaccaatgggaccaagtccaaatggattaatccaggacagaatagccacttgcttaattttctgtgaagaaatatcaatatacaaataaaagacatccctgtagcatatggtttccagctgtttctccagtggcattgccattgcccaggaggggcccagtcaccatgagagctcccttgccttacctggaggaagaatgtgccttcaggccacagtcgtgctgctagaacagtctcatagctgcagttcagctgtgcttcctcagcctactatcataggcttcctcagccctctgtcatatggctgttttgcaaacctgtggagtctgttactgttctttctgcaaggactcacctccttgagccttggtttttgttgtagggattaaatgagataatatgagtggcagctcttcatgagtcctgcagtgctaagcaaatgtcagaaattggtgtaaaatgctatctccatgagaaaattcataaagggtgttttgttcctttgaaatgtataatgtaaagacattaaatctcctcatttaagga

SEQ ID NO: 431162 - DNA, 1835 bp, Homo sapiens
gtctctccgtcttcctgttccaaaccacgtggacgcgtctgggctgctggaggcagcccgagccgccgccgtcggtgtcgccgccaccaccaccatcggagtcacgagtcccgcgtctgtccgaagtcgccgctctcgggctgctcacgtctcttcggagagcgcgcacatggcgactcaggcgcactccctcagctacgcagggtgcaacttcttgcgccaacgtctggtcctgtctaccctgagcgggcgccccgtcaaaatccgaaagattcgggccagagacgacaacccgggcctccgaggttgatgttcttaaggcaacagcactccctttgttgaaacaatttgggattgatggtgaatcatttgaactgaagattgtgcgacggggaatgcctcccggaggaggaggcgaagtggttttctcatgtcctgtgaggaaggtcttgaagcccattcaactcacagatccaggaaaaatcaaacgtattagaggaatggcgtactctgtacgtgtgtcacctcagatggcgaaccggattgtggattctgcaaggagcatcctcaacaagttcatacctgatatctatatttacacagatcacatgaaaggagtcaactctgggaagtctccgggctttgggttgtcactggttgctgagaccaccagtggcaccttcctcagtgctgaactggcctccaacccccagggccagggagcagcagtacttccagaggaccttggcaggaactgtgcccggctgctgctggaggaaatctacaggggtggatgcgtagactcgaccaaccaaagcctggcgctactactcatgacccttggacagcaggatgtttccaaagtcctgctaggccctctctctccctacacgatagaatttttgcggcatttgaagagctttttccagattatgtttaaaattgaaaccaagccatgtggtgaagaactcaagggtggggataaagtgctgatgacctgtgttggcattggtttctccaaccttagcaagaccctcaagtgataaccatcacaagataaggccccagtgcctacagacaaagcagaagctgccacggacaccaatgggaccaagtccaaatggattaatccaggacagaatagccacttgcttaattttctgtgaagaaatatcaatatacaaataaaagacatccctgtagcatatggtttccagctgtttctccagtggcattgccattgcccaggaggggcccagtcaccatgagagctcccttgccttacctggaggaagaatgtgccttcaggccacagtcgtgctgctagaacagtctcatagctgcagttcagctgtgcttcctcagcctactatcataggcttcctcagccctctgtcatatggctgttttgcaaacctgtggagtctgttactgttctttctgcaaggactcacctccttgagccttggtttttgttgtagggattaaatgagataatatgagtggcagctcttcatgagtcctgcagtgctaagcaaatgtcagaaattggtgtattagactatttatctttgatcttctgaatggattgctgtcatggacacggacacggatcttcatctggttcattgtatttatatgtgagggatggatggctgcggggctccaagtaagttattgggatgttttttatattccaggtgtgctgtacattcttattttattttcacaatagctctgtgatgtaaatgctatctccatgagaaaattcataaagggtgttttgttcctttgaaatgtataatgtaaagacattaaatctcctcatttaagga

SEQ ID NO: 431163 - DNA, 1436 bp, Homo sapiens
gtaaagcccttgcccttatagagtgtgtggtctcattgaagagcaagaacaaaatgtgcatatgtgaagagagatgtatgaatgacatccttaactccaggctgcagtactctgtacgtgtgtcacctcagatggcgaaccggattgtggattctgcaaggagcatcctcaacaagttcatacctgatatctatatttacacagatcacatgaaaggagtcaactctgggaagtctccgggctttgggttgtcactggttgctgagaccaccagtggcaccttcctcagtgctgaactggcctccaacccccagggccagggagcagcagtacttccagaggaccttggcaggaactgtgcccggctgctgctggaggaaatctacaggggtggatgcgtagactcgaccaaccaaagcctggcgctactactcatgacccttggacagcaggatgtttccaaagtcctgctaggccctctctctccctacacgatagaatttttgcggcatttgaagagctttttccagattatgtttaaaattgaaaccaagccatgtggtgaagaactcaagggtggggataaagtgctgatgacctgtgttggcattggtttctccaaccttagcaagaccctcaagtgataaccatcacaagataaggccccagtgcctacagacaaagcagaagctgccacggacaccaatgggaccaagtccaaatggattaatccaggacagaatagccacttgcttaattttctgtgaagaaatatcaatatacaaataaaagacatccctgtagcatatggtttccagctgtttctccagtggcattgccattgcccaggaggggcccagtcaccatgagagctcccttgccttacctggaggaagaatgtgccttcaggccacagtcgtgctgctagaacagtctcatagctgcagttcagctgtgcttcctcagcctactatcataggcttcctcagccctctgtcatatggctgttttgcaaacctgtggagtctgttactgttctttctgcaaggactcacctccttgagccttggtttttgttgtagggattaaatgagataatatgagtggcagctcttcatgagtcctgcagtgctaagcaaatgtcagaaattggtgtattagactatttatctttgatcttctgaatggattgctgtcatggacacggacacggatcttcatctggttcattgtatttatatgtgagggatggatggctgcggggctccaagtaagttattgggatgttttttatattccaggtgtgctgtacattcttattttattttcacaatagctctgtgatgtaaatgctatctccatgagaaaattcataaagggtgttttgttcctttgaaatgtataatgtaaagacattaaatctcctcatttaagga

SEQ ID NO: 431164 - DNA, 1534 bp, Homo sapiens
acagtgggcagcctcagacctcagaaggacagcacctgcttggtccaaagggtatgagattcaggactgtttgtctaagctgtctgtggtcaaaagtacattctggactgaagagatggtgatgtaactgggctgtgtgtgtattgaaaaatccctctttgctctttcctcatttcagaatgacatccttaactccaggctgcagtactctgtacgtgtgtcacctcagatggcgaaccggattgtggattctgcaaggagcatcctcaacaagttcatacctgatatctatatttacacagatcacatgaaaggagtcaactctgggaagtctccgggctttgggttgtcactggttgctgagaccaccagtggcaccttcctcagtgctgaactggcctccaacccccagggccagggagcagcagtacttccagaggaccttggcaggaactgtgcccggctgctgctggaggaaatctacaggggtggatgcgtagactcgaccaaccaaagcctggcgctactactcatgacccttggacagcaggatgtttccaaagtcctgctaggccctctctctccctacacgatagaatttttgcggcatttgaagagctttttccagattatgtttaaaattgaaaccaagccatgtggtgaagaactcaagggtggggataaagtgctgatgacctgtgttggcattggtttctccaaccttagcaagaccctcaagtgataaccatcacaagataaggccccagtgcctacagacaaagcagaagctgccacggacaccaatgggaccaagtccaaatggattaatccaggacagaatagccacttgcttaattttctgtgaagaaatatcaatatacaaataaaagacatccctgtagcatatggtttccagctgtttctccagtggcattgccattgcccaggaggggcccagtcaccatgagagctcccttgccttacctggaggaagaatgtgccttcaggccacagtcgtgctgctagaacagtctcatagctgcagttcagctgtgcttcctcagcctactatcataggcttcctcagccctctgtcatatggctgttttgcaaacctgtggagtctgttactgttctttctgcaaggactcacctccttgagccttggtttttgttgtagggattaaatgagataatatgagtggcagctcttcatgagtcctgcagtgctaagcaaatgtcagaaattggtgtattagactatttatctttgatcttctgaatggattgctgtcatggacacggacacggatcttcatctggttcattgtatttatatgtgagggatggatggctgcggggctccaagtaagttattgggatgttttttatattccaggtgtgctgtacattcttattttattttcacaatagctctgtgatgtaaatgctatctccatgagaaaattcataaagggtgttttgttcctttgaaatgtataatgtaaagacattaaatctcctcatttaagga

SEQ ID NO: 431165 - DNA, 1808 bp, Homo sapiens
gtctctccgtcttcctgttccaaaccacgtggacgcgtctgggctgctggaggcagcccgagccgccgccgtcggtgtcgccgccaccaccaccatcggagtcacgagtcccgcgtctgtccgaagtcgccgctctcgggctgctcacgtctcttcggagagcgcgcacatggcgactcaggcgcactccctcagctacgcagggtgcaacttcttgcgccaacgtctggtcctgtctaccctgagcgggcgccccgtcaaaatccgaaagattcgggccagagacgacaacccgggcctccgagattttgaagccagcttcataaggctattggacaaaataacgaatggttctcgaattgaaataaaccaaacaggttgatgttcttaaggcaacagcactccctttgttgaaacaatttgggattgatggtgaatcatttgaactgaagaatgacatccttaactccaggctgcagtactctgtacgtgtgtcacctcagatggcgaaccggattgtggattctgcaaggagcatcctcaacaagttcatacctgatatctatatttacacagatcacatgaaaggagtcaactctgggaagtctccgggctttgggttgtcactggttgctgagaccaccagtggcaccttcctcagtgctgaactggcctccaacccccagggccagggagcagcagtacttccagaggaccttggcaggaactgtgcccggctgctgctggaggaaatctacaggggtggatgcgtagactcgaccaaccaaagcctggcgctactactcatgacccttggacagcaggatgtttccaaagtcctgctaggccctctctctccctacacgatagaatttttgcggcatttgaagagctttttccagattatgtttaaaattgaaaccaagccatgtggtgaagaactcaagggtggggataaagtgctgatgacctgtgttggcattggtttctccaaccttagcaagaccctcaagtgataaccatcacaagataaggccccagtgcctacagacaaagcagaagctgccacggacaccaatgggaccaagtccaaatggattaatccaggacagaatagccacttgcttaattttctgtgaagaaatatcaatatacaaataaaagacatccctgtagcatatggtttccagctgtttctccagtggcattgccattgcccaggaggggcccagtcaccatgagagctcccttgccttacctggaggaagaatgtgccttcaggccacagtcgtgctgctagaacagtctcatagctgcagttcagctgtgcttcctcagcctactatcataggcttcctcagccctctgtcatatggctgttttgcaaacctgtggagtctgttactgttctttctgcaaggactcacctccttgagccttggtttttgttgtagggattaaatgagataatatgagtggcagctcttcatgagtcctgcagtgctaagcaaatgtcagaaattggtgtattagactatttatctttgatcttctgaatggattgctgtcatggacacggacacggatcttcatctggttcattgtatttatatgtgagggatggatggctgcggggctccaagtaagttattgggatgttttttatattccaggtgtgctgtacattcttattttattttcacaatagctctgtgatgtaaatgctatctccatgagaaaattcataaagggtgttttgttcctttgaaatgtataatgtaaagacattaaatctcctcatttaagga

SEQ ID NO: 431166 - DNA, 1123 bp, Homo sapiens
aaatcttctttggaaactggctggctgaaaggaagtactatttaatcagattcgatgagaaggtcttaacttcagccctctaggtctgggagattaaaaccttggattctaggtggtagaggataatttttttttgaatgaatttctttttatttatttatttatttttttcctttttaggatagaatttttgcggcatttgaagagctttttccagattatgtttaaaattgaaaccaagccatgtggtgaagaactcaagggtggggataaagtgctgatgacctgtgttggcattggtttctccaaccttagcaagaccctcaagtgataaccatcacaagataaggccccagtgcctacagacaaagcagaagctgccacggacaccaatgggaccaagtccaaatggattaatccaggacagaatagccacttgcttaattttctgtgaagaaatatcaatatacaaataaaagacatccctgtagcatatggtttccagctgtttctccagtggcattgccattgcccaggaggggcccagtcaccatgagagctcccttgccttacctggaggaagaatgtgccttcaggccacagtcgtgctgctagaacagtctcatagctgcagttcagctgtgcttcctcagcctactatcataggcttcctcagccctctgtcatatggctgttttgcaaacctgtggagtctgttactgttctttctgcaaggactcacctccttgagccttggtttttgttgtagggattaaatgagataatatgagtggcagctcttcatgagtcctgcagtgctaagcaaatgtcagaaattggtgtattagactatttatctttgatcttctgaatggattgctgtcatggacacggacacggatcttcatctggttcattgtatttatatgtgagggatggatggctgcggggctccaagtaagttattgggatgttttttatattccaggtgtgctgtacattcttattttattttcacaatagctctgtgatgtaaatgctatctccatgagaaaattcataaagggtgttttgttcctttgaaatgtataatgtaaagacattaaatctcctcatttaagga

SEQ ID NO: 431167 - DNA, 644 bp, Homo sapiens
gacagagaatagaaagtgttcttaggtgttgtgcttcagagggagcctggatcatgacccgcagagaggcaggtgtctttacaccttccaaaattgacttgaaccatttctaggggaagcgtgtgggtaggaagtcagggggtggggttgaggacctccagctttatactttccactgtctctattgtttgggtgtttttgccatgaccttttataataatgaaaaaaatttaattatggtactaattcagtaaattcagttggaaaacaatagatttggaagtcccagtttgttactacagttccacaaatacttgccagctttataactgatttttctctgtcctggaattcaagcagaatgacatccttaactccaggctgcagtactctgtacgtgtgtcacctcagatggcgaaccggattgtggattctgcaaggagcatcctcaacaagttcatacctgatatctatatttacacagatcacatgaaaggagtcaactctgggaagtaagtatctgtgtttttgaagtctgtttctgcagctttttcacatgcctgttctagttgaagttaaaactgccagctctgaggttgcgcagccagaggaagaacaatttcagaattaatttctttctgcct

SEQ ID NO: 431168 - DNA, 2216 bp, Homo sapiens
gtctctccgtcttcctgttccaaaccacgtggacgcgtctgggctgctggaggcagcccgagccgccgccgtcggtgtcgccgccaccaccaccatcggagtcacgagtcccgcgtctgtccgaagtcgccgctctcgggctgctcacgtctcttcggagagcgcgcacatggcgactcaggcgcactccctcagctacgcagggtgcaacttcttgcgccaacgtctggtcctgtctaccctgagcgggcgccccgtcaaaatccgaaagattcgggccagagacgacaacccgggcctccgagattttgaagccagcttcataaggctattggacaaaataacgaatggttctcgaattgaaataaaccaaacaggaacaaccttatattatcagcctggcctcctgtatggtggatctgtggaacatgactgtagcgtccttcgtggcattgggtattacctggagagtcttctttgcttggctccatttatgaagcacccgttaaaaatagttctacgaggagtgaccaatgatcaggttgacccttcagttgatgttcttaaggcaacagcactccctttgttgaaacaatttgggattgatggtgaatcatttgaactgaagattgtgcgacggggaatgcctcccggaggaggaggcgaagtggttttctcatgtcctgtgaggaaggtcttgaagcccattcaactcacagatccaggaaaaatcaaacgtattagaggaatggcgtactctgtacgtgtgtcacctcagatggcgaaccggattgtggattctgcaaggagcatcctcaacaagttcatacctgatatctatatttacacagatcacatgaaaggagtcaactctgggaagtctccgggctttgggttgtcactggttgctgagaccaccagtggcaccttcctcagtgctgaactggcctccaacccccagggccagggagcagcagtacttccagaggaccttggcaggaactgtgcccggctgctgctggaggaaatctacaggggtggatgcgtagactcgaccaaccaaagcctggcgctactactcatgacccttggacagcaggatgtttccaaagtcctgctaggccctctctctccctacacgatagaatttttgcggcatttgaagagctttttccagattatgtttaaaattgaaaccaagccatgtggtgaagaactcaagggtggggataaagtgctgatgacctgtgttggcattggtttctccaaccttagcaagaccctcaagtgataaccatcacaagataaggccccagtgcctacagacaaagcagaagctgccacggacaccaatgggaccaagtccaaatggattaatccaggacagaatagccacttgcttaattttctgtgaagaaatatcaatatacaaataaaagacatccctgtagcatatggtttccagctgtttctccagtggcattgccattgcccaggaggggcccagtcaccatgagagctcccttgccttacctggaggaagaatgtgccttcaggccacagtcgtgctgctagaacagtctcatagctgcagttcagctgtgcttcctcagcctactatcataggcttcctcagccctctgtcatatggctgttttgcaaacctgtggagtctgttactgttctttctgcaaggactcacctccttgagccttggtttttgttgtagggattaaatgagataatatgagtggcagctcttcatgagtcctgcagtgctaagcaaatgtcagaaattggtgtattagactatttatctttgatcttctgaatggattgctgtcatggacacggacacggatcttcatctggttcattgtatttatatgtgagggatggatggctgcggggctccaagtaagttattgggatgttttttatattccaggtgtgctgtacattcttattttattttcacaatagctctgtgatgtaaatgctatctccatgagaaaattcataaagggtgttttgttcctttgaaatgtataatgtaaagacattaaatctcctcatttaaggatctaagtgtaataagtgtaatagagtcagggtctgggattttacccttgcaagctaataagttagattattacttttttattgatgctaccagaagacatgaggatcctgggtcagagataaagaactttact

SEQ ID NO: 431169 - DNA, 1907 bp, Homo sapiens
gtctctccgtcttcctgttccaaaccacgtggacgcgtctgggctgctggaggcagcccgagccgccgccgtcggtgtcgccgccaccaccaccatcggagtcacgagtcccgcgtctgtccgaagtcgccgctctcgggctgctcacgtctcttcggagagcgcgcacatggcgactcaggcgcactccctcagctacgcagggtgcaacttcttgcgccaacgtctggtcctgtctaccctgagcgggcgccccgtcaaaatccgaaagattcgggccagagacgacaacccgggcctccgagattttgaagccagcttcataaggctattggacaaaataacgaatggttctcgaattgaaataaaccaaacaggttgatgttcttaaggcaacagcactccctttgttgaaacaatttgggattgatggtgaatcatttgaactgaagattgtgcgacggggaatgcctcccggaggaggaggcgaagtggttttctcatgtcctgtgaggaaggtcttgaagcccattcaactcacagatccaggaaaaatcaaacgtattagaggaatggcgtactctgtacgtgtgtcacctcagatggcgaaccggattgtggattctgcaaggagcatcctcaacaagttcatacctgatatctatatttacacagatcacatgaaaggagtcaactctgggaagtctccgggctttgggttgtcactggttgctgagaccaccagtggcaccttcctcagtgctgaactggcctccaacccccagggccagggagcagcagtacttccagaggaccttggcaggaactgtgcccggctgctgctggaggaaatctacaggggtggatgcgtagactcgaccaaccaaagcctggcgctactactcatgacccttggacagcaggatgtttccaaagtcctgctaggccctctctctccctacacgatagaatttttgcggcatttgaagagctttttccagattatgtttaaaattgaaaccaagccatgtggtgaagaactcaagggtggggataaagtgctgatgacctgtgttggcattggtttctccaaccttagcaagaccctcaagtgataaccatcacaagataaggccccagtgcctacagacaaagcagaagctgccacggacaccaatgggaccaagtccaaatggattaatccaggacagaatagccacttgcttaattttctgtgaagaaatatcaatatacaaataaaagacatccctgtagcatatggtttccagctgtttctccagtggcattgccattgcccaggaggggcccagtcaccatgagagctcccttgccttacctggaggaagaatgtgccttcaggccacagtcgtgctgctagaacagtctcatagctgcagttcagctgtgcttcctcagcctactatcataggcttcctcagccctctgtcatatggctgttttgcaaacctgtggagtctgttactgttctttctgcaaggactcacctccttgagccttggtttttgttgtagggattaaatgagataatatgagtggcagctcttcatgagtcctgcagtgctaagcaaatgtcagaaattggtgtattagactatttatctttgatcttctgaatggattgctgtcatggacacggacacggatcttcatctggttcattgtatttatatgtgagggatggatggctgcggggctccaagtaagttattgggatgttttttatattccaggtgtgctgtacattcttattttattttcacaatagctctgtgatgtaaatgctatctccatgagaaaattcataaagggtgttttgttcctttgaaatgtataatgtaaagacattaaatctcctcatttaagga

SEQ ID NO: 431170 - DNA, 1380 bp, Homo sapiens
gtaaagcccttgcccttatagagtgtgtggtctcattgaagagcaagaacgtactctgtacgtgtgtcacctcagatggcgaaccggattgtggattctgcaaggagcatcctcaacaagttcatacctgatatctatatttacacagatcacatgaaaggagtcaactctgggaagtctccgggctttgggttgtcactggttgctgagaccaccagtggcaccttcctcagtgctgaactggcctccaacccccagggccagggagcagcagtacttccagaggaccttggcaggaactgtgcccggctgctgctggaggaaatctacaggggtggatgcgtagactcgaccaaccaaagcctggcgctactactcatgacccttggacagcaggatgtttccaaagtcctgctaggccctctctctccctacacgatagaatttttgcggcatttgaagagctttttccagattatgtttaaaattgaaaccaagccatgtggtgaagaactcaagggtggggataaagtgctgatgacctgtgttggcattggtttctccaaccttagcaagaccctcaagtgataaccatcacaagataaggccccagtgcctacagacaaagcagaagctgccacggacaccaatgggaccaagtccaaatggattaatccaggacagaatagccacttgcttaattttctgtgaagaaatatcaatatacaaataaaagacatccctgtagcatatggtttccagctgtttctccagtggcattgccattgcccaggaggggcccagtcaccatgagagctcccttgccttacctggaggaagaatgtgccttcaggccacagtcgtgctgctagaacagtctcatagctgcagttcagctgtgcttcctcagcctactatcataggcttcctcagccctctgtcatatggctgttttgcaaacctgtggagtctgttactgttctttctgcaaggactcacctccttgagccttggtttttgttgtagggattaaatgagataatatgagtggcagctcttcatgagtcctgcagtgctaagcaaatgtcagaaattggtgtattagactatttatctttgatcttctgaatggattgctgtcatggacacggacacggatcttcatctggttcattgtatttatatgtgagggatggatggctgcggggctccaagtaagttattgggatgttttttatattccaggtgtgctgtacattcttattttattttcacaatagctctgtgatgtaaatgctatctccatgagaaaattcataaagggtgttttgttcctttgaaatgtataatgtaaagacattaaatctcctcatttaagga

SEQ ID NO: 431171 - DNA, 1395 bp, Homo sapiens
cgtggactgtcttttcagaggcctcgaatagcttgaacaaatgacatccttaactccaggctgcagtactctgtacgtgtgtcacctcagatggcgaaccggattgtggattctgcaaggagcatcctcaacaagttcatacctgatatctatatttacacagatcacatgaaaggagtcaactctgggaagtctccgggctttgggttgtcactggttgctgagaccaccagtggcaccttcctcagtgctgaactggcctccaacccccagggccagggagcagcagtacttccagaggaccttggcaggaactgtgcccggctgctgctggaggaaatctacaggggtggatgcgtagactcgaccaaccaaagcctggcgctactactcatgacccttggacagcaggatgtttccaaagtcctgctaggccctctctctccctacacgatagaatttttgcggcatttgaagagctttttccagattatgtttaaaattgaaaccaagccatgtggtgaagaactcaagggtggggataaagtgctgatgacctgtgttggcattggtttctccaaccttagcaagaccctcaagtgataaccatcacaagataaggccccagtgcctacagacaaagcagaagctgccacggacaccaatgggaccaagtccaaatggattaatccaggacagaatagccacttgcttaattttctgtgaagaaatatcaatatacaaataaaagacatccctgtagcatatggtttccagctgtttctccagtggcattgccattgcccaggaggggcccagtcaccatgagagctcccttgccttacctggaggaagaatgtgccttcaggccacagtcgtgctgctagaacagtctcatagctgcagttcagctgtgcttcctcagcctactatcataggcttcctcagccctctgtcatatggctgttttgcaaacctgtggagtctgttactgttctttctgcaaggactcacctccttgagccttggtttttgttgtagggattaaatgagataatatgagtggcagctcttcatgagtcctgcagtgctaagcaaatgtcagaaattggtgtattagactatttatctttgatcttctgaatggattgctgtcatggacacggacacggatcttcatctggttcattgtatttatatgtgagggatggatggctgcggggctccaagtaagttattgggatgttttttatattccaggtgtgctgtacattcttattttattttcacaatagctctgtgatgtaaatgctatctccatgagaaaattcataaagggtgttttgttcctttgaaatgtataatgtaaagacattaaatctcctcatttaagga

SEQ ID NO: 431172 - DNA, 1496 bp, Homo sapiens
gtctctccgtcttcctgttccaaaccacgtggacgcgtctgggctgctggaggcagcccgagccgccgccgtcggtgtcgccgccaccaccaccatcggagtcacgagtcccgcgtctgtccgaagtcgccgctctcgggctgctcacgtctcttcggagagcgcgcacatggcgactcaggcgcactccctcagctacgcagggtgcaacttcttgcgccaacgtctggtcctgtctaccctgagcgggcgccccgtcaaaatccgaaagattcgggccagagacgacaacccgggcctccgagattttgaagccagcttcataaggctattggacaaaataacgaatggttctcgaattgaaataaaccaaacaggaacaaccttatattatcagcctggcctcctgtatggtggatctgtggaacatgactgtagcgtccttcgtggcattgggtattacctggagagtcttctttgcttggctccatttatgaagcacccgttaaaaatagttctacgaggagtgaccaatgatcaggttgacccttcagatagaatttttgcggcatttgaagagctttttccagattatgtttaaaattgaaaccaagccatgtggtgaagaactcaagggtggggataaagtgctgatgacctgtgttggcattggtttctccaaccttagcaagaccctcaagtgataaccatcacaagataaggccccagtgcctacagacaaagcagaagctgccacggacaccaatgggaccaagtccaaatggattaatccaggacagaatagccacttgcttaattttctgtgaagaaatatcaatatacaaataaaagacatccctgtagcatatggtttccagctgtttctccagtggcattgccattgcccaggaggggcccagtcaccatgagagctcccttgccttacctggaggaagaatgtgccttcaggccacagtcgtgctgctagaacagtctcatagctgcagttcagctgtgcttcctcagcctactatcataggcttcctcagccctctgtcatatggctgttttgcaaacctgtggagtctgttactgttctttctgcaaggactcacctccttgagccttggtttttgttgtagggattaaatgagataatatgagtggcagctcttcatgagtcctgcagtgctaagcaaatgtcagaaattggtgtattagactatttatctttgatcttctgaatggattgctgtcatggacacggacacggatcttcatctggttcattgtatttatatgtgagggatggatggctgcggggctccaagtaagttattgggatgttttttatattccaggtgtgctgtacattcttattttattttcacaatagctctgtgatgtaaatgctatctccatgagaaaattcataaagggtgttttgttcctttgaaatgtataatgtaaagacattaaatctcctcatttaagga

SEQ ID NO: 431173 - DNA, 473 bp, Homo sapiens
tttttagtagagacagtgtttcaccacgttggccaggctggtcttgaactcctgatctcaggtgatctgcccgctttgacctcccaaagtgctgggacttcaggtgtgagccaccacgcccagccaagaaattgattttttttagttaataatgtttaccaagtattgtagttgggtgaagtcttcaagcttaaaagtaaacctccagcatgttattacctaaggaatttgtgtcaaggctgattgaacctgaatctcttaaatgctttgtttttgtagagaggaaaatatgatgttcccaagtggctctctcccagtagcattctgcttcttcaacaaatgctgcaggtggacccaaagaaacggatttctatgaaaaatctattgaaccatccctggatcatgcaagattacaactatcctgttgagtggcaaagcaagaatcctgtaagtaaaatgaaatccagtagaat

SEQ ID NO: 431174 - DNA, 2684 bp, Homo sapiens
agatttgattcccttggcgggcggaagcggccacaacccggcgatcgaaaagattcttaggaacgccgtaccagccgcgtctctcaggacagcaggcccctgtccttctgtcgggcgccgctcagccgtgccctccgcccctcaggtcagttctcccgcctgcccgccgcagtcgcagttgatggctggggtctgggctgtgcggggcgcagcggcccaaacccagtttgctcctggctctcgggagactggaggatttcatcggagccccgcgctttaccagccctgttccctggataagatatttgacctttccgacccgcggttttcttctccgttctttttctaattccaaataaacttgcaagaggactatgaaagattatgatgaacttctcaaatattatgaattacatgaaactattgggacaggtggctttgcaaaggtcaaacttgcctgccatatccttactggagagatggtagctataaaaatcatggataaaaacacactagggagtgatttgccccggatcaaaacggagattgaggccttgaagaacctgagacatcagcatatatgtcaactctaccatgtgctagagacagccaacaaaatattcatggttcttgagtactgccctggaggagagctgtttgactatataatttcccaggatcgcctgtcagaagaggagacccgggttgtcttccgtcagatagtatctgctgttgcttatgtgcacagccagggctatgctcacagggacctcaagccagaaaatttgctgtttgatgaatatcataaattaaagctgattgactttggtctctgtgcaaaacccaagggtaacaaggattaccatctacagacatgctgtgggagtctggcttatgcagcacctgagttaatacaaggcaaatcatatcttggatcagaggcagatgtttggagcatgggcatactgttatatgttcttatgtgtggatttctaccatttgatgatgataatgtaatggctttatacaagaagattatgagaggaaaatatgatgttcccaagtggctctctcccagtagcattctgcttcttcaacaaatgctgcaggtggacccaaagaaacggatttctatgaaaaatctattgaaccatccctggatcatgcaagattacaactatcctgttgagtggcaaagcaagaatccttttattcacctcgatgatgattgcgtaacagaactttctgtacatcacagaaacaacaggcaaacaatggaggatttaatttcactgtggcagtatgatcacctcacggctacctatcttctgcttctagccaagaaggctcggggaaaaccagttcgtttaaggctttcttctttctcctgtggacaagccagtgctaccccattcacagacatcaagtcaaataattggagtctggaagatgtgaccgcaagtgataaaaattatgtggcgggattaatagactatgattggtgtgaagatgatttatcaacaggtgctgctactccccgaacatcacagtttaccaagtactggacagaatcaaatggggtggaatctaaatcattaactccagccttatgcagaacacctgcaaataaattaaagaacaaagaaaatgtatatactcctaagtctgctgtaaagaatgaagagtactttatgtttcctgagccaaagactccagttaataagaaccagcataagagagaaatactcactacgccaaatcgttacactacaccctcaaaagctagaaaccagtgcctgaaagaaactccaattaaaataccagtaaattcaacaggaacagacaagttaatgacaggtgtcattagccctgagaggcggtgccgctcagtggaattggatctcaaccaagcacatatggaggagactccaaaaagaaagggagccaaagtgtttgggagccttgaaagggggttggataaggttatcactgtgctcaccaggagcaaaaggaagggttctgccagagacgggcccagaagactaaagcttcactataatgtgactacaactagattagtgaatccagatcaactgttgaatgaaataatgtctattcttccaaagaagcatgttgactttgtacaaaagggttatacactgaagtgtcaaacacagtcagattttgggaaagtgacaatgcaatttgaattagaagtgtgccagcttcaaaaacccgatgtggtgggtatcaggaggcagcggcttaagggcgatgcctgggtttacaaaagattagtggaagacatcctatctagctgcaaggtataattgatggattcttccatcctgccggatgagtgtgggtgtgatacagcctacataaagactgttatgatcgctttgattttaaagttcattggaactaccaacttgtttctaaagagctatcttaagaccaatatctctttgtttttaaacaaaagatattattttgtgtatgaatctaaatcaagcccatctgtcattatgttactgtcttttttaatcatgtggttttgtatattaataattgttgactttcttagattcacttccatatgtgaatgtaagctcttaactatgtctctttgtaatgtgtaatttctttctgaaataaaaccatttgtgaatataaaaaaaaac

SEQ ID NO: 431175 - DNA, 2767 bp, Homo sapiens
agatttgattcccttggcgggcggaagcggccacaacccggcgatcgaaaagattcttaggaacgccgtaccagccgcgtctctcaggacagcaggcccctgtccttctgtcgggcgccgctcagccgtgccctccgcccctcaggtcagttctcccgcctgcccgccgcagtcgcagttgatggctggggtctgggctgtgcggggcgcagcggcccaaacccagtttgctcctggctctcgggagactggaggatttcatcggagccccgcgctttaccagccctgttccctggataagatatttgacctttccgacccgcggttttcttctccaatctcgctccgttgcccaggctggagtgcagtggcgtgatctcggctcactgcaacctctgcctcctgcctcagcctcccaagttctttttctaattccaaataaacttgcaagaggactatgaaagattatgatgaacttctcaaatattatgaattacatgaaactattgggacaggtggctttgcaaaggtcaaacttgcctgccatatccttactggagagatggtagctataaaaatcatggataaaaacacactagggagtgatttgccccggatcaaaacggagattgaggccttgaagaacctgagacatcagcatatatgtcaactctaccatgtgctagagacagccaacaaaatattcatggttcttgagtactgccctggaggagagctgtttgactatataatttcccaggatcgcctgtcagaagaggagacccgggttgtcttccgtcagatagtatctgctgttgcttatgtgcacagccagggctatgctcacagggacctcaagccagaaaatttgctgtttgatgaatatcataaattaaagctgattgactttggtctctgtgcaaaacccaagggtaacaaggattaccatctacagacatgctgtgggagtctggcttatgcagcacctgagttaatacaaggcaaatcatatcttggatcagaggcagatgtttggagcatgggcatactgttatatgttcttatgtgtggatttctaccatttgatgatgataatgtaatggctttatacaagaagattatgagaggaaaatatgatgttcccaagtggctctctcccagtagcattctgcttcttcaacaaatgctgcaggtggacccaaagaaacggatttctatgaaaaatctattgaaccatccctggatcatgcaagattacaactatcctgttgagtggcaaagcaagaatccttttattcacctcgatgatgattgcgtaacagaactttctgtacatcacagaaacaacaggcaaacaatggaggatttaatttcactgtggcagtatgatcacctcacggctacctatcttctgcttctagccaagaaggctcggggaaaaccagttcgtttaaggctttcttctttctcctgtggacaagccagtgctaccccattcacagacatcaagtcaaataattggagtctggaagatgtgaccgcaagtgataaaaattatgtggcgggattaatagactatgattggtgtgaagatgatttatcaacaggtgctgctactccccgaacatcacagtttaccaagtactggacagaatcaaatggggtggaatctaaatcattaactccagccttatgcagaacacctgcaaataaattaaagaacaaagaaaatgtatatactcctaagtctgctgtaaagaatgaagagtactttatgtttcctgagccaaagactccagttaataagaaccagcataagagagaaatactcactacgccaaatcgttacactacaccctcaaaagctagaaaccagtgcctgaaagaaactccaattaaaataccagtaaattcaacaggaacagacaagttaatgacaggtgtcattagccctgagaggcggtgccgctcagtggaattggatctcaaccaagcacatatggaggagactccaaaaagaaagggagccaaagtgtttgggagccttgaaagggggttggataaggttatcactgtgctcaccaggagcaaaaggaagggttctgccagagacgggcccagaagactaaagcttcactataatgtgactacaactagattagtgaatccagatcaactgttgaatgaaataatgtctattcttccaaagaagcatgttgactttgtacaaaagggttatacactgaagtgtcaaacacagtcagattttgggaaagtgacaatgcaatttgaattagaagtgtgccagcttcaaaaacccgatgtggtgggtatcaggaggcagcggcttaagggcgatgcctgggtttacaaaagattagtggaagacatcctatctagctgcaaggtataattgatggattcttccatcctgccggatgagtgtgggtgtgatacagcctacataaagactgttatgatcgctttgattttaaagttcattggaactaccaacttgtttctaaagagctatcttaagaccaatatctctttgtttttaaacaaaagatattattttgtgtatgaatctaaatcaagcccatctgtcattatgttactgtcttttttaatcatgtggttttgtatattaataattgttgactttcttagattcacttccatatgtgaatgtaagctcttaactatgtctctttgtaatgtgtaatttctttctgaaataaaaccatttgtgaatataaaaaaaaac

SEQ ID NO: 431176 - DNA, 2530 bp, Homo sapiens
agatttgattcccttggcgggcggaagcggccacaacccggcgatcgaaaagattcttaggaacgccgtaccagccgcgtctctcaggacagcaggcccctgtccttctgtcgggcgccgctcagccgtgccctccgcccctcagaatctcgctccgttgcccaggctggagtgcagtggcgtgatctcggctcactgcaacctctgcctcctgcctcagcctcccaagctagagtgcaatggcacgatgtcggctcactgcaacctccacctcccgggttcaagcgattctcctgcatcagcctcccaagtagctgggattacaggttctttttctaattccaaataaacttgcaagaggactatgaaagattatgatgaacttctcaaatattatgaattacatgaaactattgggacaggtggctttgcaaaggtcaaacttgcctgccatatccttactggagagatggtagctataaaaatcatggataaaaacacactagggagtgatttgccccggatcaaaacggagattgaggccttgaagaacctgagacatcagcatatatgtcaactctaccatgtgctagagacagccaacaaaatattcatggttcttgaggaaaatttgctgtttgatgaatatcataaattaaagctgattgactttggtctctgtgcaaaacccaagggtaacaaggattaccatctacagacatgctgtgggagtctggcttatgcagcacctgagttaatacaaggcaaatcatatcttggatcagaggcagatgtttggagcatgggcatactgttatatgttcttatgtgtggatttctaccatttgatgatgataatgtaatggctttatacaagaagattatgagaggaaaatatgatgttcccaagtggctctctcccagtagcattctgcttcttcaacaaatgctgcaggtggacccaaagaaacggatttctatgaaaaatctattgaaccatccctggatcatgcaagattacaactatcctgttgagtggcaaagcaagaatccttttattcacctcgatgatgattgcgtaacagaactttctgtacatcacagaaacaacaggcaaacaatggaggatttaatttcactgtggcagtatgatcacctcacggctacctatcttctgcttctagccaagaaggctcggggaaaaccagttcgtttaaggctttcttctttctcctgtggacaagccagtgctaccccattcacagacatcaagtcaaataattggagtctggaagatgtgaccgcaagtgataaaaattatgtggcgggattaatagactatgattggtgtgaagatgatttatcaacaggtgctgctactccccgaacatcacagtttaccaagtactggacagaatcaaatggggtggaatctaaatcattaactccagccttatgcagaacacctgcaaataaattaaagaacaaagaaaatgtatatactcctaagtctgctgtaaagaatgaagagtactttatgtttcctgagccaaagactccagttaataagaaccagcataagagagaaatactcactacgccaaatcgttacactacaccctcaaaagctagaaaccagtgcctgaaagaaactccaattaaaataccagtaaattcaacaggaacagacaagttaatgacaggtgtcattagccctgagaggcggtgccgctcagtggaattggatctcaaccaagcacatatggaggagactccaaaaagaaagggagccaaagtgtttgggagccttgaaagggggttggataaggttatcactgtgctcaccaggagcaaaaggaagggttctgccagagacgggcccagaagactaaagcttcactataatgtgactacaactagattagtgaatccagatcaactgttgaatgaaataatgtctattcttccaaagaagcatgttgactttgtacaaaagggttatacactgaagtgtcaaacacagtcagattttgggaaagtgacaatgcaatttgaattagaagtgtgccagcttcaaaaacccgatgtggtgggtatcaggaggcagcggcttaagggcgatgcctgggtttacaaaagattagtggaagacatcctatctagctgcaaggtataattgatggattcttccatcctgccggatgagtgtgggtgtgatacagcctacataaagactgttatgatcgctttgattttaaagttcattggaactaccaacttgtttctaaagagctatcttaagaccaatatctctttgtttttaaacaaaagatattattttgtgtatgaatctaaatcaagcccatctgtcattatgttactgtcttttttaatcatgtggttttgtatattaataattgttgactttcttagattcacttccatatgtgaatgtaagctcttaactatgtctctttgtaatgtgtaatttctttctgaaataaaaccatttgtgaatataaaaaaaaac

SEQ ID NO: 431177 - DNA, 240 bp, Homo sapiens
tccgtctcaaaaaaaaaaaaaaaaaaaaaaaagaatgtttatcaaggtttaattctcttaagcgttgtaattaataagtttcatttttatcttattggcagggtaacaaggattaccatctacagacatgctgtgggagtctggcttatgcagcacctgagttaatacaaggcaaatcatatcttggatcagaggtaattattcattgattaattcattatataatcagcagacatttat

SEQ ID NO: 431178 - DNA, 2493 bp, Homo sapiens
agatttgattcccttggcgggcggaagcggccacaacccggcgatcgaaaagattcttaggaacgccgtaccagccgcgtctctcaggacagcaggcccctgtccttctgtcgggcgccgctcagccgtgccctccgcccctcaggttctttttctaattccaaataaacttgcaagaggactatgaaagattatgatgaacttctcaaatattatgaattacatgaaactattgggacaggtggctttgcaaaggtcaaacttgcctgccatatccttactggagagatggtagctataaaaatcatggataaaaacacactagggagtgatttgccccggatcaaaacggagattgaggccttgaagaacctgagacatcagcatatatgtcaactctaccatgtgctagagacagccaacaaaatattcatggttcttgagtactgccctggaggagagctgtttgactatataatttcccaggatcgcctgtcagaagaggagacccgggttgtcttccgtcagatagtatctgctgttgcttatgtgcacagccagggctatgctcacagggacctcaagccagaaaatttgctgtttgatgaatatcataaattaaagctgattgactttggtctctgtgcaaaacccaagggtaacaaggattaccatctacagacatgctgtgggagtctggcttatgcagcacctgagttaatacaaggcaaatcatatcttggatcagaggcagatgtttggagcatgggcatactgttatatgttcttatgtgtggatttctaccatttgatgatgataatgtaatggctttatacaagaagattatgagaggaaaatatgatgttcccaagtggctctctcccagtagcattctgcttcttcaacaaatgctgcaggtggacccaaagaaacggatttctatgaaaaatctattgaaccatccctggatcatgcaagattacaactatcctgttgagtggcaaagcaagaatccttttattcacctcgatgatgattgcgtaacagaactttctgtacatcacagaaacaacaggcaaacaatggaggatttaatttcactgtggcagtatgatcacctcacggctacctatcttctgcttctagccaagaaggctcggggaaaaccagttcgtttaaggctttcttctttctcctgtggacaagccagtgctaccccattcacagacatcaagtcaaataattggagtctggaagatgtgaccgcaagtgataaaaattatgtggcgggattaatagactatgattggtgtgaagatgatttatcaacaggtgctgctactccccgaacatcacagtttaccaagtactggacagaatcaaatggggtggaatctaaatcattaactccagccttatgcagaacacctgcaaataaattaaagaacaaagaaaatgtatatactcctaagtctgctgtaaagaatgaagagtactttatgtttcctgagccaaagactccagttaataagaaccagcataagagagaaatactcactacgccaaatcgttacactacaccctcaaaagctagaaaccagtgcctgaaagaaactccaattaaaataccagtaaattcaacaggaacagacaagttaatgacaggtgtcattagccctgagaggcggtgccgctcagtggaattggatctcaaccaagcacatatggaggagactccaaaaagaaagggagccaaagtgtttgggagccttgaaagggggttggataaggttatcactgtgctcaccaggagcaaaaggaagggttctgccagagacgggcccagaagactaaagcttcactataatgtgactacaactagattagtgaatccagatcaactgttgaatgaaataatgtctattcttccaaagaagcatgttgactttgtacaaaagggttatacactgaagtgtcaaacacagtcagattttgggaaagtgacaatgcaatttgaattagaagtgtgccagcttcaaaaacccgatgtggtgggtatcaggaggcagcggcttaagggcgatgcctgggtttacaaaagattagtggaagacatcctatctagctgcaaggtataattgatggattcttccatcctgccggatgagtgtgggtgtgatacagcctacataaagactgttatgatcgctttgattttaaagttcattggaactaccaacttgtttctaaagagctatcttaagaccaatatctctttgtttttaaacaaaagatattattttgtgtatgaatctaaatcaagcccatctgtcattatgttactgtcttttttaatcatgtggttttgtatattaataattgttgactttcttagattcacttccatatgtgaatgtaagctcttaactatgtctctttgtaatgtgtaatttctttctgaaataaaaccatttgtgaatataaaaaaaaac

SEQ ID NO: 431179 - DNA, 2349 bp, Homo sapiens
agatttgattcccttggcgggcggaagcggccacaacccggcgatcgaaaagattcttaggaacgccgtaccagccgcgtctctcaggacagcaggcccctgtccttctgtcgggcgccgctcagccgtgccctccgcccctcaggttctttttctaattccaaataaacttgcaagaggactatgaaagattatgatgaacttctcaaatattatgaattacatgaaactattgggacaggtggctttgcaaaggtcaaacttgcctgccatatccttactggagagatggtagctataaaaatcatggataaaaacacactagggagtgatttgccccggatcaaaacggagattgaggccttgaagaacctgagacatcagcatatatgtcaactctaccatgtgctagagacagccaacaaaatattcatggttcttgaggaaaatttgctgtttgatgaatatcataaattaaagctgattgactttggtctctgtgcaaaacccaagggtaacaaggattaccatctacagacatgctgtgggagtctggcttatgcagcacctgagttaatacaaggcaaatcatatcttggatcagaggcagatgtttggagcatgggcatactgttatatgttcttatgtgtggatttctaccatttgatgatgataatgtaatggctttatacaagaagattatgagaggaaaatatgatgttcccaagtggctctctcccagtagcattctgcttcttcaacaaatgctgcaggtggacccaaagaaacggatttctatgaaaaatctattgaaccatccctggatcatgcaagattacaactatcctgttgagtggcaaagcaagaatccttttattcacctcgatgatgattgcgtaacagaactttctgtacatcacagaaacaacaggcaaacaatggaggatttaatttcactgtggcagtatgatcacctcacggctacctatcttctgcttctagccaagaaggctcggggaaaaccagttcgtttaaggctttcttctttctcctgtggacaagccagtgctaccccattcacagacatcaagtcaaataattggagtctggaagatgtgaccgcaagtgataaaaattatgtggcgggattaatagactatgattggtgtgaagatgatttatcaacaggtgctgctactccccgaacatcacagtttaccaagtactggacagaatcaaatggggtggaatctaaatcattaactccagccttatgcagaacacctgcaaataaattaaagaacaaagaaaatgtatatactcctaagtctgctgtaaagaatgaagagtactttatgtttcctgagccaaagactccagttaataagaaccagcataagagagaaatactcactacgccaaatcgttacactacaccctcaaaagctagaaaccagtgcctgaaagaaactccaattaaaataccagtaaattcaacaggaacagacaagttaatgacaggtgtcattagccctgagaggcggtgccgctcagtggaattggatctcaaccaagcacatatggaggagactccaaaaagaaagggagccaaagtgtttgggagccttgaaagggggttggataaggttatcactgtgctcaccaggagcaaaaggaagggttctgccagagacgggcccagaagactaaagcttcactataatgtgactacaactagattagtgaatccagatcaactgttgaatgaaataatgtctattcttccaaagaagcatgttgactttgtacaaaagggttatacactgaagtgtcaaacacagtcagattttgggaaagtgacaatgcaatttgaattagaagtgtgccagcttcaaaaacccgatgtggtgggtatcaggaggcagcggcttaagggcgatgcctgggtttacaaaagattagtggaagacatcctatctagctgcaaggtataattgatggattcttccatcctgccggatgagtgtgggtgtgatacagcctacataaagactgttatgatcgctttgattttaaagttcattggaactaccaacttgtttctaaagagctatcttaagaccaatatctctttgtttttaaacaaaagatattattttgtgtatgaatctaaatcaagcccatctgtcattatgttactgtcttttttaatcatgtggttttgtatattaataattgttgactttcttagattcacttccatatgtgaatgtaagctcttaactatgtctctttgtaatgtgtaatttctttctgaaataaaaccatttgtgaatataaaaaaaaac

SEQ ID NO: 431180 - DNA, 1911 bp, Homo sapiens
aaaaaagaatgtttatcaaggtttaattctcttaagcgttgtaattaataagtttcatttttatcttattggcagggtaacaaggattaccatctacagacatgctgtgggagtctggcttatgcagcacctgagttaatacaaggcaaatcatatcttggatcagaggcagatgtttggagcatgggcatactgttatatgttcttatgtgtggatttctaccatttgatgatgataatgtaatggctttatacaagaagattatgagaggaaaatatgatgttcccaagtggctctctcccagtagcattctgcttcttcaacaaatgctgcaggtggacccaaagaaacggatttctatgaaaaatctattgaaccatccctggatcatgcaagattacaactatcctgttgagtggcaaagcaagaatccttttattcacctcgatgatgattgcgtaacagaactttctgtacatcacagaaacaacaggcaaacaatggaggatttaatttcactgtggcagtatgatcacctcacggctacctatcttctgcttctagccaagaaggctcggggaaaaccagttcgtttaaggctttcttctttctcctgtggacaagccagtgctaccccattcacagacatcaagtcaaataattggagtctggaagatgtgaccgcaagtgataaaaattatgtggcgggattaatagactatgattggtgtgaagatgatttatcaacaggtgctgctactccccgaacatcacagtttaccaagtactggacagaatcaaatggggtggaatctaaatcattaactccagccttatgcagaacacctgcaaataaattaaagaacaaagaaaatgtatatactcctaagtctgctgtaaagaatgaagagtactttatgtttcctgagccaaagactccagttaataagaaccagcataagagagaaatactcactacgccaaatcgttacactacaccctcaaaagctagaaaccagtgcctgaaagaaactccaattaaaataccagtaaattcaacaggaacagacaagttaatgacaggtgtcattagccctgagaggcggtgccgctcagtggaattggatctcaaccaagcacatatggaggagactccaaaaagaaagggagccaaagtgtttgggagccttgaaagggggttggataaggttatcactgtgctcaccaggagcaaaaggaagggttctgccagagacgggcccagaagactaaagcttcactataatgtgactacaactagattagtgaatccagatcaactgttgaatgaaataatgtctattcttccaaagaagcatgttgactttgtacaaaagggttatacactgaagtgtcaaacacagtcagattttgggaaagtgacaatgcaatttgaattagaagtgtgccagcttcaaaaacccgatgtggtgggtatcaggaggcagcggcttaagggcgatgcctgggtttacaaaagattagtggaagacatcctatctagctgcaaggtataattgatggattcttccatcctgccggatgagtgtgggtgtgatacagcctacataaagactgttatgatcgctttgattttaaagttcattggaactaccaacttgtttctaaagagctatcttaagaccaatatctctttgtttttaaacaaaagatattattttgtgtatgaatctaaatcaagcccatctgtcattatgttactgtcttttttaatcatgtggttttgtatattaataattgttgactttcttagattcacttccatatgtgaatgtaagctcttaactatgtctctttgtaatgtgtaatttctttctgaaataaaaccatttgtgaatataaaaaaaaac

SEQ ID NO: 431181 - DNA, 3943 bp, Homo sapiens
cttctgcttctttgctgcccctcctttcccttcccttcagggtttactgtggttctcactggtctgtttatgtagccatccagaagagatgagagcattttggggactgaaagcttcaatagccaacttactgccctctgtggttagtgaggagggcagtctgcatgttcagctagctagttatttgcatgtgaagtccctggaggcttacaaactgttgagaggttctgcgaggcatacaaacaaacagaccaaaaggctggaaactctgcttggagctctgcagcattccggtgtatgaaaggttccgagaagtctcaacccagcatttccaaacttctttgagcctaaaactcgtttgtctcatacctagtcccagacccccacaaaacatgttttgcagaacttctgccaactttgggatagcttacccccttcctatttgggaaaggttttattgcttgtagacccctcagaaggcagggtagggtgtacgtgggctgttctccccatctcagcctgggtcatgaacaaatgggcagttgtttggcctgaatctcggggcaagttggggagagcacatagaaagactctgtgagtgatttggggagtgggatagctttgaccttggagagaggagagccattggttttcagcctaagccagctcttttatgttttgcttctgggacttgtccctggaaatgtgtgagcttctggcctctattctgattttcttgtgcctcatgagttacatacgacgtcctgcgcttcatattttgtggtgtctctcctgatactatgaaggtggtttgtaattgacatggctttgaccctaatattactaaggttgggagcacccttttaaagggaggataaacaagtttcatcttgtgggtcaacttctaatatttgatggtggctacactgtgacaagaaaggtttttgagcttgttggggtcagtggatgggcacaagggcacccagtggtggtgcccgggccaggtttttgttacttgtctttttaagttgaaaattcaccctactgtgcatgaaaatggaactgaaaatggaagagaccatgcctgggcaacatggcaaaaccccatctctacaaaaaaattacaaaagatttagccagggatggtggggcatgcagtagtcccagctgcttaggaggctgaggtgggagaatcacctgagcctgggaggttgaggctgcagtgagctatgaccacaccactgcactctaacctgggtgacggagtgagaccctgtctcaaaagaataaaatgttttttaactcagatgggcagagtttgggctgtgcttatgcagtggccatttgaaccgcacagtcacgaatgtggggttttaaactagagtgatgaaggcacaggtgcttgcaggctgccattttgagagggaaacagccacacatgtcatcatgttaaactttcagtgtttcaagctattctgcttgaattttgaagacacctggatctttttttttttttaacatttcaaaataagcatggcaggcttctattgaggtttggacttctctcatttctaaagaattagagttgtaacttcatattagttgtaagtttggggtttggtcctcacccaagttggaaagctgtttgcttaagacatagatgtattataataatagaagggagggagtagaaagctgatgaacccttgttacttatagcaaacttcctgctgttttaaatgcacagagattattttatcaactgtggttagcacgcaattggtatttttatggttctgccattttattgaggctatcaagtgggacttcagacctggctctgagcaggaccacacgtgtgtatttatattgagtgccctcactcatgataaggtgacttcatggagacccagaaactcaccctaaggggtgttcacctttgaggtgggcatccagatgctgaggggaagtggggtccatcctctgaggtccaggggcctactttgtgagctcagttgtgttcacctgtggttcagtgtacctcggcccctaagccaagtgatcgttcagtgacttgcagcaatgtgggaagtgaggggacccctgccacaccccccaccaccccctgtagagtcactgaccttcatccttcaccctggtcctccatggtgcagcagcatctcatgggccttgtggctgtcagagcccgtggttggaaccccgtccactggtcccaaacctggaggggcagctgcagatgaggtttagacctcctggtgtctccgtggattctgagtgcccaggaggggaggggagggggtggcatcctggcctctaggataaatgcctggagtatagggcagcgccacgggcacttggagaccctgtcctgcgcatctgccaagcctggcagtttttagagttttttgaaatgttttgatactttttgatacaatttgctaataactgttttgtagaatgcctgccggggttttccacctcatccctttcctccggccccttgatttgtgctggacaacaaatggcagcaccaggacctcgcctcatgtggctttgtcttggatcttgcccttctccatcgctgatgtgatacagctctagaatttcgtgaagttgcatgcaaagttgcatgcagcccgtgggtatgactgtctcaggcccccagctcatttgccaagaggaaaccttaacccccctgagagggtctgcgtttcttctagagctcctacctcagtggtgtgcacagagttggagacacctgagggctggtccacgtctcacctttgccatacgggtcatttcttgatcaaatatatgactggggtcctggtttactcccgcccaccctttcttttaaagtattcttaacatgaaatccacaaaagcggaaacaatgaaccattcttgcactttacagaatcattgtccttagctttagaggttgttaatttcttgtttttaacatgaacagaatgtgtggttctgaaggtgtgtgggggtctcaagaaattgtcctttggggccgggcgcagtggctcacgcctgtactcccagcactctgggaggccaagggggacggatcacctgaggtcaagagtttgagaccaccctgaccaacatggtgaaaccccgtctctactaaaatacaaaaattaggcagtcgtggtcgcctgtaatctcagctcttccggaggctgaggcaggagaatcgcttgaacccaggaggcagaggttgcagtgagccgagattgcgccactgcactccagcctgggtgaccgagtaagactgtctcaaaaaaaagaaagaaaaaaagaaaagaaattgtcctttggttgccttagttaccagagttgaatgaatgtacacatttcggtagtgggggggcagagcggataaccccttccttgtctgtttcctttgagaaaggacactccaccttttcaaaggtacttaaagccatctttacagattgcttgtaatgtaaggaaagagtcatgtcctttggattgattgaggttaaatcatcaaccactagccccctttcaaaatcagcgagatatttgatgattaagtgattcattgggtatgttctggctactgatgttactgaaatctgcaatcgtgtatgttttttaatttgttgcttttgtatttgtaattttatgacatttcgaagtttctgtgtcttaactctttttaattaattttctgcacgttgcttttttctctttgtttttaattccatacagagtattcaattcttgaaacacattaaaataatttgcttgctagggtatggtttattttataattacattcctagtcttgtgtggttattgtaatgatgtctggtcctaatttctctgcccgtatgaaaaagaaccccttgcctgttgatcctaaatataatttggaaattaa

SEQ ID NO: 431182 - DNA, 2982 bp, Homo sapiens
gcgcggcaacgcgcggagccggcgggaagtggggctcgggtcccgcggcggggctggaggcagcgagcgccgtcgtctgcccgggcccgcccatcggggtccccaaccccatccggaccccgccgcccgagcgcgcggccccggaagcacccgcctcccggcatggtgctcaaggccttcttccccacgtgctgcgtctcgacggacagcgggctgctggtgggacggtgggtgccggagcagagcagcgccgtggtcctggcggtcctgcactttcccttcatccccatccaggtcaagcagctcctggcccaggtgcggcaggccagccaggtgggcgtggccgtgctgggcacctggtgccactgccggcaggagcccgaggagagcctgggccgcttcctggagagcctgggtgctgtcttcccccatgagccctggctgcggctgtgccgggagagaggcggcacgttctggagctgcgaggccacccaccggcaagcgcccactgcccccggtgcccctggtgaggaccaggtcatgctcatcttctatgaccagcgccaggtgttgctgtcacagctacacctgcccaccgtcctgcccgaccgccaggctggagccaccactgccagcacggggggcctggctgccgtcttcgacacggtagcacgcagtgaggtgctcttccgcagtgaccgctttgatgagggccccgtgcggctgagccactggcagtcggagggcgtggaggccagcatcctcgcggagctggccaggcgagcctcgggacccatttgtctgctgttggccagcctgctgtcgctggtctcagctgtcagtgcctgccgagtgttcaagctctggcccctgtccttcctcgggagcaaactctccacgtgcgaacagctccggcaccggctggagcacctcacgctaatcttcagtacacggaaggcggagaaccctgcccagctgatgaggaaggccaacacggtggcctctgtgctgctggacgtggccctgggcctcatgctgctgtcctggctccacgggagaagccgcatcgggcatctggccgacgccctcgttcctgtggctgaccacgtggccgaggagctccagcatctgctgcagtggctgatgggtgctcccgccgggctcaagatgaaccgtgcactggaccaggtgctgggccgcttcttcctctaccacatccacctgtggatcagctacatccacctcatgtcccccttcgtggagcacatcctttggcacgtgggcctctcggcctgcctgggcctgacggtggccctgtccctcctctcggacattatcgccctcctcaccttccacatctactgcttttacgtctatggagccaggctgtactgcctgaagatccatggcctgtcctcactgtggcgtctgttccgggggaagaagtggaacgttctgcgccagcgcgtggactcctgttcctatgacctggaccagctgttcatcgggactctgctcttcaccatcctgctcttcctcctgcctaccacagccctgtactacctggtgttcaccctgctccggctcctggtggtcgccgtgcagggcctgatccatctgctcgtggacctcatcaactccctgccgctgtactcactgggtcttcggctctgccggccctacaggctggcggctggcgtgaagttccgtgtcctccggcacgaggccggcaggcccctccgcctcctgatgcagataaacccactgccctacagccgcgtggtgcacacctaccgcctccccagctgtggctgccaccccaagcactcctggggcgccctgtgccgcaagctgttccttggggagctcatctacccctggaggcagagaggggacaagcaggactgagggaactgctggctcgcctggcaccaccacacggccacagccagccatctgctctgccagggtggcaccagctcagctggcgcatgtcctgtgctttgtggacgctgctgtgtgctcctgaacacggcaggccctgctatcacaccttgggcttggaggtcattgggagtgagcagatgtgggggtggccagccaggctggccgcactccatcactggcactgcctgccttgggacccgcttcccacctgctgcggtcaccatggtggcgagcacagcaaccccaggtgtccagagcactgccccatgcccaccctgtgtacccaggtccagagggtccgtccaccacagcagccccaggtggagggctggtctccctgggggctccccagtggctctgccctggctgtgggggtggagggaccttgccaggatgaaccccccagtcccaggcaccctctagctccctcagccgaacagcaccctgcatctgggggattgaagcagtcgctgacccccgtccccagcgggcccgggccctcactccctgaaccacacggggtttatttgcggatgttccctggagaggtcgctttgtgaagaaaccatcagcaggctgtgagcatcgccaggctgctgtgggggcgggagcagcctcagtgtcaagggcccgcccactgacccagccgtacctattcgtccacggtgccccgtagcagcaggtcctgcggccaaatctgtctcccttcatgggcctcccagggaaggaggaagccctgctgtgcagacacctctgtggccccccaggagtgtgagtggcctggggagggggccgtggcactgaggccgaaagtgcctgccagacggcacggtctgggtgcgggtgttccctgtgagcccgagtccgcttcaggaggggagcctgcaggtgccggctggtgaggggatgacgcgctgtgggtgggaggaggcagcgcccatctcagcagcaccaggactgcctgggactccctggcaacccagcaccggggaagccgtcagctgctgtgacaataaaacctgccccgtgtctgga

SEQ ID NO: 431183 - DNA, 2225 bp, Homo sapiens
  misc_feature (1359)..(1359): n is a, c, g, or t
gcgcggcaacgcgcggagccggcgggaagtggggctcgggtcccgcggcggggctggaggcagcgagcgccgtcgtctgcccgggcccgcccatcggggtccccaaccccatccggaccccgccgcccgagcgcgcggccccggaagcacccgcctcccggcatggtgctcaaggccttcttccccacgtgctgcgtctcgacggacagcgggctgctggtgggacggtgggtgccggagcagagcagcgccgtggtcctggcggtcctgcactttcccttcatccccatccaggtcaagcagctcctggcccaggtgcggcaggccagccaggtgggcgtggccgtgctgggcacctggtgccactgccggcaggagcccgaggagagcctgggccgcttcctggagagcctgggtgctgtcttcccccatgagccctggctgcggctgtgccgggagagaggcggcacgttctggagctgcgaggccacccaccggcaagcgcccactgcccccggtgcccctggtgaggaccaggtcatgctcatcttctatgaccagcgccaggtgttgctgtcacagctacacctgcccaccgtcctgcccgaccgccaggctggagccaccactgccagcacggggggcctggctgccgtcttcgacacggtagcacgcagtgaggtgctcttccgcagtgaccgctttgatgagggccccgtgcggctgagccactggcagtcggagggcgtggaggccagcatcctcgcggagctggccaggcgagcctcgggacccatttgtctgctgttggccagcctgctgtcgctggtctcagctgtcagtgcctgccgagtgttcaagctctggcccctgtccttcctcgggagcaaactctccacgtgcgaacagctccggcaccggctggagcacctcacgctaatcttcagtacacggaaggcggagaaccctgcccagctgatgaggtgtgggcctgccctggtctctgcagggctgggtgcgtgccctctggccccttctccatccccctctgcaccacgctgacccctccggccaggcaggcctcctcctgcggccccaggctgtgctggccaccctcatgccggccgggccggacctcccttccaggaaggccaacacggtggcctctgtgctgctggacgtggccctgggcctcatgctgctgtcctggctccacgggagaagccgcatcgggcatctggccgacgccctcgttcctgtggctgacgtgagtggactggggtggagcccggtgtcccgggtgggcgtggggacccctcctgggcagcagagccttcccgggccagagccaccgccccncaaagccagttctaccttctccatgctctggagacacggccctcccctgaaccagaagcaggaactccaggggcgctggggcctgggcagggcaggcctcgcaggtacacccccctttccttctgaaggggctgtgtgcaggagccagccgggctgaggctctggggagcccgcctctccctgtgggcccagcgtcctggtatctcccttgtggtccctgagatcagcgttgccctcctggctctctggggccctctgcagagccagggtcatgaaacctttcctgtccagggaggcccatgtgcagcccagctgggacttcctgccctgcccctgtgctgattctgtaactcctgtgctgagagccagaggcacagcttgtctcccatctcccaccttccctgcatggtctgtgccccgtttccagccgggtgcagccccctcctctgcagatctagtgcatttccatgctgcctctgggccttcagcttctctgtcttcctccctcagcaccaaagccccgtctcttccattaggagcttgtcttcctgctgggggtggtacctgactctttggcccaccctcgggcctctgtggaggcctccttgaggcctgactgggtgggtcttgtgtgggctgcaggtgtgcactgggcctgcttgtggccaggccaggcctctgggggcagcatcaggcacgtctgtgtggctgtgggggtgcagggagctccagcccagaaggaaggaggggcggggctggggaaggggctcggcagctttgcctgtggtcgtccgcacctgccaccggcctactttgtcctagacctcccttttgcaaaagtgctcagaaatataaatatttaattt

SEQ ID NO: 431184 - DNA, 2871 bp, Homo sapiens
gggtccgggttccacgaaggccaggtccagtcagtttctcagcctcccggcatggtgctcaaggccttcttccccacgtgctgcgtctcgacggacagcgggctgctggtgggacggtgggtgccggagcagagcagcgccgtggtcctggcggtcctgcactttcccttcatccccatccaggtcaagcagctcctggcccaggtgcggcaggccagccaggtgggcgtggccgtgctgggcacctggtgccactgccggcaggagcccgaggagagcctgggccgcttcctggagagcctgggtgctgtcttcccccatgagccctggctgcggctgtgccgggagagaggcggcacgttctggagctgcgaggccacccaccggcaagcgcccactgcccccggtgcccctggtgaggaccaggtcatgctcatcttctatgaccagcgccaggtgttgctgtcacagctacacctgcccaccgtcctgcccgaccgccaggctggagccaccactgccagcacggggggcctggctgccgtcttcgacacggtagcacgcagtgaggtgctcttccgcagtgaccgctttgatgagggccccgtgcggctgagccactggcagtcggagggcgtggaggccagcatcctcgcggagctggccaggcgagcctcgggacccatttgtctgctgttggccagcctgctgtcgctggtctcagctgtcagtgcctgccgagtgttcaagctctggcccctgtccttcctcgggagcaaactctccacgtgcgaacagctccggcaccggctggagcacctcacgctaatcttcagtacacggaaggcggagaaccctgcccagctgatgaggaaggccaacacggtggcctctgtgctgctggacgtggccctgggcctcatgctgctgtcctggctccacgggagaagccgcatcgggcatctggccgacgccctcgttcctgtggctgaccacgtggccgaggagctccagcatctgctgcagtggctgatgggtgctcccgccgggctcaagatgaaccgtgcactggaccaggtgctgggccgcttcttcctctaccacatccacctgtggatcagctacatccacctcatgtcccccttcgtggagcacatcctttggcacgtgggcctctcggcctgcctgggcctgacggtggccctgtccctcctctcggacattatcgccctcctcaccttccacatctactgcttttacgtctatggagccaggctgtactgcctgaagatccatggcctgtcctcactgtggcgtctgttccgggggaagaagtggaacgttctgcgccagcgcgtggactcctgttcctatgacctggaccagctgttcatcgggactctgctcttcaccatcctgctcttcctcctgcctaccacagccctgtactacctggtgttcaccctgctccggctcctggtggtcgccgtgcagggcctgatccatctgctcgtggacctcatcaactccctgccgctgtactcactgggtcttcggctctgccggccctacaggctggcggctggcgtgaagttccgtgtcctccggcacgaggccggcaggcccctccgcctcctgatgcagataaacccactgccctacagccgcgtggtgcacacctaccgcctccccagctgtggctgccaccccaagcactcctggggcgccctgtgccgcaagctgttccttggggagctcatctacccctggaggcagagaggggacaagcaggactgagggaactgctggctcgcctggcaccaccacacggccacagccagccatctgctctgccagggtggcaccagctcagctggcgcatgtcctgtgctttgtggacgctgctgtgtgctcctgaacacggcaggccctgctatcacaccttgggcttggaggtcattgggagtgagcagatgtgggggtggccagccaggctggccgcactccatcactggcactgcctgccttgggacccgcttcccacctgctgcggtcaccatggtggcgagcacagcaaccccaggtgtccagagcactgccccatgcccaccctgtgtacccaggtccagagggtccgtccaccacagcagccccaggtggagggctggtctccctgggggctccccagtggctctgccctggctgtgggggtggagggaccttgccaggatgaaccccccagtcccaggcaccctctagctccctcagccgaacagcaccctgcatctgggggattgaagcagtcgctgacccccgtccccagcgggcccgggccctcactccctgaaccacacggggtttatttgcggatgttccctggagaggtcgctttgtgaagaaaccatcagcaggctgtgagcatcgccaggctgctgtgggggcgggagcagcctcagtgtcaagggcccgcccactgacccagccgtacctattcgtccacggtgccccgtagcagcaggtcctgcggccaaatctgtctcccttcatgggcctcccagggaaggaggaagccctgctgtgcagacacctctgtggccccccaggagtgtgagtggcctggggagggggccgtggcactgaggccgaaagtgcctgccagacggcacggtctgggtgcgggtgttccctgtgagcccgagtccgcttcaggaggggagcctgcaggtgccggctggtgaggggatgacgcgctgtgggtgggaggaggcagcgcccatctcagcagcaccaggactgcctgggactccctggcaacccagcaccggggaagccgtcagctgctgtgacaataaaacctgccccgtgtctgga

SEQ ID NO: 431185 - DNA, 3095 bp, Homo sapiens
gcgcggcaacgcgcggagccggcgggaagtggggctcgggtcccgcggcggggctggaggcagcgagcgccgtcgtctgcccgggcccgcccatcggggtccccaaccccatccggaccccgccgcccgagcgcgcggccccggaagcacccgcctcccggcatggtgctcaaggccttcttccccacgtgctgcgtctcgacggacagcgggctgctggtgggacggtgggtgccggagcagagcagcgccgtggtcctggcggtcctgcactttcccttcatccccatccaggtcaagcagctcctggcccaggtgcggcaggccagccaggtgggcgtggccgtgctgggcacctggtgccactgccggcaggagcccgaggagagcctgggccgcttcctggagagcctgggtgctgtcttcccccatgagccctggctgcggctgtgccgggagagaggcggcacgttctggagctgcgaggccacccaccggcaagcgcccactgcccccggtgcccctggtgaggaccaggtcatgctcatcttctatgaccagcgccaggtgttgctgtcacagctacacctgcccaccgtcctgcccgaccgccaggctggagccaccactgccagcacggggggcctggctgccgtcttcgacacggtagcacgcagtgaggtgctcttccgcagtgaccgctttgatgagggccccgtgcggctgagccactggcagtcggagggcgtggaggccagcatcctcgcggagctggccaggcgagcctcgggacccatttgtctgctgttggccagcctgctgtcgctggtctcagctgtcagtgcctgccgagtgttcaagctctggcccctgtccttcctcgggagcaaactctccacgtgcgaacagctccggcaccggctggagcacctcacgctaatcttcagtacacggaaggcggagaaccctgcccagctgatgaggaaggccaacacggtggcctctgtgctgctggacgtggccctgggcctcatgctgctgtcctggctccacgggagaagccgcatcgggcatctggccgacgccctcgttcctgtggctgaccacgtggccgaggagctccagcatctgctgcagtggctgatgggtgctcccgccgggctcaagatgaaccgtgcactggaccaggtgctgggccgcttcttcctctaccacatccacctgtggatcagctacatccacctcatgtcccccttcgtggagcacatcctttggcacgtgggcctctcggcctgcctgggcctgacggtggccctgtccctcctctcggacattatcgccctcctcaccttccacatctactgcttttacgtctatggagccaggctgtactgcctgaagatccatggcctgtcctcactgtggcgtctgttccgggggaagaagtggaacgttctgcgccagcgcgtggactcctgttcctatgacctggaccagctgttcatcgggactctgctcttcaccatcctgctcttcctcctgcctaccacagccctgtactacctggtgttcaccctgctccggctcctggtggtcgccgtgcagggcctgatccatctgctcgtggacctcatcaactccctgccgctgtactcactgggtcttcggctctgccggccctacaggctggcggctggcgtgaagttccgtgtcctccggcacgaggccggcaggcccctccgcctcctgatgcagataaacccactgccctacagccgcgtggtgcacacctaccgcctccccagctgtggctgccaccccaagcactcctggggcgccctgtgccgcaagctgttccttggggagctcatctacccctggaggcagagaggggacaagcaggactgagggaactgctggctcgcctggcaccaccacacggccacagccagccatctgctctgccagggtggcaccagctcagctggcgcatgtcctgtgctttgtggacgctgctgtgtgctcctgaacacggcaggccctgctatcacaccttgggcttggaggtcattgggagtgagcagatgtgggggtggccagccaggctggccgcactccatcactggcactgcctgccttgggacccgcttcccacctgctgcggtcaccatggtggcgagcacagcaaccccaggtgtccagagcactgccccatgcccaccctgtgtacccaggtccagagggtccgtccaccacagcagccccaggtggagggctggtctccctgggggctccccagtggctctgccctggctgtgggggtggagggaccttgccaggatgaaccccccagtcccaggcaccctctagctccctcagccgaacagcaccctgcatctgggggattgaagcagtcgctgacccccgtccccagcgggcccgggccctcactccctgaaccacacggggtttatttgcggatgttccctggagaggtcgctttgtgaagaaaccatcagcaggctgtgagcatcgccaggctgctgtgggggcgggagcagcctcagtgtcaagggcccgcccactgacccagccgtacctattcgtccacggtgccccgtagcagcaggtcctgcggccaaatctgtctcccttcatgggcctcccagggaaggaggaagccctgctgtgcagacacctctgtggccccccaggagtgtgagtggcctggggagggggccgtggcactgaggccgaaagtgcctgccagacggcacggtctgggtgcgggtgttccctgtgagcccgagtccgcttcaggaggggagcctgcaggtgccggctggtgaggggatgacgcgctgtgggtgggaggaggcagcgcccatctcagcagcaccaggactgcctgggactccctggcaacccagcaccggggaagccgtcagctgctgtgacaataaaacctgccccgtgtctggaaaaacacgaacgaacgaacgcgaccagcgtcacaacacagacgcaccggaaccgacggagaccaacggaccaccagcaaccgaacacaccaccccacagaacaaccacgcagg

SEQ ID NO: 431186 - DNA, 3117 bp, Homo sapiens
  misc_feature (2935)..(2935): n is a, c, g, or t
gcgcggcaacgcgcggagccggcgggaagtggggctcgggtcccgcggcggggctggaggcagcgagcgccgtcgtctgcccgggcccgcccatcggggtccccaaccccatccggaccccgccgcccgagcgcgcggccccggaagcacccgcctcccggcatggtgctcaaggccttcttccccacgtgctgcgtctcgacggacagcgggctgctggtgggacggtgggtgccggagcagagcagcgccgtggtcctggcggtcctgcactttcccttcatccccatccaggtcaagcagctcctggcccaggtgcggcaggccagccaggtgggcgtggccgtgctgggcacctggtgccactgccggcaggagcccgaggagagcctgggccgcttcctggagagcctgggtgctgtcttcccccatgagccctggctgcggctgtgccgggagagaggcggcacgttctggagctgcgaggccacccaccggcaagcgcccactgcccccggtgcccctggtgaggaccaggtcatgctcatcttctatgaccagcgccaggtgttgctgtcacagctacacctgcccaccgtcctgcccgaccgccaggctggagccaccactgccagcacggggggcctggctgccgtcttcgacacggtagcacgcagtgaggtgctcttccgcagtgaccgctttgatgagggccccgtgcggctgagccactggcagtcggagggcgtggaggccagcatcctcgcggagctggccaggcgagcctcgggacccatttgtctgctgttggccagcctgctgtcgctggtctcagctgtcagtgcctgccgagtgttcaagctctggcccctgtccttcctcgggagcaaactctccacgtgcgaacagctccggcaccggctggagcacctcacgctaatcttcagtacacggaaggcggagaaccctgcccagctgatgaggaaggccaacacggtggcctctgtgctgctggacgtggccctgggcctcatgctgctgtcctggctccacgggagaagccgcatcgggcatctggccgacgccctcgttcctgtggctgaccacgtggccgaggagctccagcatctgctgcagtggctgatgggtgctcccgccgggctcaagatgaaccgtgcactggaccaggtgctgggccgcttcttcctctaccacatccacctgtggatcagctacatccacctcatgtcccccttcgtggagcacatcctttggcacgtgggcctctcggcctgcctgggcctgacggtggccctgtccctcctctcggacattatcgccctcctcaccttccacatctactgcttttacgtctatggagccaggctgtactgcctgaagatccatggcctgtcctcactgtggcgtctgttccgggggaagaagtggaacgttctgcgccagcgcgtggactcctgttcctatgacctggaccagctgttcatcgggactctgctcttcaccatcctgctcttcctcctgcctaccacagccctgtactacctggtgttcaccctgctccggctcctggtggtcgccgtgcagggcctgatccatctgctcgtggacctcatcaactccctgccgctgtactcactgggtcttcggctctgccggccctacaggctggcggctggcgtgaagttccgtgtcctccggcacgaggccggcaggcccctccgcctcctgatgcagataaacccactgccctacagccgcgtggtgcacacctaccgcctccccagctgtggctgccaccccaagcactcctggggcgccctgtgccgcaagctgttccttggggagctcatctacccctggaggcagagaggggacaagcaggactgagggaactgctggctcgcctggcaccaccacacggccacagccagccatctgctctgccagggtggcaccagctcagctggcgcatgtcctgtgctttgtggacgctgctgtgtgctcctgaacacggcaggccctgctatcacaccttgggcttggaggtcattgggagtgagcagatgtgggggtggccagccaggctggccgcactccatcactggcactgcctgccttgggacccgcttcccacctgctgcggtcaccatggtggcgagcacagcaaccccaggtgtccagagcactgccccatgcccaccctgtgtacccaggtccagagggtccgtccaccacagcagccccaggtggagggctggtctccctgggggctccccagtggctctgccctggctgtgggggtggagggaccttgccaggatgaaccccccagtcccaggcaccctctagctccctcagccgaacagcaccctgcatctgggggattgaagcagtcgctgacccccgtccccagcgggcccgggccctcactccctgaaccacacggggtttatttgcggatgttccctggagaggtcgctttgtgaagaaaccatcagcaggctgtgagcatcgccaggctgctgtgggggcgggagcagcctcagtgtcaagggcccgcccactgacccagccgtacctattcgtccacggtgccccgtagcagcaggtcctgcggccaaatctgtctcccttcatgggcctcccagggaaggaggaagccctgctgtgcagacacctctgtggccccccaggagtgtgagtggcctggggagggggccgtggcactgaggccgaaagtgcctgccagacggcacggtctgggtgcgggtgttccctgtgagcccgagtccgcttcaggaggggagcctgcaggtgccgatgaatagctcgctattcatcggcaccggtcctgtgaatgatgaggaatcttcaacaaaaaagaaaaagaaggtagaaagcaaatccaaaaatnatagtcaggaagtgccaaagggtgacagcaaagtggaggagaataaaaagcaaaatacttgcatgaaaaaaagtacaaagaagaaaactctgaaaaataaatcaagtaagaaaagcagtaagcctcctcagaaggaacctgttgagaagggatctgctcagatcgaccctcctcagaatggg

SEQ ID NO: 431187 - DNA, 2021 bp, Homo sapiens
gcgcggcaacgcgcggagccggcgggaagtggggctcgggtcccgcggcggggctggaggcagcgagcgccgtcgtctgcccgggcccgcccatcggggtccccaaccccatccggaccccgccgcccgagcgcgcggccccggaagcacccgcctcccggcatggtgctcaaggccttcttccccacgtgctgcgtctcgacggacagcgggctgctggtgggacggtgggtgccggagcagagcagcgccgtggtcctggcggtcctgcactttcccttcatccccatccaggtcaagcagctcctggcccaggtgcggcaggccagccaggtgggcgtggccgtgctgggcacctggtgccactgccggcaggagcccgaggagagcctgggccgcttcctggagagcctgggtgctgtcttcccccatgagccctggctgcggctgtgccgggagagaggcggcacgttctggagctgcgaggccacccaccggcaagcgcccactgcccccggtgcccctggtgaggaccaggtcatgctcatcttctatgaccagcgccaggtgttgctgtcacagctacacctgcccaccgtcctgcccgaccgccaggctggagccaccactgccagcacggggggcctggctgccgtcttcgacacggtagcacgcagtgaggtgctcttccgcagtgaccgctttgatgagggccccgtgcggctgagccactggcagtcggagggcgtggaggccagcatcctcgcggagctggccaggcgagcctcgggacccatttgtctgctgttggccagcctgctgtcgctggtctcagctgtcagtgcctgccgagtgttcaagctctggcccctgtccttcctcgggagcaaactctccacgtgcgaacagctccggcaccggctggagcacctcacgctaatcttcagtacacggaaggcggagaaccctgcccagctgatgaggaaggccaacacggtggcctctgtgctgctggacgtggccctgggcctcatgctgctgtcctggctccacgggagaagccgcatcgggcatctggccgacgccctcgttcctgtggctgaccacgtggccgaggagctccagcatctgctgcagtggctgatgggtgctcccgccgggctcaagatgaaccgtgcactggaccaggtgctgggccgcttcttcctctaccacatccacctgtggatcagctacatccacctcatgtcccccttcgtggagcacatcctttggcacgtgggcctctcggcctgcctgggcctgacggtggccctgtccctcctctcggacattatcgccctcctcaccttccacatctactgcttttacgtctatggagccaggctgtactgcctgaagatccatggcctgtcctcactgtggcgtctgttccgggggaagaagtggaacgttctgcgccagcgcgtggactcctgttcctatgacctggaccagctgttcatcgggactctgctcttcaccatcctgctcttcctcctgcctaccacagccctgtactacctggtgttcaccctgctccggctcctggtggtcgccgtgcagggcctgatccatctgctcgtggacctcatcaactccctgccgctgtactcactgggtcttcggctctgccggccctacaggctggcgggttcagaaccctggagacctgaggccacaggcctttgttcttctgccttgggattttctgggcttgggagtctgaactgcaggccaggggccaagcgcggcaaagtcagaggcactaggagccagcagggcggccaccatccactggcgtgaagttccgtgtcctccggcacgaggccggcaggcccctccgcctcctgatgcagggcctgaggacactggtgtggtcctgtggatggggcccattctgccctgtgtcggaggcgcccttggctggctggggctgccctgggccccacagggctcaagttctgggtggaacagaaccg

SEQ ID NO: 431188 - DNA, 1953 bp, Homo sapiens
gcgcggcaacgcgcggagccggcgggaagtggggctcgggtcccgcggcggggctggaggcagcgagcgccgtcgtctgcccgggcccgcccatcggggtccccaaccccatccggaccccgccgcccgagcgcgcggccccggaagcacccgcctcccggcatggtgctcaaggccttcttccccacgtgctgcgtctcgacggacagcgggctgctggtgggacggtgggtgccggagcagagcagcgccgtggtcctggcggtcctgcactttcccttcatccccatccaggtcaagcagctcctggcccaggtgcggcaggccagccaggtgggcgtggccgtgctgggcacctggtgccactgccggcaggagcccgaggagagcctgggccgcttcctggagagcctgggtgctgtcttcccccatgagccctggctgcggctgtgccgggagagaggcggcacgttctggagctgcgaggccacccaccggcaagcgcccactgcccccggtgcccctggtgaggaccaggtcatgctcatcttctatgaccagcgccaggtgttgctgtcacagctacacctgcccaccgtcctgcccgaccgccaggctggagccaccactgccagcacggggggcctggctgccgtcttcgacacggtagcacgcagtgaggtgctcttccgcagtgaccgctttgatgagggccccgtgcggctgagccactggcagtcggagggcgtggaggccagcatcctcgcggagctggccaggcgagcctcgggacccatttgtctgctgttggccagcctgctgtcgctggtctcagctgtcagtgcctgccgagtgttcaagctctggcccctgtccttcctcgggagcaaactctccacgtgcgaacagctccggcaccggctggagcacctcacgctaatcttcagtacacggaaggcggagaaccctgcccagctgatgaggaaggccaacacggtggcctctgtgctgctggacgtggccctgggcctcatgctgctgtcctggctccacgggagaagccgcatcgggcatctggccgacgccctcgttcctgtggctgaccacgtggccgaggagctccagcatctgctgcagtggctgatgggtgctcccgccgggctcaagatgaaccgtgcactggaccaggtgctgggccgcttcttcctctaccacatccacctgtggatcagctacatccacctcatgtcccccttcgtggagcacatcctttggcacgtgggcctctcggcctgcctgggcctgacggtggccctgtccctcctctcggacattatcgccctcctcaccttccacatctactgcttttacgtctatggagccaggctgtactgcctgaagatccatggcctgtcctcactgtggcgtctgttccgggggaagaagtggaacgttctgcgccagcgcgtggactcctgttcctatgacctggaccagctgttcatcgggactctgctcttcaccatcctgctcttcctcctgcctaccacagccctgtactacctggtgttcaccctgctccggctcctggtggtcgccgtgcagggcctgatccatctgctcgtggacctcatcaactccctgccgctgtactcactgggtcttcggctctgccggccctacaggctggcgggttcagaaccctggagacctgaggccacaggcctttgttcttctgccttgggattttctgggcttgggagtctgaactgcaggccaggggccaagcgcggcaaagtcagaggcactaggagccagcagggcggccaccatccagtaagtgcccgtccggctgtgccggaaaaccccgtccactcaacagcacagcctgcgcccgtccctcactggggctcttccctgcttgccggacacctggcttctttcagtggagtc

SEQ ID NO: 431189 - DNA, 1619 bp, Homo sapiens
  misc_feature (1196)..(1196): n is a, c, g, or t
gcgcggcaacgcgcggagccggcgggaagtggggctcgggtcccgcggcggggctggaggcagcgagcgccgtcgtctgcccgggcccgcccatcggggtccccaaccccatccggaccccgccgcccgagcgcgcggccccggaagcacccgcctcccggcatggtgctcaaggccttcttccccacgtgctgcgtctcgacggacagcgggctgctggtgggacggtgggtgccggagcagagcagcgccgtggtcctggcggtcctgcactttcccttcatccccatccaggtcaagcagctcctggcccaggtgcggcaggccagccaggtgggcgtggccgtgctgggcacctggtgccactgccggcaggagcccgaggagagcctgggccgcttcctggagagcctgggtgctgtcttcccccatgagccctggctgcggctgtgccgggagagaggcggcacgttctggagctgcgaggccacccaccggcaagcgcccactgcccccggtgcccctggtgaggaccaggtcatgctcatcttctatgaccagcgccaggtgttgctgtcacagctacacctgcccaccgtcctgcccgaccgccaggctggagccaccactgccagcacggggggcctggctgccgtcttcgacacggtagcacgcagtgaggtgctcttccgcagtgaccgctttgatgagggccccgtgcggctgagccactggcagtcggagggcgtggaggccagcatcctcgcggagctggccaggcgagcctcgggacccatttgtctgctgttggccagcctgctgtcgctggtctcagctgtcagtgcctgccgagtgttcaagctctggcccctgtccttcctcgggagcaaactctccacgtgcgaacagctccggcaccggctggagcacctcacgctaatcttcagtacacggaaggcggagaaccctgcccagctgatgaggaaggccaacacggtggcctctgtgctgctggacgtggccctgggcctcatgctgctgtcctggctccacgggagaagccgcatcgggcatctggccgacgccctcgttcctgtggctgacgtgagtggactggggtggagcccggtgtcccgggtgggcgtggggacccctcctgggcagcagagccttcccgggccagagccaccgccccncaaagccagttctaccttctccatgctctggagacacggccctcccctgaaccagaagcaggaactccaggggcgctggggcctgggcagggcaggcctcgcaggtacacccccctttccttctgaaggggctgtgtgcaggagccagccgggctgaggctctggggagcccgcctctccctgtgggcccagcgtcctggtatctcccttgtggtccctgagatcagcgttgccctcctggctctctggggccctctgcagagccagggtcatgaaacctttcctgtccagggaggcccatgtgcactaattgggaggctgaggcaagagaatggcgtgaacccgggaggcagagcttgcagtgagccgagatctcaccactgcactccagcctgggcgacaaaacaagactccgtctcagaa

SEQ ID NO: 431190 - DNA, 2920 bp, Homo sapiens
gcgcggcaacgcgcggagccggcgggaagtggggctcgggtcccgcggcggggctggaggcagcgagcgccgtcgtctgcccgggcccgcccatcggggtccccaaccccatccggaccccgccgcccgagcgcgcggccccggaagcacccgcctcccggcatggtgctcaaggccttcttccccacgtgctgcgtctcgacggacagcgggctgctggtgggacggtgggtgccggagcagagcagcgccgtggtcctggcggtcctgcactttcccttcatccccatccaggtcaagcagctcctggcccaggtgcggcaggccagccaggtgggcgtggccgtgctgggcacctggtgccactgccggcaggagcccgaggagagcctgggccgcttcctggagagcctgggtgctgtcttcccccatgagccctggctgcggctgtgccgggagagaggcggcacgttctggagctgcgaggccacccaccggcaagcgcccactgcccccggtgcccctggtgaggaccaggtcatgctcatcttctatgaccagcgccaggtgttgctgtcacagctacacctgcccaccgtcctgcccgaccgccaggctggagccaccactgccagcacggggggcctggctgccgtcttcgacacggtagcacgcagtgaggtgctcttccgcagtgaccgctttgatgagggccccgtgcggctgagccactggcagtcggagggcgtggaggccagcatcctcgcggagctggccaggcgagcctcgggacccatttgtctgctgttggccagcctgctgtcgctggtctcagctgtcagtgcctgccgagtgttcaagctctggcccctgtccttcctcgggagcaaactctccacgtgcgaacagctccggcaccggctggagcacctcacgctaatcttcagtacacggaaggcggagaaccctgcccagctgatgaggaaggccaacacggtggcctctgtgctgctggacgtggccctgggcctcatgctgctgtcctggctccacgggagaagccgcatcgggcatctggccgacgccctcgttcctgtggctgaccacgtggccgaggagctccagcatctgctgcagtggctgatgggtgctcccgccgggctcaagatgaaccgtgcactggaccaggtgctgggccgcttcttcctctaccacatccacctgtggatcagctacatccacctcatgtcccccttcgtggagcacatcctttggcacgtgggcctctcggcctgcctgggcctgacggtggccctgtccctcctctcggacattatcgccctcctcaccttccacatctactgcttttacgtctatggagccaggctgtactgcctgaagatccatggcctgtcctcactgtggcgtctgttccgggggaagaagtggaacgttctgcgccagcgcgtggactcctgttcctatgacctggaccagctgttcatcgggactctgctcttcaccatcctgctcttcctcctgcctaccacagccctgtactacctggtgttcaccctgctccggctcctggtggtcgccgtgcagggcctgatccatctgctcgtggacctcatcaactccctgccgctgtactcactgggtcttcggctctgccggccctacaggctggcggataaacccactgccctacagccgcgtggtgcacacctaccgcctccccagctgtggctgccaccccaagcactcctggggcgccctgtgccgcaagctgttccttggggagctcatctacccctggaggcagagaggggacaagcaggactgagggaactgctggctcgcctggcaccaccacacggccacagccagccatctgctctgccagggtggcaccagctcagctggcgcatgtcctgtgctttgtggacgctgctgtgtgctcctgaacacggcaggccctgctatcacaccttgggcttggaggtcattgggagtgagcagatgtgggggtggccagccaggctggccgcactccatcactggcactgcctgccttgggacccgcttcccacctgctgcggtcaccatggtggcgagcacagcaaccccaggtgtccagagcactgccccatgcccaccctgtgtacccaggtccagagggtccgtccaccacagcagccccaggtggagggctggtctccctgggggctccccagtggctctgccctggctgtgggggtggagggaccttgccaggatgaaccccccagtcccaggcaccctctagctccctcagccgaacagcaccctgcatctgggggattgaagcagtcgctgacccccgtccccagcgggcccgggccctcactccctgaaccacacggggtttatttgcggatgttccctggagaggtcgctttgtgaagaaaccatcagcaggctgtgagcatcgccaggctgctgtgggggcgggagcagcctcagtgtcaagggcccgcccactgacccagccgtacctattcgtccacggtgccccgtagcagcaggtcctgcggccaaatctgtctcccttcatgggcctcccagggaaggaggaagccctgctgtgcagacacctctgtggccccccaggagtgtgagtggcctggggagggggccgtggcactgaggccgaaagtgcctgccagacggcacggtctgggtgcgggtgttccctgtgagcccgagtccgcttcaggaggggagcctgcaggtgccggctggtgaggggatgacgcgctgtgggtgggaggaggcagcgcccatctcagcagcaccaggactgcctgggactccctggcaacccagcaccggggaagccgtcagctgctgtgacaataaaacctgccccgtgtctgga

SEQ ID NO: 431191 - DNA, 2622 bp, Homo sapiens
agagtcttttatgcgatactgagtgccccgtatggttcgtataaaaatcggacgagggctgtcttcccccatgagccctggctgcggctgtgccgggagagaggcggcacgttctggagctgcgaggccacccaccggcaagcgcccactgcccccggtgcccctggtgaggaccaggtcatgctcatcttctatgaccagcgccaggtgttgctgtcacagctacacctgcccaccgtcctgcccgaccgccaggctggagccaccactgccagcacggggggcctggctgccgtcttcgacacggtagcacgcagtgaggtgctcttccgcagtgaccgctttgatgagggccccgtgcggctgagccactggcagtcggagggcgtggaggccagcatcctcgcggagctggccaggcgagcctcgggacccatttgtctgctgttggccagcctgctgtcgctggtctcagctgtcagtgcctgccgagtgttcaagctctggcccctgtccttcctcgggagcaaactctccacgtgcgaacagctccggcaccggctggagcacctcacgctaatcttcagtacacggaaggcggagaaccctgcccagctgatgaggaaggccaacacggtggcctctgtgctgctggacgtggccctgggcctcatgctgctgtcctggctccacgggagaagccgcatcgggcatctggccgacgccctcgttcctgtggctgaccacgtggccgaggagctccagcatctgctgcagtggctgatgggtgctcccgccgggctcaagatgaaccgtgcactggaccaggtgctgggccgcttcttcctctaccacatccacctgtggatcagctacatccacctcatgtcccccttcgtggagcacatcctttggcacgtgggcctctcggcctgcctgggcctgacggtggccctgtccctcctctcggacattatcgccctcctcaccttccacatctactgcttttacgtctatggagccaggctgtactgcctgaagatccatggcctgtcctcactgtggcgtctgttccgggggaagaagtggaacgttctgcgccagcgcgtggactcctgttcctatgacctggaccagctgttcatcgggactctgctcttcaccatcctgctcttcctcctgcctaccacagccctgtactacctggtgttcaccctgctccggctcctggtggtcgccgtgcagggcctgatccatctgctcgtggacctcatcaactccctgccgctgtactcactgggtcttcggctctgccggccctacaggctggcggctggcgtgaagttccgtgtcctccggcacgaggccggcaggcccctccgcctcctgatgcagataaacccactgccctacagccgcgtggtgcacacctaccgcctccccagctgtggctgccaccccaagcactcctggggcgccctgtgccgcaagctgttccttggggagctcatctacccctggaggcagagaggggacaagcaggactgagggaactgctggctcgcctggcaccaccacacggccacagccagccatctgctctgccagggtggcaccagctcagctggcgcatgtcctgtgctttgtggacgctgctgtgtgctcctgaacacggcaggccctgctatcacaccttgggcttggaggtcattgggagtgagcagatgtgggggtggccagccaggctggccgcactccatcactggcactgcctgccttgggacccgcttcccacctgctgcggtcaccatggtggcgagcacagcaaccccaggtgtccagagcactgccccatgcccaccctgtgtacccaggtccagagggtccgtccaccacagcagccccaggtggagggctggtctccctgggggctccccagtggctctgccctggctgtgggggtggagggaccttgccaggatgaaccccccagtcccaggcaccctctagctccctcagccgaacagcaccctgcatctgggggattgaagcagtcgctgacccccgtccccagcgggcccgggccctcactccctgaaccacacggggtttatttgcggatgttccctggagaggtcgctttgtgaagaaaccatcagcaggctgtgagcatcgccaggctgctgtgggggcgggagcagcctcagtgtcaagggcccgcccactgacccagccgtacctattcgtccacggtgccccgtagcagcaggtcctgcggccaaatctgtctcccttcatgggcctcccagggaaggaggaagccctgctgtgcagacacctctgtggccccccaggagtgtgagtggcctggggagggggccgtggcactgaggccgaaagtgcctgccagacggcacggtctgggtgcgggtgttccctgtgagcccgagtccgcttcaggaggggagcctgcaggtgccggctggtgaggggatgacgcgctgtgggtgggaggaggcagcgcccatctcagcagcaccaggactgcctgggactccctggcaacccagcaccggggaagccgtcagctgctgtgacaataaaacctgccccgtgtctgga

SEQ ID NO: 431192 - DNA, 3017 bp, Homo sapiens
gcgcggcaacgcgcggagccggcgggaagtggggctcgggtcccgcggcggggctggaggcagcgagcgccgtcgtctgcccgggcccgcccatcggggtccccaaccccatccggaccccgccgcccgagcgcgcggccccggaagcacccgcctcccggcatggtgctcaaggccttcttccccacgtgctgcgtctcgacggacagcgggctgctggtgggacggtgggtgccggagcagagcagcgccgtggtcctggcggtcctgcactttcccttcatccccatccaggtcaagcagctcctggcccaggtgcggcaggccagccaggtgggcgtggccgtgctgggcacctggtgccactgccggcaggagcccgaggagagcctgggccgcttcctggagagcctgggtgctgtcttcccccatgagccctggctgcggctgtgccgggagagaggcggcacgttctggagctgcgaggccacccaccggcaagcgcccactgcccccggtgcccctggtgaggaccaggtcatgctcatcttctatgaccagcgccaggtgttgctgtcacagctacacctgcccaccgtcctgcccgaccgccaggctggagccaccactgccagcacggggggcctggctgccgtcttcgacacggtagcacgcagtgaggtgctcttccgcagtgaccgctttgatgagggccccgtgcggctgagccactggcagtcggagggcgtggaggccagcatcctcgcggagctggccaggcgagcctcgggacccatttgtctgctgttggccagcctgctgtcgctggtctcagctgtcagtgcctgccgagtgttcaagctctggcccctgtccttcctcgggagcaaactctccacgtgcgaacagctccggcaccggctggagcacctcacgctaatcttcagtacacggaaggcggagaaccctgcccagctgatgaggaaggccaacacggtggcctctgtgctgctggacgtggccctgggcctcatgctgctgtcctggctccacgggagaagccgcatcgggcatctggccgacgccctcgttcctgtggctgaccacgtggccgaggagctccagcatctgctgcagtggctgatgggtgctcccgccgggctcaagatgaaccgtgcactggaccaggtgctgggccgcttcttcctctaccacatccacctgtggatcagctacatccacctcatgtcccccttcgtggagcacatcctttggcacgtgggcctctcggcctgcctgggcctgacggtggccctgtccctcctctcggacattatcgccctcctcaccttccacatctactgcttttacgtctatggagccaggctgtactgcctgaagatccatggcctgtcctcactgtggcgtctgttccgggggaagaagtggaacgttctgcgccagcgcgtggactcctgttcctatgacctggaccagctgttcatcgggactctgctcttcaccatcctgctcttcctcctgcctaccacagccctgtactacctggtgttcaccctgctccggctcctggtggtcgccgtgcagggcctgatccatctgctcgtggacctcatcaactccctgccgctgtactcactgggtcttcggctctgccggccctacaggctggcggctggcgtgaagttccgtgtcctccggcacgaggccggcaggcccctccgcctcctgatgcagataaacccactgccctacagccgcgtggtgcacacctaccgcctccccagctgtggctgccaccccaagcactcctggggcgccctgtgccgcaagctgttccttggggagctcatctacccctggaggcagagaggggacaagcaggactgagggaactgctggctcgcctggcaccaccacacggccacagccagccatctgctctgccagggtggcaccagctcagctggcgcatgtcctgtgctttgtggacgctgctgtgtgctcctgaacacggcaggccctgctatcacaccttgggcttggaggtcattgggagtgagcagatgtgggggtggccagccaggctggccgcactccatcactggcactgcctgccttgggacccgcttcccacctgctgcggtcaccatggtggcgagcacagcaaccccaggtgtccagagcactgccccatgcccaccctgtgtacccaggtccagagggtccgtccaccacagcagccccaggtggagggctggtctccctgggggctccccagtggctctgccctggctgtgggggtggagggaccttgccaggatgaaccccccagtcccaggcaccctctagctccctcagccgaacagcaccctgcatctgggggattgaagcagtcgctgacccccgtccccagcgggcccgggccctcactccctgaaccacacggggtttatttgcggatgttccctggagaggtcgctttgtgaagaaaccatcagcaggctgtgagcatcgccaggctgctgtgggggcgggagcagcctcagtgtcaagggcccgcccactgacccagccgtacctattcgtccacggtgccccgtagcagcaggtcctgcggccaaatctgtctcccttcatgggcctcccagggaaggaggaagccctgctgtgcagacacctctgtggccccccaggagtgtgagtggcctggggagggggccgtggcactgaggccgaaagtgcctgccagacggcacggtctgggtgcgggtgttccctgtgagcccgagtccgcttcaggaggggagcctgcaggtgccggctggtgaggggatgacgcgctgtgggtgggaggaggcagcgcccatctcagcagcaccaggactgcctgggactccctggcaacccagcaccggggaagccgtcagctgctgtgacaataaaacctgccccgtgtctggagcgcaggctcggtcccgggtccatgtgcagcgcgg

SEQ ID NO: 431193 - DNA, 1398 bp, Homo sapiens
ctggctgcaggctcacttgcctccttgggaactgggactggcttctcccacaggcaagggaatgtctgagacagcactggccctgcctcacaactgcccgcccccaccctctctctgcagacggggttggagctcagaccaccccactgaccgctgcccttgtccttccagataaacccactgccctacagccgcgtggtgcacacctaccgcctccccagctgtggctgccaccccaagcactcctggggcgccctgtgccgcaagctgttccttggggagctcatctacccctggaggcagagaggggacaagcaggactgagggaactgctggctcgcctggcaccaccacacggccacagccagccatctgctctgccagggtggcaccagctcagctggcgcatgtcctgtgctttgtggacgctgctgtgtgctcctgaacacggcaggccctgctatcacaccttgggcttggaggtcattgggagtgagcagatgtgggggtggccagccaggctggccgcactccatcactggcactgcctgccttgggacccgcttcccacctgctgcggtcaccatggtggcgagcacagcaaccccaggtgtccagagcactgccccatgcccaccctgtgtacccaggtccagagggtccgtccaccacagcagccccaggtggagggctggtctccctgggggctccccagtggctctgccctggctgtgggggtggagggaccttgccaggatgaaccccccagtcccaggcaccctctagctccctcagccgaacagcaccctgcatctgggggattgaagcagtcgctgacccccgtccccagcgggcccgggccctcactccctgaaccacacggggtttatttgcggatgttccctggagaggtcgctttgtgaagaaaccatcagcaggctgtgagcatcgccaggctgctgtgggggcgggagcagcctcagtgtcaagggcccgcccactgacccagccgtacctattcgtccacggtgccccgtagcagcaggtcctgcggccaaatctgtctcccttcatgggcctcccagggaaggaggaagccctgctgtgcagacacctctgtggccccccaggagtgtgagtggcctggggagggggccgtggcactgaggccgaaagtgcctgccagacggcacggtctgggtgcgggtgttccctgtgagcccgagtccgcttcaggaggggagcctgcaggtgccggctggtgaggggatgacgcgctgtgggtgggaggaggcagcgcccatctcagcagcaccaggactgcctgggactccctggcaacccagcaccggggaagccgtcagctgctgtgacaataaaacctgccccgtgtctgga

SEQ ID NO: 431194 - DNA, 2430 bp, Homo sapiens
  misc_feature (1196)..(1196): n is a, c, g, or t
gcgcggcaacgcgcggagccggcgggaagtggggctcgggtcccgcggcggggctggaggcagcgagcgccgtcgtctgcccgggcccgcccatcggggtccccaaccccatccggaccccgccgcccgagcgcgcggccccggaagcacccgcctcccggcatggtgctcaaggccttcttccccacgtgctgcgtctcgacggacagcgggctgctggtgggacggtgggtgccggagcagagcagcgccgtggtcctggcggtcctgcactttcccttcatccccatccaggtcaagcagctcctggcccaggtgcggcaggccagccaggtgggcgtggccgtgctgggcacctggtgccactgccggcaggagcccgaggagagcctgggccgcttcctggagagcctgggtgctgtcttcccccatgagccctggctgcggctgtgccgggagagaggcggcacgttctggagctgcgaggccacccaccggcaagcgcccactgcccccggtgcccctggtgaggaccaggtcatgctcatcttctatgaccagcgccaggtgttgctgtcacagctacacctgcccaccgtcctgcccgaccgccaggctggagccaccactgccagcacggggggcctggctgccgtcttcgacacggtagcacgcagtgaggtgctcttccgcagtgaccgctttgatgagggccccgtgcggctgagccactggcagtcggagggcgtggaggccagcatcctcgcggagctggccaggcgagcctcgggacccatttgtctgctgttggccagcctgctgtcgctggtctcagctgtcagtgcctgccgagtgttcaagctctggcccctgtccttcctcgggagcaaactctccacgtgcgaacagctccggcaccggctggagcacctcacgctaatcttcagtacacggaaggcggagaaccctgcccagctgatgaggaaggccaacacggtggcctctgtgctgctggacgtggccctgggcctcatgctgctgtcctggctccacgggagaagccgcatcgggcatctggccgacgccctcgttcctgtggctgacgtgagtggactggggtggagcccggtgtcccgggtgggcgtggggacccctcctgggcagcagagccttcccgggccagagccaccgccccncaaagccagttctaccttctccatgctctggagacacggccctcccctgaaccagaagcaggaactccaggggcgctggggcctgggcagggcaggcctcgcaggtacacccccctttccttctgaaggggctgtgtgcaggagccagccgggctgaggctctggggagcccgcctctccctgtgggcccagcgtcctggtatctcccttgtggtccctgagatcagcgttgccctcctggctctctggggccctctgcagagccagggtcatgaaacctttcctgtccagggaggcccatgtgcagcccagctgggacttcctgccctgcccctgtgctgattctgtaactcctgtgctgagagccagaggcacagcttgtctcccatctcccaccttccctgcatggtctgtgccccgtttccagccgggtgcagccccctcctctgcagatctagtgcatttccatgctgcctctgggccttcagcttctctgtcttcctccctcagcaccaaagccccgtctcttccattaggagcttgtcttcctgctgggggtggtacctgactctttggcccaccctcgggcctctgtggaggcctccttgaggcctgactgggtgggtcttgtgtgggctgcaggtgtgcactgggcctgcttgtggccaggccaggcctctgggggcagcatcaggcacgtctgtgtggctgtgggggtgcagggagctccagcccagaaggaaggaggggcggggctggggaaggggctcggcagctttgcctgtggtcgtccgcacctgccaccggcctactttgtcctagacctcccttttgcaaaagtgctcagaaatataaatatttaatttaaaaatgaaagtctcttcctgctgccaagctcttatcctttaaatattaaataagctctatttataaagaatgttcttttctcagccgggggtggtggctcatgcctgtaatcccagcactttgggaggccaaggcgggcggatcatgaggtcaggagatcgagaccatcctggctaacacagtgaaatcccgtctctactaaaaatacaaaaaattagccaggtatggtggtgggcacctgtagtcccagctaattgggaggctgaggcaagagaatggcgtgaacccgggaggcagagcttgcagtgagccgagatctcaccactgcactccagcctgggcgacaaaacaagactccgtctcagaa

SEQ ID NO: 431195 - DNA, 856 bp, Homo sapiens
gagcagaaccacctccagcacctgcttgattcccaggcctcgatcccctctgcatgtgaggctgtggggaggcacctctgacctggtgagagggccgggtgctccgcctccagctttgctccagagcaaggcccaatggcagactccgtgccctgctcagggtggggtccctgctctccccaggaccctgcagcctctgggcccccttcatcgtggcccaggatggggtcggactgctctgcccccaggcgcgtctggccgggccggtcctaaatgctcctctgccacagctccggctcctggtggtcgccgtgcagggcctgatccatctgctcgtggacctcatcaactccctgccgctgtactcactgggtcttcggctctgccggccctacaggctggcgggtaagtgctgcgtattgggcagctggccctgggtaggtggaggggaaccacacctgtgggccctgcagaagcaaggacagcatgggccactgtgcctccagcctggaagccgtggtatgcatgcgcaagcgggcagggaggacagggcctcctagtcccagaggtctgcaggaccagctgcctccagggaggtggagagagactcagagactcacctgccgcgcaggttcagaaccctggagacctgaggccacaggcctttgttcttctgccttgggattttctgggcttgggagtctgaactgcaggccaggggccaagcgcggcaaagtcagaggcactaggagccagcagggcggccaccatccagtaagtgcccgtccggctgtgccggaaaaccccgtccactcaacagcacagcctgcgcccgtccctcactggggctcttccc

SEQ ID NO: 431196 - DNA, 1993 bp, Homo sapiens
gacctagagaggtcccaggacacgccactgtcccgccttccccattgcccgccccactggccagtccccacgcccacacacccaaggctgccccatctggcgctgattatcctgctgctgccgccaccgctgctgctgctctgcaaaattcagctgctgcctctgtcttgaggaccccagcgcctttcccccggggccatgctgcctgcagccacagcctccctcctggggcccctcctcactgcctgcgccctgctgccttttgcccagggccagacccccaactacaccagacccgtgttcctgtgcggaggggatgtgaagggggaatcaggttacgtggcaagtgaggggttccccaacctctacccccctaataaggagtgcatctggaccataacggtccccgagggccagactgtgtccctctcattccgagtcttcgacctggagctgcaccccgcctgccgctacgatgctctggaggtcttcgctgggtctgggacttccggccagcggctcggacgcttttgtgggaccttccggcctgcgcccctagtcgcccccggcaaccaggtgaccctgaggatgacgacggatgagggcacaggaggacgaggcttcctgctctggtacagcgggcgggccacctcgggcactgagcaccaattttgcggggggcggctggagaaggcccagggaaccctgaccacgcccaactggcccgagtccgattaccccccgggcatcagctgttcctggcacatcatcgcgcccccggaccaggtcatcgcgctgaccttcgagaagtttgacctggagccggacacctactgccgctatgactcggtcagcgtgttcaacggagccgtgagcgacgactcccggaggctggggaagttctgcggcgacgcagtcccgggctccatctcctccgaagggaatgaactcctcgtccagttcgtctcagatctcagtgtcaccgctgatggcttctcagcctcctacaagaccctgccgcggggcactgccaaagaagggcaagggcccggccccaaacggggaactgagcctaaagtcaagctgccccccaagtcccaacctccggagaaaacagaggaatctccttcagcccctgatgcacccacctgcccaaagcagtgccgccggacaggcaccttgcagagcaacttctgtgccagcagccttgtggtgactgcgacagtgaagtccatggttcgggagccaggggagggccttgccgtgactgtcagtcttattggtgcttataaaactggaggactggacctgccttctccacccactggtgcctccctgaagttttacgtgccttgcaagcagtgcccccccatgaagaaaggagtcagttatctgctgatgggccaggtagaagagaacagaggccccgtccttcctccagagagctttgtggttctccaccggcccaaccaggaccagatcctcaccaacctaagcaagaggaagtgcccctctcaacctgtgcgggctgctgcgtcccaggactgagacgcaggccagccccggcccctagccctcaggccttctttcttatccaaataaatgtttcttaatgaaaaaaaaaaaaaacaaaaaaaaaaaaaaaacaatgtgggccgcttgggccaagtgaattttaaattggagcaagtttttgcttggggccgaatttggggctaattgggccattccccttatggggggcggtttaaaaattaatgggcccggggtttaaaacggggggacgggaaaacccctggggttaccaaatttaatggcttggaggaatacccttttcgccagtgggggataagcaaaaaggcccaaccgatggcctttcaaaaatttgccaccctaatgggaaaggaaattggaaggtttaattttgaaaaatcgcgggaaatttgggaaaacagtcttttttacccaggggccaaagggaaaaccttttaat

SEQ ID NO: 431197 - DNA, 1083 bp, Homo sapiens
gacctagagaggtcccaggacacgccactgtcccgccttccccattgcccgccccactggccagtccccacgcccacacacccaaggctgccccatctggcgctgattatcctgctgctgccgccaccgctgctgctgctctgcaaaattcagctgctgcctctgtcttgaggaccccagcgcctttcccccggggccatgctgcctgcagccacagcctccctcctggggcccctcctcactgcctgcgccctgctgccttttgcccagggccagacccccaactacaccagacccgtgttcctgtgcggaggggatgtgaagggggaatcaggttacgtggcaagtgaggggttccccaacctctacccccctaataaggagtgcatctggaccataacggtccccgagggccagactgtgtccctctcattccgagtcttcgacctggagctgcaccccgcctgccgctacgatgctctggaggtcttcgctgggtctgggacttccggccagcggctcggacgcttttgtgggaccttccggcctgcgcccctagtcgcccccggcaaccaggtgaccctgaggatgacgacggatgagggcacaggaggacgaggcttcctgctctggtacagcgggcgggccacctcgggcactgagcaccaattttgcggggggcggctggagaaggcccagggaaccctgaccacgcccaactggcccgagtccgattaccccccgggcatcagctgttcctggcacatcatcgcgcccccggaccaggtcatcgcgctgaccttcgagaagtttgacctggagccggacacctactgccgctatgactcggtcagcgtgttcaacggagccgtgagcgacgactcccggaggctggggaagttctgcggcgacgcagtcccgggctccatctcctccgaagggaatgaactcctcgtccagttcgtctcagatctcagtgtcaccgctgatggcttctcagcctcctacaagaccctgccgcggggcactgccaaagggaggccggccaagggaaggcaaagaggccccgtccctcgggaaagg

SEQ ID NO: 431198 - DNA, 555 bp, Homo sapiens
  misc_feature (27)..(27): n is a, c, g, or t
ccaacagatattgtatctagtgcgttnctcgcttgttatttcagtcacgagggctccgttcattcccctgtatgtctacccatgctgtcgacatgcaagatgccgccggacaggcaccttgcagagcaacttctgtgccagcagccttgtggtgactgcgacagtgaagtccatggttcgggagccaggggagggccttgccgtgactgtcagtcttattggtgcttataaaactggaggactggacctgccttctccacccactggtgcctccctgaagttttacgtgccttgcaagcagtgcccccccatgaagaaaggagtcagttatctgctgatgggccaggtagaagagaacagaggccccgtccttcctccagagagctttgtggttctccaccggcccaaccaggaccagatcctcaccaacctaagcaagaggaagtgcccctctcaacctgtgcgggctgctgcgtcccaggactgagacgcaggccagccccggcccctagccctcaggccttctttcttatccaaataaatgtttcttaatga

SEQ ID NO: 431199 - DNA, 1649 bp, Homo sapiens
gacctagagaggtcccaggacacgccactgtcccgccttccccattgcccgccccactggccagtccccacgcccacacacccaaggctgccccatctggcgctgattatcctgctgctgccgccaccgctgctgctgctctgcaaaattcagctgctgcctctgtcttgaggaccccagcgcctttcccccggggccatgctgcctgcagccacagcctccctcctggggcccctcctcactgcctgcgccctgctgccttttgcccagggccagacccccaactacaccagacccgtgttcctgtgcggaggggatgtgaagggggaatcaggttacgtggcaagtgaggggttccccaacctctacccccctaataaggagtgcatctggaccataacggtccccgagggccagactgtgtccctctcattccgagtcttcgacctggagctgcaccccgcctgccgctacgatgctctggaggtcttcgctgggtctgggacttccggccagcggctcggacgcttttgtgggaccttccggcctgcgcccctagtcgcccccggcaaccaggtgaccctgaggatgacgacggatgagggcacaggaggacgaggcttcctgctctggtacagcgggcgggccacctcgggcactgagcaccaattttgcggggggcggctggagaaggcccagggaaccctgaccacgcccaactggcccgagtccgattaccccccgggcatcagctgttcctggcacatcatcgcgcccccggaccaggtcatcgcgctgaccttcgagaagtttgacctggagccggacacctactgccgctatgactcggtcagcgtgttcaacggagccgtgagcgacgactcccggaggctggggaagttctgcggcgacgcagtcccgggctccatctcctccgaagggaatgaactcctcgtccagttcgtctcagatctcagtgtcaccgctgatggcttctcagcctcctacaagaccctgccgcggggcactgccaaagaagggcaagggcccggccccaaacggggaactgagcctaaagtcaagctgccccccaagtcccaacctccggagaaaacagaggaatctccttcagcccctgatgcacccacctgcccaaagcagtgccgccggacaggcaccttgcagagcaacttctgtgccagcagccttgtggtgactgcgacagtgaagtccatggttcgggagccaggggagggccttgccgtgactgtcagtcttattggtgcttataaaactggaggactggacctgccttctccacccactggtgcctccctgaagttttacgtgccttgcaagcagtgcccccccatgaagaaaggagtcagttatctgctgatgggccaggtagaagagaacagaggccccgtccttcctccagagagctttgtggttctccaccggcccaaccaggaccagatcctcaccaacctaagcaagaggaagtgcccctctcaacctgtgcgggctgctgcgtcccaggactgagacgcaggccagccccggcccctagccctcaggccttctttcttatccaaataaatgtttcttaatgaggaatgggtcagatctccatgcttatggtattg

SEQ ID NO: 431200 - DNA, 1608 bp, Homo sapiens
  misc_feature (1583)..(1583): n is a, c, g, or t
gacctagagaggtcccaggacacgccactgtcccgccttccccattgcccgccccactggccagtccccacgcccacacacccaaggctgccccatctggcgctgattatcctgctgctgccgccaccgctgctgctgctctgcaaaattcagctgctgcctctgtcttgaggaccccagcgcctttcccccggggccatgctgcctgcagccacagcctccctcctggggcccctcctcactgcctgcgccctgctgccttttgcccagggccagacccccaactacaccagacccgtgttcctgtgcggaggggatgtgaagggggaatcaggttacgtggcaagtgaggggttccccaacctctacccccctaataaggagtgcatctggaccataacggtccccgagggccagactgtgtccctctcattccgagtcttcgacctggagctgcaccccgcctgccgctacgatgctctggaggtcttcgctgggtctgggacttccggccagcggctcggacgcttttgtgggaccttccggcctgcgcccctagtcgcccccggcaaccaggtgaccctgaggatgacgacggatgagggcacaggaggacgaggcttcctgctctggtacagcgggcgggccacctcgggcactgagcaccaattttgcggggggcggctggagaaggcccagggaaccctgaccacgcccaactggcccgagtccgattaccccccgggcatcagctgttcctggcacatcatcgcgcccccggaccaggtcatcgcgctgaccttcgagaagtttgacctggagccggacacctactgccgctatgactcggtcagcgtgttcaacggagccgtgagcgacgactcccggaggctggggaagttctgcggcgacgcagtcccgggctccatctcctccgaagggaatgaactcctcgtccagttcgtctcagatctcagtgtcaccgctgatggcttctcagcctcctacaagaccctgccgcggggcactgccaaagaagggcaagggcccggccccaaacggggaactgagcctaaagtcaagctgccccccaagtcccaacctccggagaaaacagaggaatctccttcagcccctgatgcacccacctgcccaaagcagtgccgccggacaggcaccttgcagagcaacttctgtgccagcagccttgtggtgactgcgacagtgaagtccatggttcgggagccaggggagggccttgccgtgactgtcagtcttattggtgcttataaaactggaggactggacctgccttctccacccactggtgcctccctgaagttttacgtgccttgcaagcagtgcccccccatgaagaaaggagtcagttatctgctgatgggccaggtagaagagaacagaggccccgtccttcctccagagagctttgtggttctccaccggcccaaccaggaccagatcctcaccaacctaagcaagaggaagtgcccctctcaacctgtgcgggctgctgcgtcccaggactgagacgcaggccagccccggccccttttccagagctnaggatcctctagatcacccagcaac

SEQ ID NO: 431201 - DNA, 1598 bp, Homo sapiens
ctcttggggttggagggatggtcgagttgccaggcccacttttcccttatctttgtgggagtctgggacaccccagccctgtcctggctggtggaagctgccccaggtctctcaaggcctttccatttcatcccccagcttccctccttggagtttcatcctcatcacctcatccccatcttgccagtgctcccccgtcccacccgtccctgctctttcctgaccccttttctgttctccagacccgtgttcctgtgcggaggggatgtgaagggggaatcaggttacgtggcaagtgaggggttccccaacctctacccccctaataaggagtgcatctggaccataacggtccccgagggccagactgtgtccctctcattccgagtcttcgacctggagctgcaccccgcctgccgctacgatgctctggaggtcttcgctgggtctgggacttccggccagcggctcggacgcttttgtgggaccttccggcctgcgcccctagtcgcccccggcaaccaggtgaccctgaggatgacgacggatgagggcacaggaggacgaggcttcctgctctggtacagcgggcgggccacctcgggcactgagcaccaattttgcggggggcggctggagaaggcccagggaaccctgaccacgcccaactggcccgagtccgattaccccccgggcatcagctgttcctggcacatcatcgcgcccccggaccaggtcatcgcgctgaccttcgagaagtttgacctggagccggacacctactgccgctatgactcggtcagcgtgttcaacggagccgtgagcgacgactcccggaggctggggaagttctgcggcgacgcagtcccgggctccatctcctccgaagggaatgaactcctcgtccagttcgtctcagatctcagtgtcaccgctgatggcttctcagcctcctacaagaccctgccgcggggcactgccaaagaagggcaagggcccggccccaaacggggaactgagcctaaagtcaagctgccccccaagtcccaacctccggagaaaacagaggaatctccttcagcccctgatgcacccacctgcccaaagcagtgccgccggacaggcaccttgcagagcaacttctgtgccagcagccttgtggtgactgcgacagtgaagtccatggttcgggagccaggggagggccttgccgtgactgtcagtcttattggtgcttataaaactggaggactggacctgccttctccacccactggtgcctccctgaagttttacgtgccttgcaagcagtgcccccccatgaagaaaggagtcagttatctgctgatgggccaggtagaagagaacagaggccccgtccttcctccagagagctttgtggttctccaccggcccaaccaggaccagatcctcaccaacctaagcaagaggaagtgcccctctcaacctgtgcgggctgctgcgtcccaggactgagacgcaggccagccccggcccctagccctcaggccttctttcttatccaaataaatgtttcttaatgaggaatgggtcagatctccatgcttatggtattg

SEQ ID NO: 431202 - DNA, 2253 bp, Homo sapiens
gacctagagaggtcccaggacacgccactgtcccgccttccccattgcccgccccactggccagtccccacgcccacacacccaaggctgccccatctggcgctgattatcctgctgctgccgccaccgctgctgctgctctgcaaaattcagctgctgcctctgtcttgaggaccccagcgcctttcccccggggccatgctgcctgcagccacagcctccctcctggggcccctcctcactgcctgcgccctgctgccttttgcccagggccagacccccaactacaccagacccgtgttcctgtgcggaggggatgtgaagggggaatcaggttacgtggcaagtgaggggttccccaacctctacccccctaataaggagtgcatctggaccataacggtccccgagggccagactgtgtccctctcattccgagtcttcgacctggagctgcaccccgcctgccgctacgatgctctggaggtcttcgctgggtctgggacttccggccagcggctcggacgcttttgtgggaccttccggcctgcgcccctagtcgcccccggcaaccaggtgaccctgaggatgacgacggatgagggcacaggaggacgaggcttcctgctctggtacagcgggcgggccacctcgggcactgagcaccaattttgcggggggcggctggagaaggcccagggaaccctgaccacgcccaactggcccgagtccgattaccccccgggcatcagctgttcctggcacatcatcgcgcccccggaccaggtcatcgcgctgaccttcgagaagtttgacctggagccggacacctactgccgctatgactcggtcagcgtgttcaacggagccgtgagcgacgactcccggaggctggggaagttctgcggcgacgcagtcccggggtgaggggcgggacctgggcgagtccgggagagagtcggcggaccgcacgcacgcggctgttttggaggggcggggttcagctaaagggacgggatctgaaccccagggctccaaaccggcgaggggagcaggttggaggccaggcaaagaggagatttggccccgggtctggggtccgcggatagagaggcgactggggctctgcgaagttgggacgaagttaaaaggccacctggccaggggtagtggctcatgcctgtaatcatagcactttgggaggctgaagcgggaggatcacctgagcttaggaattcgagaccagcctgggcaacatggcgcaaccttgtctgtaccaaaaatacaaaataattagctgggcatggtggcgtgcctgtagtcccagcaacttgcggggctgaggcaggaggattacttgaacccagaaggtcaaggctgcagtaagcctagatggagccactgcactcaagcctgggagacaaagtgagaccctgtctcaaacaaacaaaaaaggtcatggggctgagaagagtgtggtgcacgcccgccctgacacttcccccaatgctcggtggccacctgcagctccatctcctccgaagggaatgaactcctcgtccagttcgtctcagatctcagtgtcaccgctgatggcttctcagcctcctacaagaccctgccgcggggcactgccaaagaagggcaagggcccggccccaaacggggaactgagcctaaagtcaagctgccccccaagtcccaacctccggagaaaacagaggaatctccttcagcccctgatgcacccacctgcccaaagcagtgccgccggacaggcaccttgcagagcaacttctgtgccagcagccttgtggtgactgcgacagtgaagtccatggttcgggagccaggggagggccttgccgtgactgtcagtcttattggtgcttataaaactggaggactggacctgccttctccacccactggtgcctccctgaagttttacgtgccttgcaagcagtgcccccccatgaagaaaggagtcagttatctgctgatgggccaggtagaagagaacagaggccccgtccttcctccagagagctttgtggttctccaccggcccaaccaggaccagatcctcaccaacctaagcaagaggaagtgcccctctcaacctgtgcgggctgctgcgtcccaggactgagacgcaggccagccccggcccctagccctcaggccttctttcttatccaaataaatgtttcttaatgaggaatgggtcagatctccatgcttatggtattg

SEQ ID NO: 431203 - DNA, 2713 bp, Homo sapiens
gacctagagaggtcccaggacacgccactgtcccgccttccccattgcccgccccactggccagtccccacgcccacacacccaaggctgccccatctggcgctgattatcctgctgctgccgccaccgctgctgctgctctgcaaaattcagctgctgcctctgtcttgaggaccccagcgcctttcccccggggccatgctgcctgcagccacagcctccctcctggggcccctcctcactgcctgcgccctgctgccttttgcccagggccagacccccaactacaccagacccgtgttcctgtgcggaggggatgtgaagggggaatcaggttacgtggcaagtgaggggttccccaacctctacccccctaataaggagtgcatctggaccataacggtccccgagggccagactgtgtccctctcattccgagtcttcgacctggagctgcaccccgcctgccgctacgatgctctggaggtcttcgctgggtctgggacttccggccagcggctcggacgcttttgtgggaccttccggcctgcgcccctagtcgcccccggcaaccaggtgaccctgaggatgacgacggatgagggcacaggaggacgaggcttcctgctctggtacagcgggcgggccacctcgggcactgagcaccaattttgcggggggcggctggagaaggcccagggaaccctgaccacgcccaactggcccgagtccgattaccccccgggcatcagctgttcctggcacatcatcgcgcccccggaccaggtaccgaccctcctccccgggctgccctaggggacccaggcggcgccctccagcttgcagccagcagagatttattgaagatctgctgtgtcccgagcactgcgcttgcgctggtgggcacccaaaacagccccaacccctgcatgcacgcaaacaaaaatgtaaaaattacaactgagacaagtctcaggagagcgaggtacagggtcctggtataacacgcgggcctgtcacttgtgagtgcgccaggacttgaccttgccaaccacgacgaccgacacccctgcagggtcccatgggtgtgtgtggtcctccgtgctgtggtgtgaacgccttcaggaggggggcccagaggacgcgggaggtgggagtgggagctgctgcaggcacccagtaggagatgaggtgcaggcgcccaggggtgtcccgccgcgcagtccccgcctccgcccgccgccaggtcatcgcgctgaccttcgagaagtttgacctggagccggacacctactgccgctatgactcggtcagcgtgttcaacggagccgtgagcgacgactcccggaggctggggaagttctgcggcgacgcagtcccggggtgaggggcgggacctgggcgagtccgggagagagtcggcggaccgcacgcacgcggctgttttggaggggcggggttcagctaaagggacgggatctgaaccccagggctccaaaccggcgaggggagcaggttggaggccaggcaaagaggagatttggccccgggtctggggtccgcggatagagaggcgactggggctctgcgaagttgggacgaagttaaaaggccacctggccaggggtagtggctcatgcctgtaatcatagcactttgggaggctgaagcgggaggatcacctgagcttaggaattcgagaccagcctgggcaacatggcgcaaccttgtctgtaccaaaaatacaaaataattagctgggcatggtggcgtgcctgtagtcccagcaacttgcggggctgaggcaggaggattacttgaacccagaaggtcaaggctgcagtaagcctagatggagccactgcactcaagcctgggagacaaagtgagaccctgtctcaaacaaacaaaaaaggtcatggggctgagaagagtgtggtgcacgcccgccctgacacttcccccaatgctcggtggccacctgcagctccatctcctccgaagggaatgaactcctcgtccagttcgtctcagatctcagtgtcaccgctgatggcttctcagcctcctacaagaccctgccgcggggcactgccaaagaagggcaagggcccggccccaaacggggaactgagcctaaagtcaagctgccccccaagtcccaacctccggagaaaacagaggaatctccttcagcccctgatgcacccacctgcccaaagcagtgccgccggacaggcaccttgcagagcaacttctgtgccagcagccttgtggtgactgcgacagtgaagtccatggttcgggagccaggggagggccttgccgtgactgtcagtcttattggtgcttataaaactggaggactggacctgccttctccacccactggtgcctccctgaagttttacgtgccttgcaagcagtgcccccccatgaagaaaggagtcagttatctgctgatgggccaggtagaagagaacagaggccccgtccttcctccagagagctttgtggttctccaccggcccaaccaggaccagatcctcaccaacctaagcaagaggaagtgcccctctcaacctgtgcgggctgctgcgtcccaggactgagacgcaggccagccccggcccctagccctcaggccttctttcttatccaaataaatgtttcttaatgaggaatgggtcagatctccatgcttatggtattg

SEQ ID NO: 431204 - DNA, 1286 bp, Homo sapiens
gacctagagaggtcccaggacacgccactgtcccgccttccccattgcccgccccactggccagtccccacgcccacacacccaaggctgccccatctggcgctgattatcctgctgctgccgccaccgctgctgctgctctgcaaaattcagctgctgcctctgtcttgaggaccccagcgcctttcccccggggccatgctgcctgcagccacagcctccctcctggggcccctcctcactgcctgcgccctgctgccttttgcccagggccagacccccaactacaccagacccgtgttcctgtgcggaggggatgtgaagggggaatcaggttacgtggcaagtgaggggttccccaacctctacccccctaataaggagtgcatctggaccataacggtccccgagggccagactgtgtccctctcattccgagtcttcgacctggagctgcaccccgcctgccgctacgatgctctggaggtcttcgctgggtctgggacttccggccagcggctcggacgcttttgtgggaccttccggcctgcgcccctagtcgcccccggcaaccaggtgaccctgaggatgacgacggatgagggcacaggaggacgaggcttcctgctctggtacagcgggcgggccacctcgggcactgagcaccaattttgcggggggcggctggagaaggcccagggaaccctgaccacgcccaactggcccgagtccgattaccccccgggcatcagctgttcctggcacatcatcgcgcccccggaccaggtaccgaccctcctccccgggctgccctaggggacccaggcggcgccctccagcttgcagccagcagagatttattgaagatctgctgtgtcccgagcactgcgcttgcgctggtgggcacccaaaacagccccaacccctgcatgcacgcaaacaaaaatgtaaaaattacaactgagacaagtctcaggagagcgaggtacagggtcctggtataacacgcgggcctgtcacttgtgagtgcgccaggacttgaccttgccaaccacgacgaccgacacccctgcagggtcccatgggtgtgtgtggtcctccgtgctgtggtgtgaacgccttcaggaggggggcccagaggacgcgggaggtgggagtgggagctgctgcaggcacccagtaggagatgaggtgcgggctgctgcgtcccaggactgagacgcaggccagccccggcccctagccctcaggccttctttcttatccaaataaatgtttcttaatga

SEQ ID NO: 431205 - DNA, 1616 bp, Homo sapiens
gacctagagaggtcccaggacacgccactgtcccgccttccccattgcccgccccactggccagtccccacgcccacacacccaaggctgccccatctggcgctgattatcctgctgctgccgccaccgctgctgctgctctgcaaaattcagctgctgcctctgtcttgaggaccccagcgcctttcccccggggccatgctgcctgcagccacagcctccctcctggggcccctcctcactgcctgcgccctgctgccttttgcccagggccagacccccaactacaccagacccgtgttcctgtgcggaggggatgtgaagggggaatcaggttacgtggcaagtgaggggttccccaacctctacccccctaataaggagtgcatctggaccataacggtccccgagggccagactgtgtccctctcattccgagtcttcgacctggagctgcaccccgcctgccgctacgatgctctggaggtcttcgctgggtctgggacttccggccagcggctcggacgcttttgtgggaccttccggcctgcgcccctagtcgcccccggcaaccaggtgaccctgaggatgacgacggatgagggcacaggaggacgaggcttcctgctctggtacagcgggcgggccacctcgggcactgagcaccaattttgcggggggcggctggagaaggcccagggaaccctgaccacgcccaactggcccgagtccgattaccccccgggcatcagctgttcctggcacatcatcgcgcccccggaccaggtcatcgcgctgaccttcgagaagtttgacctggagccggacacctactgccgctatgactcggtcagcgtgttcaacggagccgtgagcgacgactcccggaggctggggaagttctgcggcgacgcagtcccgggctccatctcctccgaagggaatgaactcctcgtccagttcgtctcagatctcagtgtcaccgctgatggcttctcagcctcctacaagaccctgccgcggggcactgccaaagaagggcaagggcccggccccaaacggggaactgagcctaaagtcaagctgccccccaagtcccaacctccggagaaaacagaggaatctccttcagcccctgatgcacccacctgcccaaagcagtgccgccggacaggcaccttgcagagcaacttctgtgccagcagccttgtggtgactgcgacagtgaagtccatggttcgggagccaggggagggccttgccgtgactgtcagtcttattggtgcttataaaactggaggactggacctgccttctccacccactggtgcctccctgaagttttacgtgccttgcaagcagtgcccccccatgaagaaaggagtcagttatctgctgatgggccaggtagaagagaacagaggccccgtccttcctccagagagctttgtggttctccaccggcccaaccaggaccagatcctcaccaacctaagcaagaggaagtgcccctctcaacctgtgcgggctgctgcgtcccaggactgagacgcaggccagccccggcccctagccctcaggccttctttcttatccaaataaatgtttcttaatga

SEQ ID NO: 431206 - DNA, 319 bp, Homo sapiens
gcacgaggtaaaacttcagggaggcaccagtgggtggagaaggcaggtccagtcctccagttttataagcaccaataagactgagagtcagttatctgctgatgggccaggtagaagagaacagaggccccgtccttcctccagagagctttgtggttctccaccggcccaaccaggaccagatcctcaccaacctaagcaagaggaagtgcccctctcaacctgtgcgggctgctgcgtcccaggactgagacgcaggccagccccggcccctagccctcaggccttctttcttatccaaataaatgtttcttaatga

SEQ ID NO: 431207 - DNA, 2080 bp, Homo sapiens
gacctagagaggtcccaggacacgccactgtcccgccttccccattgcccgccccactggccagtccccacgcccacacacccaaggctgccccatctggcgctgattatcctgctgctgccgccaccgctgctgctgctctgcaaaattcagctgctgcctctgtcttgaggaccccagcgcctttcccccggggccatgctgcctgcagccacagcctccctcctggggcccctcctcactgcctgcgccctgctgccttttgcccagggccagacccccaactacaccagacccgtgttcctgtgcggaggggatgtgaagggggaatcaggttacgtggcaagtgaggggttccccaacctctacccccctaataaggagtgcatctggaccataacggtccccgagggccagactgtgtccctctcattccgagtcttcgacctggagctgcaccccgcctgccgctacgatgctctggaggtcttcgctgggtctgggacttccggccagcggctcggacgcttttgtgggaccttccggcctgcgcccctagtcgcccccggcaaccaggtgaccctgaggatgacgacggatgagggcacaggaggacgaggcttcctgctctggtacagcgggcgggccacctcgggcactgagcaccaattttgcggggggcggctggagaaggcccagggaaccctgaccacgcccaactggcccgagtccgattaccccccgggcatcagctgttcctggcacatcatcgcgcccccggaccaggtcatcgcgctgaccttcgagaagtttgacctggagccggacacctactgccgctatgactcggtcagcgtgttcaacggagccgtgagcgacgactcccggaggctggggaagttctgcggcgacgcagtcccgggctccatctcctccgaagggaatgaactcctcgtccagttcgtctcagatctcagtgtcaccgctgatggcttctcagcctcctacaagaccctgccgcggggcactgccaaagaagggcaagggcccggccccaaacggggaactgagcctaaagtcaagctgccccccaagtcccaacctccggagaaaacagaggaatctccttcagcccctgatgcacccacctgcccaaagcagtgccgccggacaggcaccttgcagagcaacttctgtgccagcagccttgtggtgactgcgacagtgaagtccatggttcgggagccaggggagggccttgccgtgactgtcagtcttattggtgcttataaaactggaggactggacctgccttctccacccactggtgcctccctgaagttttacgtgccttgcaagcagtgcccccccatgaagaaaggagtcagttatctgctgatgggccaggtagaagagaacagaggccccgtccttcctccagagagctttgtggttctccaccggcccaaccaggaccagatcctcaccaacctaagcaagaggaagtgcccctctcaacctgtgcgggctgctgcgtcccaggactgagacgcaggccagccccggcccctagccctcaggccttctttcttatccaaataaatgtttcttaatgaaaaaaaaaaaaaaaaaaaaaaaaaaaaaaaaaaaaaaaaaaaaaaaaaaaaaaaaaaaaaaaaaaaaaaaaaaaaaaaaaaaaagggaaaaaaaaaaaaacaaaaaaaaaaaaaaaacaatgtgggccgcttgggccaagtgaattttaaattggagcaagtttttgcttggggccgaatttggggctaattgggccattccccttatggggggcggtttaaaaattaatgggcccggggtttaaaacggggggacgggaaaacccctggggttaccaaatttaatggcttggaggaatacccttttcgccagtgggggataagcaaaaaggcccaaccgatggcctttcaaaaatttgccaccctaatgggaaaggaaattggaaggtttaattttgaaaaatcgcgggaaatttgggaaaacagtcttttttacccaggggccaaagggaaaaccttttaat

SEQ ID NO: 431208 - DNA, 1646 bp, Homo sapiens
  misc_feature (1384)..(1384): n is a, c, g, or t
  misc_feature (1621)..(1621): n is a, c, g, or t
  misc_feature (1629)..(1629): n is a, c, g, or t
gacctagagaggtcccaggacacgccactgtcccgccttccccattgcccgccccactggccagtccccacgcccacacacccaaggctgccccatctggcgctgattatcctgctgctgccgccaccgctgctgctgctctgcaaaattcagctgctgcctctgtcttgaggaccccagcgcctttcccccggggccatgctgcctgcagccacagcctccctcctggggcccctcctcactgcctgcgccctgctgccttttgcccagggccagacccccaactacaccagacccgtgttcctgtgcggaggggatgtgaagggggaatcaggttacgtggcaagtgaggggttccccaacctctacccccctaataaggagtgcatctggaccataacggtccccgagggccagactgtgtccctctcattccgagtcttcgacctggagctgcaccccgcctgccgctacgatgctctggaggtcttcgctgggtctgggacttccggccagcggctcggacgcttttgtgggaccttccggcctgcgcccctagtcgcccccggcaaccaggtgaccctgaggatgacgacggatgagggcacaggaggacgaggcttcctgctctggtacagcgggcgggccacctcgggcactgagcaccaattttgcggggggcggctggagaaggcccagggaaccctgaccacgcccaactggcccgagtccgattaccccccgggcatcagctgttcctggcacatcatcgcgcccccggaccaggtcatcgcgctgaccttcgagaagtttgacctggagccggacacctactgccgctatgactcggtcagcgtgttcaacggagccgtgagcgacgactcccggaggctggggaagttctgcggcgacgcagtcccgggctccatctcctccgaagggaatgaactcctcgtccagttcgtctcagatctcagtgtcaccgctgatggcttctcagcctcctacaagaccctgccgcggggcactgccaaagaagggcaagggcccggccccaaacggggaactgagcctaaagtcaagctgccccccaagtcccaacctccggagaaaacagaggaatctccttcagcccctgatgcacccacctgcccaaagcagtgccgccggacaggcaccttgcagagcaacttctgtgccagcagccttgtggtgactgcgacagtgaagtccatggttcgggagccaggggagggccttgccgtgactgtcagtcttattggtgcttataaaactggaggactggacctgccttctccacccactggtgcctccctgaagttttacgtgccttgcaagcagtgcccccccatgaagaaagaangcctgagggctaggggccggggctggcctgcgtctcagtcctgggacgcagcagcccgcacaggttgagaggggcacttcctcttgcttaggttggtgaggatctggtcctggttgggccggtggagaaccacaaagctctctggaggaaggacggggcctctgttctcttctacctggcccatcagcagataactgactcctttcttcatgggggggcactgcttgcaggtctgancggccgcnaatttagtagtagtagt

SEQ ID NO: 431209 - DNA, 2109 bp, Homo sapiens
gacctagagaggtcccaggacacgccactgtcccgccttccccattgcccgccccactggccagtccccacgcccacacacccaaggctgccccatctggcgctgattatcctgctgctgccgccaccgctgctgctgctctgcaaaattcagctgctgcctctgtcttgaggaccccagcgcctttcccccggggccatgctgcctgcagccacagcctccctcctggggcccctcctcactgcctgcgccctgctgccttttgcccagggccagacccccaactacaccagacccgtgttcctgtgcggaggggatgtgaagggggaatcaggttacgtggcaagtgaggggttccccaacctctacccccctaataaggagtgcatctggaccataacggtccccgagggccagactgtgtccctctcattccgagtcttcgacctggagctgcaccccgcctgccgctacgatgctctggaggtcttcgctgggtctgggacttccggccagcggctcggacgcttttgtgggaccttccggcctgcgcccctagtcgcccccggcaaccaggtgaccctgaggatgacgacggatgagggcacaggaggacgaggcttcctgctctggtacagcgggcgggccacctcgggcactgagcaccaattttgcggggggcggctggagaaggcccagggaaccctgaccacgcccaactggcccgagtccgattaccccccgggcatcagctgttcctggcacatcatcgcgcccccggaccaggtaccgaccctcctccccgggctgccctaggggacccaggcggcgccctccagcttgcagccagcagagatttattgaagatctgctgtgtcccgagcactgcgcttgcgctggtgggcacccaaaacagccccaacccctgcatgcacgcaaacaaaaatgtaaaaattacaactgagacaagtctcaggagagcgaggtacagggtcctggtataacacgcgggcctgtcacttgtgagtgcgccaggacttgaccttgccaaccacgacgaccgacacccctgcagggtcccatgggtgtgtgtggtcctccgtgctgtggtgtgaacgccttcaggaggggggcccagaggacgcgggaggtgggagtgggagctgctgcaggcacccagtaggagatgaggtgcaggcgcccaggggtgtcccgccgcgcagtccccgcctccgcccgccgccaggtcatcgcgctgaccttcgagaagtttgacctggagccggacacctactgccgctatgactcggtcagcgtgttcaacggagccgtgagcgacgactcccggaggctggggaagttctgcggcgacgcagtcccgggctccatctcctccgaagggaatgaactcctcgtccagttcgtctcagatctcagtgtcaccgctgatggcttctcagcctcctacaagaccctgccgcggggcactgccaaagaagggcaagggcccggccccaaacggggaactgagcctaaagtcaagctgccccccaagtcccaacctccggagaaaacagaggaatctccttcagcccctgatgcacccacctgcccaaagcagtgccgccggacaggcaccttgcagagcaacttctgtgccagcagccttgtggtgactgcgacagtgaagtccatggttcgggagccaggggagggccttgccgtgactgtcagtcttattggtgcttataaaactggaggactggacctgccttctccacccactggtgcctccctgaagttttacgtgccttgcaagcagtgcccccccatgaagaaaggagtcagttatctgctgatgggccaggtagaagagaacagaggccccgtccttcctccagagagctttgtggttctccaccggcccaaccaggaccagatcctcaccaacctaagcaagaggaagtgcccctctcaacctgtgcgggctgctgcgtcccaggactgagacgcaggccagccccggcccctagccctcaggccttctttcttatccaaataaatgtttcttaatgaggaatgggtcagatctccatgcttatggtattg

SEQ ID NO: 431210 - DNA, 1433 bp, Homo sapiens
ggtcggggaggggccagaagggggcgtccagccagttcctcctcccgcttccaccgcccgccagtgcgccctgcggccccagacttccccgagccgcgctcctcccggccgctctctgttaacctgcccccatcttacctccccttcttctcgtcccctcatcctgagccccagacatccgagctgcctgccggggctcccagcctagagttctcctgaagctgaccgagggtctccaccgccccccacccccgctcctctctcccctccccagagcaccaattttgcggggggcggctggagaaggcccagggaaccctgaccacgcccaactggcccgagtccgattaccccccgggcatcagctgttcctggcacatcatcgcgcccccggaccagggtcccatgggtgtgtgtggtcctccgtgctgtggtgtgaacgccttcaggaggggggcccagaggacgcgggaggtgggagtgggagctgctgcaggcacccagtaggagatgaggtgcaggcgcccaggggtgtcccgccgcgcagtccccgcctccgcccgccgccaggtcatcgcgctgaccttcgagaagtttgacctggagccggacacctactgccgctatgactcggtcagcgtgttcaacggagccgtgagcgacgactcccggaggctggggaagttctgcggcgacgcagtcccgggctccatctcctccgaagggaatgaactcctcgtccagttcgtctcagatctcagtgtcaccgctgatggcttctcagcctcctacaagaccctgccgcggggcactgccaaagaagggcaagggcccggccccaaacggggaactgagcctaaagtcaagctgccccccaagtcccaacctccggagaaaacagaggaatctccttcagcccctgatgcacccacctgcccaaagcagtgccgccggacaggcaccttgcagagcaacttctgtgccagcagccttgtggtgactgcgacagtgaagtccatggttcgggagccaggggagggccttgccgtgactgtcagtcttattggtgcttataaaactggaggactggacctgccttctccacccactggtgcctccctgaagttttacgtgccttgcaagcagtgcccccccatgaagaaaggagtcagttatctgctgatgggccaggtagaagagaacagaggccccgtccttcctccagagagctttgtggttctccaccggcccaaccaggaccagatcctcaccaacctaagcaagaggaagtgcccctctcaacctgtgcgggctgctgcgtcccaggactgagacgcaggccagccccggcccctagccctcaggccttctttcttatccaaataaatgtttcttaatgaggaatgggtcagatctccatgcttatggtattg

SEQ ID NO: 431211 - DNA, 1347 bp, Homo sapiens
gacctagagaggtcccaggacacgccactgtcccgccttccccattgcccgccccactggccagtccccacgcccacacacccaaggctgccccatctggcgctgattatcctgctgctgccgccaccgctgctgctgctctgcaaaattcagctgctgcctctgtcttgaggaccccagcgcctttcccccggggccatgctgcctgcagccacagcctccctcctggggcccctcctcactgcctgcgccctgctgccttttgcccagggccagacccccaactacaccagacccgtgttcctgtgcggaggggatgtgaagggggaatcaggttacgtggcaagtgaggggttccccaacctctacccccctaataaggagtgcatctggaccataacggtccccgagggccagactgtgtccctctcattccgagtcttcgacctggagctgcaccccgcctgccgctacgatgctctggaggtcttcgctgggtctgggacttccggccagcggctcggacgcttttgtgggaccttccggcctgcgcccctagtcgcccccggcaaccaggtgaccctgaggatgacgacggatgagggcacaggaggacgaggcttcctgctctggtacagcgggcgggccacctcgggcactgagcaccaattttgcggggggcggctggagaaggcccagggaaccctgaccacgcccaactggcccgagtccgattaccccccgggcatcagctgttcctggcacatcatcgcgcccccggaccagctccatctcctccgaagggaatgaactcctcgtccagttcgtctcagatctcagtgtcaccgctgatggcttctcagcctcctacaagaccctgccgcggggcactgccaaagaagggcaagggcccggccccaaacggggaactgagcctaaagtcaagctgccccccaagtcccaacctccggagaaaacagaggaatctccttcagcccctgtggacctgccttctccacccactggtgcctccctgaagttttacgtgccttgcaagcagtgcccccccatgaagaaaggagtcagttatctgctgatgggccaggtagaagagaacagaggccccgtccttcctccagagagctttgtggttctccaccggcccaaccaggaccagatcctcaccaacctaagcaagaggaagtgcccctctcaacctgtgcgggctgctgcgtcccaggactgagacgcaggccagccccggcccctagccctcaggccttctttcttatccaaataaatgtttcttaatgaggaatgggtcagatctccatgcttatggtattg

SEQ ID NO: 431212 - DNA, 600 bp, Homo sapiens
acaggtctgaatctatttgctcactgtgtagtgctttaggaatacaatttaacctctccgtgcttcagtttgtttgtccctaagatagagctaatgatagaaacctacttcacccagttgtgaaaattaactgactgcatgtcaagcactaacagtttctggcacatagtatgcataatgtaaattatgtgctgagaagcgagaaagaataacttgggaaaacgctgaatatcatcaatgtcgaatagctaaccagtagctaaggtccaaggtctcctctcttccttctatgtggcactcttgtttctggttcatctactccccttgggtgtcacctccttgagtgaagtacctgctggagatgagaagagtggaactggatctgcatgacagctttgattaggatggagctaagacttggctatctccctgttttgtgttttggatgggtgacattttaaaactgccaatattcaaatcctgctaatttgctttgtacagtttaaaatgtttgatatcttttgttgtttaaagtttgagattggttttgaatatacagttttcctacatcttgaagaaagttatgtttgtttactctga

SEQ ID NO: 431213 - DNA, 1349 bp, Homo sapiens
aaccgggcgtcccccagccgcgcccccagcgggaccgagcgtgacccagctgcggccggccagccatggagactggagcgctgcggcgcccgcaacttctcccgttgctgctgctgctctgcggtgggtgtcccagagcaggcggctgcaacgagacaggcatgttggagaggctgcccctgtgtgggaaggctttcgcagacatgatgggcaaggtggacgtctggaagtggtgcaacctgtccgagttcatcgtgtactatgagagtttcaccaactgcaccgagatggaggccaatgtcgtgggctgctactggcccaaccccctggcccagggcttcatcaccggcatccacaggcagttcttctccaactgcaccgtggacagggtccacttggaggaccccccagacgaggttctcatcccgctgatcgttatacccgtcgttctgactgtcgccatggctggcctggtggtgtggcgcagcaaacgcaccgacacgctgctgtgagggtcccggtgagatggagtgggtcacacctggcaagctggaagaaagttccctggggatgggagagcgggtgggtgctgccaatctccagctactgtggccacaccccacctggtcatgggcagacccctcccttcctgggctgacctgctccctcgaggccagcctgctccctggctgaggctcaggctatccgcccaagctctttgctcattctagggccagtggaggaaaatgtgataaggccagagcttgtgtgctgggcaagaaatcacctgctgcatcctgtgctccgcaggctgggccggagcctctgcccgcaggtttctatgctgtttcttagcacagaatccagcctagccttagccgcagtctaggccctgcttggactaggactccttgcttgaccccatctctggttcctgccctggctcctgcaccagccccagctcctgcctacatccaggcagaaagataggcaggggctcttggaagacgttccgtgctgtgacctccgagccctcctggtgggaagacagctggaaaggctgggaggagaagggaggggctgggggttcccaggagccatgcgtggcctgcagagtccattccatcatgatgctgtgcccgctatgggctgtgtccatgaccagaggctggagtgggggtgtgttagagcccctcaccgggacttgctgtgcggatggggcctgggcctccttcctacaggggctcctctgtgggtgaggggccctctggaatggcatcccatgagcttgtggcctctatctgctaccatctgtgttttatctgagtaaagttaccttacttctggaa

SEQ ID NO: 431214 - DNA, 1378 bp, Homo sapiens
  misc_feature (3)..(3): n is a, c, g, or t
  misc_feature (18)..(18): n is a, c, g, or t
tangaaagctcgcctgcntttgggaatctccaggatcccccgcaaatttccttccactcgggaccgagcgtgacccagctgcggccggccagccatggagactggagcgctgcggcgcccgcaacttctcccgttgctgctgctgctctgcggtgggtgtcccagagcaggcggctgcaacgagacaggcatgttggagaggctgcccctgtgtgggaaggctttcgcagacatgatgggcaaggtggacgtctggaagtggtgcaacctgtccgagttcatcgtgtactatgagagtttcaccaactgcaccgagatggaggccaatgtcgtgggctgctactggcccaaccccctggcccagggcttcatcaccggcatccacaggcagttcttctccaactgcaccgtggacagggtccacttggaggaccccccagacgaggttctcatcccgctgatcgttatacccgtcgttctgactgtcgccatggctggcctggtggtgtggcgcagcaaacgcaccgacacgctgctgtgagggtcccggtgagatggagtgggtcacacctggcaagctggaagaaagttccctggggatgggagagcgggtgggtgctgccaatctccagctactgtggccacaccccacctggtcatgggcagacccctcccttcctgggctgacctgctccctcgaggccagcctgctccctggctgaggctcaggctatccgcccaagctctttgctcattctagggccagtggaggaaaatgtgataaggccagagcttgtgtgctgggcaagaaatcacctgctgcatcctgtgctccgcaggctgggccggagcctctgcccgcaggtttctatgctgtttcttagcacagaatccagcctagccttagccgcagtctaggccctgcttggactaggactccttgcttgaccccatctctggttcctgccctggctcctgcaccagccccagctcctgcctacatccaggcagaaagataggcaggggctcttggaagacgttccgtgctgtgacctccgagccctcctggtgggaagacagctggaaaggctgggaggagaagggaggggctgggggttcccaggagccatgcgtggcctgcagagtccattccatcatgatgctgtgcccgctatgggctgtgtccatgaccagaggctggagtgggggtgtgttagagcccctcaccgggacttgctgtgcggatggggcctgggcctccttcctacaggggctcctctgtgggtgaggggccctctggaatggcatcccatgagcttgtggcctctatctgctaccatctgtgttttatctgagtaaagttaccttacttctggaa

SEQ ID NO: 431215 - DNA, 1008 bp, Homo sapiens
ggaggatcccaccatacgaggttctcatcccgctgatcgttatactccagtctggctgactgtggccacttgactggacttgtgtggtgtgactcatgataggctccgaaacgcatgcatagtgacagcggtgcgcggtgagcatgggcagttggtgtcaacacacatcgcgcgaatcgtgggtatactagaagttccaccttgagtggattgcggatcatcgggtggtgctcgcatgccgaatccctccaagacttacttgtgagcccaccagccctagcactggtcatgggcagacccctcccttcctgggctgacctgctccctcgaggccagcctgctccctggctgaggctcaggctatccgcccaagctctttgctcattctagggccagtggaggaaaatgtgataaggccagagcttgtgtgctgggcaagaaatcacctgctgcatcctgtgctccgcaggctgggccggagcctctgcccgcaggtttctatgctgtttcttagcacagaatccagcctagccttagccgcagtctaggccctgcttggactaggactccttgcttgaccccatctctggttcctgccctggctcctgcaccagccccagctcctgcctacatccaggcagaaagataggcaggggctcttggaagacgttccgtgctgtgacctccgagccctcctggtgggaagacagctggaaaggctgggaggagaagggaggggctgggggttcccaggagccatgcgtggcctgcagagtccattccatcatgatgctgtgcccgctatgggctgtgtccatgaccagaggctggagtgggggtgtgttagagcccctcaccgggacttgctgtgcggatggggcctgggcctccttcctacaggggctcctctgtgggtgaggggccctctggaatggcatcccatgagcttgtggcctctatctgctaccatctgtgttttatctgagtaaagttaccttacttctggaa

SEQ ID NO: 431216 - DNA, 1163 bp, Homo sapiens
aaccgggcgtcccccagccgcgcccccagcgggaccgagcgtgacccagctgcggccggccagccatggagactggagcgctgcggcgcccgcaacttctcccgttgctgctgctgctctgcggtgggtgtcccagagcaggcggctgcaacgagacaggcatgttggagaggctgcccctgtgtgggaaggctttcgcagacatgatgggcaaggtggacgtctggaagtggtgcaacctgtccgagttcatcgtgtactatgagagtttcaccaactgcaccgagatggaggccaatgtcgtgggctgctactggcccaaccccctggcccagggcttcatcaccggcatccacaggcagttcttctccaactgcaccgtggacagggtccacttggaggaccccccagacgaggttctcatcccgctgatcgttatacccgtcgttctgactgtcgccatggctggcctggtggtgtggcgcagcaaacgcaccgacacgctgctgtgagggtcccggtgagatggagtgggtcacacctggcaagctggaagaaagttccctggggatgggagagcgggtgggtgctgccaatctccagctactgtggccacaccccacctggtcatgggcagacccctcccttcctgggctgacctgctccctcgaggccagcctgctccctggctgaggctcaggctatccgcccaagctctttgctcattctagggccagtggaggaaaatgtgataaggccagagcttgtgtgctgggcaagaaatcacctgctgcatcctgtgctccgcaggctgggccggagcctctgcccgcaggtttctatgctgtttcttagcacagaatccagcctagccttagccgcagtctaggccctgcttggactaggactccttgcttgacccctcccttcctgggctgacctgctccctcgaggccagcctgctccctggctgaggctcaggctggagtgggggtgtgttagagcccctcaccgggacttgctgtgcggatggggcctgggcctccttcctacaggggctcctctgtgggtgaggggccctctggaatggcatcccatgagcttgtggcctctatctgctaccatctgtgttttatctgagtaaagttaccttacttctggaa

SEQ ID NO: 431217 - DNA, 1542 bp, Homo sapiens
  misc_feature (3)..(3): n is a, c, g, or t
  misc_feature (18)..(18): n is a, c, g, or t
tangaaagctcgcctgcntttgggaatctccaggatcccccgcaaatttccttccactcgggaccgagcgtgacccagctgcggccggccagccatggagactggagcgctgcggcgcccgcaacttctcccgttgctgctgctgctctgcggcccttcccaggatcaatgccgacctgtactccagaatctgttgcagagcccaggcttgacatggagcttggaagtgcccactgggagagaaggaaaggaaggtggggatcggggaccagggctaagtggggccactccagccaggagccctcagggcaaggaggtgggtgtcccagagcaggcggctgcaacgagacaggcatgttggagaggctgcccctgtgtgggaaggctttcgcagacatgatgggcaaggtggacgtctggaagtggtgcaacctgtccgagttcatcgtgtactatgagagtttcaccaactgcaccgagatggaggccaatgtcgtgggctgctactggcccaaccccctggcccagggcttcatcaccggcatccacaggcagttcttctccaactgcaccgtggacagggtccacttggaggaccccccagacgaggttctcatcccgctgatcgttatacccgtcgttctgactgtcgccatggctggcctggtggtgtggcgcagcaaacgcaccgacacgctgctgtgagggtcccggtgagatggagtgggtcacacctggcaagctggaagaaagttccctggggatgggagagcgggtgggtgctgccaatctccagctactgtggccacaccccacctggtcatgggcagacccctcccttcctgggctgacctgctccctcgaggccagcctgctccctggctgaggctcaggctatccgcccaagctctttgctcattctagggccagtggaggaaaatgtgataaggccagagcttgtgtgctgggcaagaaatcacctgctgcatcctgtgctccgcaggctgggccggagcctctgcccgcaggtttctatgctgtttcttagcacagaatccagcctagccttagccgcagtctaggccctgcttggactaggactccttgcttgaccccatctctggttcctgccctggctcctgcaccagccccagctcctgcctacatccaggcagaaagataggcaggggctcttggaagacgttccgtgctgtgacctccgagccctcctggtgggaagacagctggaaaggctgggaggagaagggaggggctgggggttcccaggagccatgcgtggcctgcagagtccattccatcatgatgctgtgcccgctatgggctgtgtccatgaccagaggctggagtgggggtgtgttagagcccctcaccgggacttgctgtgcggatggggcctgggcctccttcctacaggggctcctctgtgggtgaggggccctctggaatggcatcccatgagcttgtggcctctatctgctaccatctgtgttttatctgagtaaagttaccttacttctggaa

SEQ ID NO: 431218 - DNA, 1140 bp, Homo sapiens
aagagaactgcttctctataggtgacccccgccccaaagtcccccctcccactaacttctctttgagaagagagtaaaaccgaattcgagagaaaagaggcagtaactattcgggaggaggcagactggagtgggcaccagtcccgcggagcctcagcgcccgccgcgtccctccctccgcccctttcgcccacacctacccgcccccgccggcccggctctcagtagcgtcgcccgaggctgcagcagcgcatcccggggcatggcgcggcgggggcgcggagggctcggttcggagggggccgggagcccgggcgccctggagtgaggaggaccgggagctggctctggaggctgcggaggcgacgccggagagaacgaagcctcggctgggagcggatctttcgaagatggtttggctgccttggagatttggagatctgatgccacgatgaggactcacacacggggggctcccagtgtgtttttcatatatttgctttgctttgtgtcagcctacatcaccgacgagaacccagaagttatgattcccttcaccaatgccaactacgacagccatcccatgctgtacttctccagggcagaagtggcggagctgcagctcagggctgccagctcgcacgagcacattgcagcccgcctcacggaggctgtgcacacgatgctgtccagccccttggaatacctccctccctgggatcccaaggactacagtgcccgctggaatgaaatttttggaaacaacttgggtgccttggcaatgttctgtgtgctgtatcctgagaacattgaagcccgagacatggccaaagactacatggagaggatggcagcgcagcctagttggtagatttttgtcttgttcttcttactgtggtaactctgcattagaaagaaacaaatccatatgacatctcagtggccagatcttcatgtacctctttgtgtatgtgtgtggggggaggtgttatttgttatttgtgttgccagtcttatgaatggcccttagtttcaaaagatgtagtaacttccatgtttaaagttagaaggaaaatatttagatgcagcctaatctaaagaaaaaataatttgctgaattgagtaaagagtatcatcgtg

SEQ ID NO: 431219 - DNA, 843 bp, Homo sapiens
aagcgcggacgacccaccttgagatgcatctagcgactgctcccagcatgtaggagcagttgtaaaatcacagccgtaacagtgcctgctctccagtgtctgaaaacaaatgtttttctggtcttcacttttttgaggcaggaagacactcaaaggtgagaatcagtcctaggaagattgtgagcaaccagtctacaatgcaaatactaagcaggctcaaaagcagatctataactacagctgcagctccatcaaggcaacaagtggacacatcctggcaaagtattttatatacaacgtttggtttgctccttccagaaactgtatgagaaaagtttgcatatcaaaatcctactgatgagaaagtggaactcaacaatgttaaatgacttgcctgcctaaggtcacacagttagtgacagagtctagatttcagcctagttttgttcaacttcaaagtccttgctcttatttgatggacacattaaattatccaccatggtatctagactgggacacagccacaatctgaaaattgaattctaatttaataaacgtgccctctgccaggaaatatgaggaatggctatagaaatgaagaagagtctctaccatgaaggagcttataatactaaatgttacactccttttggtctattaagtctaaggaaaagaataaacatctaatttcattcattcatgtaacaaatatcagtaatttttgtaatttcagagaacaatattataatttggaaggtgtttaggacaccttaggtagtttataataagaggtgatataaaatcatccatttcaaaagtcaattgtcaatgaatggagaatag

SEQ ID NO: 431220 - DNA, 4014 bp, Homo sapiens
aagcgcggacgacccaccttgagatgcatctagcgactgctcccagcatgtaggagcagttgtaaaatcacagccgtaacagtgcctgctctccagtgtctgaaaacaaatgtttttctggtcttcacttttttgaggcaggaaggatctttcgaagatggtttggctgccttggagatttggagatctgatgccacgatgaggactcacacacggggggctcccagtgtgtttttcatatatttgctttgctttgtgtcagcctacatcaccgacgagaacccagaagttatgattcccttcaccaatgccaactacgacagccatcccatgctgtacttctccagggcagaagtggcggagctgcagctcagggctgccagctcgcacgagcacattgcagcccgcctcacggaggctgtgcacacgatgctgtccagccccttggaatacctccctccctgggatcccaaggactacagtgcccgctggaatgaaatttttggaaacaacttgggtgccttggcaatgttctgtgtgctgtatcctgagaacattgaagcccgagacatggccaaagactacatggagaggatggcagcgcagcctagttggttggtgaaagatgctccttgggatgaggtcccgcttgctcactccctggttggttttgccactgcttatgacttcttgtacaactacctgagcaagacacaacaggagaagtttcttgaagtgattgccaatgcctcagggtatatgtatgaaacttcatacaggagaggatggggatttcaatacctgcacaatcatcagcccaccaactgtatggctttgctcacgggaagcctagtcctgatgaatcaaggatatcttcaagaagcctacttatggaccaaacaagttctgaccatcatggagaaatctctggtcttgctcagggaggtgacggatggctccctctatgaaggagttgcgtatggcagctacaccactagatcactcttccaatacatgtttctcgtccagaggcacttcaacatcaaccactttggccatccgtggcttaaacaacactttgcatttatgtatagaaccatcctgccagggtttcaaaggactgtggctattgcggactcaaattacaactggttttatggtccagaaagccaattagtgttccttgataaatttgtcatgcgtaatggcagtggtaactggctagctgaccaaatcagaaggaaccgtgtggtggaaggtccaggaacaccatccaaagggcagcgctggtgcactctgcacacagaatttctctggtatgatggcagcttgaaatcggttcctcctccagactttggcacccctacactgcattattttgaagactggggtgtcgtgacttatggaagtgcactacctgcagaaatcaatagatctttcctttccttcaagtctggaaaactggggggacgtgcaatatatgacattgtccacagaaacaaatacaaagattggatcaaaggatggagaaattttaatgcagggcatgaacatcctgatcaaaactcatttacttttgctcccaatggtgtgcctttcattactgaggctctgtacgggccaaagtacaccttcttcaacaatgttttgatgttttccccagctgtgtcaaagagctgcttttctccctgggtgggtcaggtcacagaagactgctcatcaaaatggtctaaatacaagcatgacctggcagctagttgtcaggggagggtggttgcagcagaggagaaaaatggggtggttttcatccgaggagaaggtgtgggagcttataacccccagctcaacctgaagaatgttcagaggaatctcatcctcctacatccacagctgcttctccttgtagaccaaatacacctgggagaggagagtcccttggagacagcagcgagcttcttccataatgtggatgttccttttgaggagactgtggtagatggtgtccatggggctttcatcaggcagagagatggtctctataaaatgtactggatggacgatactggctacagcgagaaagcaacctttgcctcagtgacatatcctcggggctatccctacaacgggacaaactatgtgaatgtcaccatgcacctccgaagtcccatcaccagggcagcttacctcttcatagggccatctatagatgttcagagcttcactgtccacggagactctcagcaactggatgtgttcatagccaccagcaaacatgcctacgccacatacctgtggacaggtgaggccacaggacagtctgcctttgcacaggtcattgctgatcgtcacaaaattctgtttgaccggaattcagccatcaagagcagcattgtccctgaggtgaaggactatgctgctattgtggaacagaacttgcagcattttaaaccagtgtttcagctgctggagaagcagatactgtcccgagtccggaacacagctagctttaggaagactgctgaacgcctgctgagattttcagataagagacagactgaggaggccattgacaggatttttgccatatcacagcaacagcagcagcaaagcaagtcaaagaaaaaccgaagggcaggcaaacgctataaatttgtggatgctgtccctgatatttttgcacagattgaagtcaatgagaaaaagattagacagaaagctcagattttggcacagaaagaactacccatagatgaagatgaagaaatgaaagaccttttagattttgcagatgtaacatacgagaaacataaaaatgggggcttgattaaaggccggtttggacaggcacggatggtgacaactacacacagcagggccccatcactgtctgcttcctataccaggttgttcctgattctgaacattgctattttctttgtcatgttggcaatgcaactgacttatttccagagggcccagagcctacatggccaaagatgtctttatgcagttcttctcatagatagctgtattttattatggttgtactcttcttgttcccaatcacagtgttagcactgaagctataaattacctggtcattttgtgatcacaagagtctatgcaaaaaaaaaaatttctttaccccagattatcagatttttttccctcagattcattttaacaaattaagggaagatattttgacacaagaaagcaggaacgtggagaaattggagcaggaaaagaaattatcaaagcaatagaaatagcttggtggtcctatggtgtttttggaagtatttggcattgctaattgagcagtccatatagtactacttttagaagaaacaaaaagtctattttttaaagtaatgttttttcttatgagaaaaaggtttagatagaattgggttttattaatattaatttaatgctattagcaatttccatatactatattgtggaaaagactgaagaatacaattctgagaaatataaaaaaattttaatggtatactcatgttgaaagataaatgttgctaagtcctggtatgatggtgtgagcttccttggggaagtacttcttgagttatgtaactaacaggatgttttactacagatctggatggctattcagataacatggcaaaaaatgatagcagaagatcattaaaaacttaaaatatattttattagaaaacatttatctatgaatgaatatttccttgatgctggtctctgcacacatatgcttggttacttgcatgcattcattggttgttcaataagtgagatgattacagataacttaatactgtattttccttatatggaaaaccgttatagacccaataacaactaaacctttcaaaagaaaatattttctattatgaatgttgattttcataccaaagaagatggagagtctaaaatttggatatgattcttatgtttttttaatagaaaaccttcttcaagtttattttcctaaataaacatcataattgtgaa

SEQ ID NO: 431221 - DNA, 3535 bp, Homo sapiens
gtcagttgtgtgtcattaagcccttggattatatcttcaagtgtgccctttagttctgagaaatagacactttagaagtgtggtgaaagctgtgagtctgatgaactcatttccatgatttattttcctttacaggttggtgaaagatgctccttgggatgaggtcccgcttgctcactccctggttggttttgccactgcttatgacttcttgtacaactacctgagcaagacacaacaggagaagtttcttgaagtgattgccaatgcctcagggtatatgtatgaaacttcatacaggagaggatggggatttcaatacctgcacaatcatcagcccaccaactgtatggctttgctcacgggaagcctagtcctgatgaatcaaggatatcttcaagaagcctacttatggaccaaacaagttctgaccatcatggagaaatctctggtcttgctcagggaggtgacggatggctccctctatgaaggagttgcgtatggcagctacaccactagatcactcttccaatacatgtttctcgtccagaggcacttcaacatcaaccactttggccatccgtggcttaaacaacactttgcatttatgtatagaaccatcctgccagggtttcaaaggactgtggctattgcggactcaaattacaactggttttatggtccagaaagccaattagtgttccttgataaatttgtcatgcgtaatggcagtggtaactggctagctgaccaaatcagaaggaaccgtgtggtggaaggtccaggaacaccatccaaagggcagcgctggtgcactctgcacacagaatttctctggtatgatggcagcttgaaatcggttcctcctccagactttggcacccctacactgcattattttgaagactggggtgtcgtgacttatggaagtgcactacctgcagaaatcaatagatctttcctttccttcaagtctggaaaactggggggacgtgcaatatatgacattgtccacagaaacaaatacaaagattggatcaaaggatggagaaattttaatgcagggcatgaacatcctgatcaaaactcatttacttttgctcccaatggtgtgcctttcattactgaggctctgtacgggccaaagtacaccttcttcaacaatgttttgatgttttccccagctgtgtcaaagagctgcttttctccctgggtgggtcaggtcacagaagactgctcatcaaaatggtctaaatacaagcatgacctggcagctagttgtcaggggagggtggttgcagcagaggagaaaaatggggtggttttcatccgaggagaaggtgtgggagcttataacccccagctcaacctgaagaatgttcagaggaatctcatcctcctacatccacagctgcttctccttgtagaccaaatacacctgggagaggagagtcccttggagacagcagcgagcttcttccataatgtggatgttccttttgaggagactgtggtagatggtgtccatggggctttcatcaggcagagagatggtctctataaaatgtactggatggacgatactggctacagcgagaaagcaacctttgcctcagtgacatatcctcggggctatccctacaacgggacaaactatgtgaatgtcaccatgcacctccgaagtcccatcaccagggcagcttacctcttcatagggccatctatagatgttcagagcttcactgtccacggagactctcagcaactggatgtgttcatagccaccagcaaacatgcctacgccacatacctgtggacaggtgaggccacaggacagtctgcctttgcacaggtcattgctgatcgtcacaaaattctgtttgaccggaattcagccatcaagagcagcattgtccctgaggtgaaggactatgctgctattgtggaacagaacttgcagcattttaaaccagtgtttcagctgctggagaagcagatactgtcccgagtccggaacacagctagctttaggaagactgctgaacgcctgctgagattttcagataagagacagactgaggaggccattgacaggatttttgccatatcacagcaacagcagcagcaaagcaagtcaaagaaaaaccgaagggcaggcaaacgctataaatttgtggatgctgtccctgatatttttgcacagattgaagtcaatgagaaaaagattagacagaaagctcagattttggcacagaaagaactacccatagatgaagatgaagaaatgaaagaccttttagattttgcagatgtaacatacgagaaacataaaaatgggggcttgattaaaggccggtttggacaggcacggatggtgacaactacacacagcagggccccatcactgtctgcttcctataccaggttgttcctgattctgaacattgctattttctttgtcatgttggcaatgcaactgacttatttccagagggcccagagcctacatggccaaagatgtctttatgcagttcttctcatagatagctgtattttattatggttgtactcttcttgttcccaatcacagtgttagcactgaagctataaattacctggtcattttgtgatcacaagagtctatgcaaaaaaaaaaatttctttaccccagattatcagatttttttccctcagattcattttaacaaattaagggaagatattttgacacaagaaagcaggaacgtggagaaattggagcaggaaaagaaattatcaaagcaatagaaatagcttggtggtcctatggtgtttttggaagtatttggcattgctaattgagcagtccatatagtactacttttagaagaaacaaaaagtctattttttaaagtaatgttttttcttatgagaaaaaggtttagatagaattgggttttattaatattaatttaatgctattagcaatttccatatactatattgtggaaaagactgaagaatacaattctgagaaatataaaaaaattttaatggtatactcatgttgaaagataaatgttgctaagtcctggtatgatggtgtgagcttccttggggaagtacttcttgagttatgtaactaacaggatgttttactacagatctggatggctattcagataacatggcaaaaaatgatagcagaagatcattaaaaacttaaaatatattttattagaaaacatttatctatgaatgaatatttccttgatgctggtctctgcacacatatgcttggttacttgcatgcattcattggttgttcaataagtgagatgattacagataacttaatactgtattttccttatatggaaaaccgttatagacccaataacaactaaacctttcaaaagaaaatattttctattatgaatgttgattttcataccaaagaagatggagagtctaaaatttggatatgattcttatgtttttttaatagaaaaccttcttcaagtttattttcctaaataaacatcataattgtgaa

SEQ ID NO: 431222 - DNA, 3014 bp, Homo sapiens
cttaaatccatgaggcccagtagtttgaatggtcactctgacatcatcaagtgaagatagtccatgtagagattagagcagaaatcatttcgggcccaaacccaaggatcacaaatgataaagaaatattcctcttccagtcaccaagggtttccctttgtgcatactggttgtccttggatatttttagaattgtccctaatatactctgcactgccagtgctctgggtagcatttgtgtgtcgcatcttccacattaccatgttatgtgttattttcactgccatcagaaaaccatttaatttttcaaaattaagtatgatggcagcttgaaatcggttcctcctccagactttggcacccctacactgcattattttgaagactggggtgtcgtgacttatggaagtgcactacctgcagaaatcaatagatctttcctttccttcaagtctggaaaactggggggacgtgcaatatatgacattgtccacagaaacaaatacaaagattggatcaaaggatggagaaattttaatgcagggcatgaacatcctgatcaaaactcatttacttttgctcccaatggtgtgcctttcattactgaggctctgtacgggccaaagtacaccttcttcaacaatgttttgatgttttccccagctgtgtcaaagagctgcttttctccctgggtgggtcaggtcacagaagactgctcatcaaaatggtctaaatacaagcatgacctggcagctagttgtcaggggagggtggttgcagcagaggagaaaaatggggtggttttcatccgaggagaaggtgtgggagcttataacccccagctcaacctgaagaatgttcagaggaatctcatcctcctacatccacagctgcttctccttgtagaccaaatacacctgggagaggagagtcccttggagacagcagcgagcttcttccataatgtggatgttccttttgaggagactgtggtagatggtgtccatggggctttcatcaggcagagagatggtctctataaaatgtactggatggacgatactggctacagcgagaaagcaacctttgcctcagtgacatatcctcggggctatccctacaacgggacaaactatgtgaatgtcaccatgcacctccgaagtcccatcaccagggcagcttacctcttcatagggccatctatagatgttcagagcttcactgtccacggagactctcagcaactggatgtgttcatagccaccagcaaacatgcctacgccacatacctgtggacaggtgaggccacaggacagtctgcctttgcacaggtcattgctgatcgtcacaaaattctgtttgaccggaattcagccatcaagagcagcattgtccctgaggtgaaggactatgctgctattgtggaacagaacttgcagcattttaaaccagtgtttcagctgctggagaagcagatactgtcccgagtccggaacacagctagctttaggaagactgctgaacgcctgctgagattttcagataagagacagactgaggaggccattgacaggatttttgccatatcacagcaacagcagcagcaaagcaagtcaaagaaaaaccgaagggcaggcaaacgctataaatttgtggatgctgtccctgatatttttgcacagattgaagtcaatgagaaaaagattagacagaaagctcagattttggcacagaaagaactacccatagatgaagatgaagaaatgaaagaccttttagattttgcagatgtaacatacgagaaacataaaaatgggggcttgattaaaggccggtttggacaggcacggatggtgacaactacacacagcagggccccatcactgtctgcttcctataccaggttgttcctgattctgaacattgctattttctttgtcatgttggcaatgcaactgacttatttccagagggcccagagcctacatggccaaagatgtctttatgcagttcttctcatagatagctgtattttattatggttgtactcttcttgttcccaatcacagtgttagcactgaagctataaattacctggtcattttgtgatcacaagagtctatgcaaaaaaaaaaatttctttaccccagattatcagatttttttccctcagattcattttaacaaattaagggaagatattttgacacaagaaagcaggaacgtggagaaattggagcaggaaaagaaattatcaaagcaatagaaatagcttggtggtcctatggtgtttttggaagtatttggcattgctaattgagcagtccatatagtactacttttagaagaaacaaaaagtctattttttaaagtaatgttttttcttatgagaaaaaggtttagatagaattgggttttattaatattaatttaatgctattagcaatttccatatactatattgtggaaaagactgaagaatacaattctgagaaatataaaaaaattttaatggtatactcatgttgaaagataaatgttgctaagtcctggtatgatggtgtgagcttccttggggaagtacttcttgagttatgtaactaacaggatgttttactacagatctggatggctattcagataacatggcaaaaaatgatagcagaagatcattaaaaacttaaaatatattttattagaaaacatttatctatgaatgaatatttccttgatgctggtctctgcacacatatgcttggttacttgcatgcattcattggttgttcaataagtgagatgattacagataacttaatactgtattttccttatatggaaaaccgttatagacccaataacaactaaacctttcaaaagaaaatattttctattatgaatgttgattttcataccaaagaagatggagagtctaaaatttggatatgattcttatgtttttttaatagaaaaccttcttcaagtttattttcctaaataaacatcataattgtgaa

SEQ ID NO: 431223 - DNA, 2977 bp, Homo sapiens
cttaaatccatgaggcccagtagtttgaatggtcactctgacatcatcaagtgaagatagtccatgtagagattagagcagaaatcatttcgggcccaaacccaaggatcacaaatgataaagaaatattcctcttccagtcaccaagggtttccctttgtgcatactggttgtccttggatatttttagaattgtccctaatatactctgcactgccagtgctctgggtagcatttgtgtgtcgcatcttccacattaccatgttatgtgttattttcactgccatcagaaaaccatttaatttttcaaaattaatttggcacccctacactgcattattttgaagactggggtgtcgtgacttatggaagtgcactacctgcagaaatcaatagatctttcctttccttcaagtctggaaaactggggggacgtgcaatatatgacattgtccacagaaacaaatacaaagattggatcaaaggatggagaaattttaatgcagggcatgaacatcctgatcaaaactcatttacttttgctcccaatggtgtgcctttcattactgaggctctgtacgggccaaagtacaccttcttcaacaatgttttgatgttttccccagctgtgtcaaagagctgcttttctccctgggtgggtcaggtcacagaagactgctcatcaaaatggtctaaatacaagcatgacctggcagctagttgtcaggggagggtggttgcagcagaggagaaaaatggggtggttttcatccgaggagaaggtgtgggagcttataacccccagctcaacctgaagaatgttcagaggaatctcatcctcctacatccacagctgcttctccttgtagaccaaatacacctgggagaggagagtcccttggagacagcagcgagcttcttccataatgtggatgttccttttgaggagactgtggtagatggtgtccatggggctttcatcaggcagagagatggtctctataaaatgtactggatggacgatactggctacagcgagaaagcaacctttgcctcagtgacatatcctcggggctatccctacaacgggacaaactatgtgaatgtcaccatgcacctccgaagtcccatcaccagggcagcttacctcttcatagggccatctatagatgttcagagcttcactgtccacggagactctcagcaactggatgtgttcatagccaccagcaaacatgcctacgccacatacctgtggacaggtgaggccacaggacagtctgcctttgcacaggtcattgctgatcgtcacaaaattctgtttgaccggaattcagccatcaagagcagcattgtccctgaggtgaaggactatgctgctattgtggaacagaacttgcagcattttaaaccagtgtttcagctgctggagaagcagatactgtcccgagtccggaacacagctagctttaggaagactgctgaacgcctgctgagattttcagataagagacagactgaggaggccattgacaggatttttgccatatcacagcaacagcagcagcaaagcaagtcaaagaaaaaccgaagggcaggcaaacgctataaatttgtggatgctgtccctgatatttttgcacagattgaagtcaatgagaaaaagattagacagaaagctcagattttggcacagaaagaactacccatagatgaagatgaagaaatgaaagaccttttagattttgcagatgtaacatacgagaaacataaaaatgggggcttgattaaaggccggtttggacaggcacggatggtgacaactacacacagcagggccccatcactgtctgcttcctataccaggttgttcctgattctgaacattgctattttctttgtcatgttggcaatgcaactgacttatttccagagggcccagagcctacatggccaaagatgtctttatgcagttcttctcatagatagctgtattttattatggttgtactcttcttgttcccaatcacagtgttagcactgaagctataaattacctggtcattttgtgatcacaagagtctatgcaaaaaaaaaaatttctttaccccagattatcagatttttttccctcagattcattttaacaaattaagggaagatattttgacacaagaaagcaggaacgtggagaaattggagcaggaaaagaaattatcaaagcaatagaaatagcttggtggtcctatggtgtttttggaagtatttggcattgctaattgagcagtccatatagtactacttttagaagaaacaaaaagtctattttttaaagtaatgttttttcttatgagaaaaaggtttagatagaattgggttttattaatattaatttaatgctattagcaatttccatatactatattgtggaaaagactgaagaatacaattctgagaaatataaaaaaattttaatggtatactcatgttgaaagataaatgttgctaagtcctggtatgatggtgtgagcttccttggggaagtacttcttgagttatgtaactaacaggatgttttactacagatctggatggctattcagataacatggcaaaaaatgatagcagaagatcattaaaaacttaaaatatattttattagaaaacatttatctatgaatgaatatttccttgatgctggtctctgcacacatatgcttggttacttgcatgcattcattggttgttcaataagtgagatgattacagataacttaatactgtattttccttatatggaaaaccgttatagacccaataacaactaaacctttcaaaagaaaatattttctattatgaatgttgattttcataccaaagaagatggagagtctaaaatttggatatgattcttatgtttttttaatagaaaaccttcttcaagtttattttcctaaataaacatcataattgtgaa

SEQ ID NO: 431224 - DNA, 4392 bp, Homo sapiens
aagagaactgcttctctataggtgacccccgccccaaagtcccccctcccactaacttctctttgagaagagagtaaaaccgaattcgagagaaaagaggcagtaactattcgggaggaggcagactggagtgggcaccagtcccgcggagcctcagcgcccgccgcgtccctccctccgcccctttcgcccacacctacccgcccccgccggcccggctctcagtagcgtcgcccgaggctgcagcagcgcatcccggggcatggcgcggcgggggcgcggagggctcggttcggagggggccgggagcccgggcgccctggagtgaggaggaccgggagctggctctggaggctgcggaggcgacgccggagagaacgaagcctcggctgggagcggatctttcgaagatggtttggctgccttggagatttggagatctgatgccacgatgaggactcacacacggggggctcccagtgtgtttttcatatatttgctttgctttgtgtcagcctacatcaccgacgagaacccagaagttatgattcccttcaccaatgccaactacgacagccatcccatgctgtacttctccagggcagaagtggcggagctgcagctcagggctgccagctcgcacgagcacattgcagcccgcctcacggaggctgtgcacacgatgctgtccagccccttggaatacctccctccctgggatcccaaggactacagtgcccgctggaatgaaatttttggaaacaacttgggtgccttggcaatgttctgtgtgctgtatcctgagaacattgaagcccgagacatggccaaagactacatggagaggatggcagcgcagcctagttggttggtgaaagatgctccttgggatgaggtcccgcttgctcactccctggttggttttgccactgcttatgacttcttgtacaactacctgagcaagacacaacaggagaagtttcttgaagtgattgccaatgcctcagggtatatgtatgaaacttcatacaggagaggatggggatttcaatacctgcacaatcatcagcccaccaactgtatggctttgctcacgggaagcctagtcctgatgaatcaaggatatcttcaagaagcctacttatggaccaaacaagttctgaccatcatggagaaatctctggtcttgctcagggaggtgacggatggctccctctatgaaggagttgcgtatggcagctacaccactagatcactcttccaatacatgtttctcgtccagaggcacttcaacatcaaccactttggccatccgtggcttaaacaacactttgcatttatgtatagaaccatcctgccagggtttcaaaggactgtggctattgcggactcaaattacaactggttttatggtccagaaagccaattagtgttccttgataaatttgtcatgcgtaatggcagtggtaactggctagctgaccaaatcagaaggaaccgtgtggtggaaggtccaggaacaccatccaaagggcagcgctggtgcactctgcacacagaatttctctggtatgatggcagcttgaaatcggttcctcctccagactttggcacccctacactgcattattttgaagactggggtgtcgtgacttatggaagtgcactacctgcagaaatcaatagatctttcctttccttcaagtctggaaaactggggggacgtgcaatatatgacattgtccacagaaacaaatacaaagattggatcaaaggatggagaaattttaatgcagggcatgaacatcctgatcaaaactcatttacttttgctcccaatggtgtgcctttcattactgaggctctgtacgggccaaagtacaccttcttcaacaatgttttgatgttttccccagctgtgtcaaagagctgcttttctccctgggtgggtcaggtcacagaagactgctcatcaaaatggtctaaatacaagcatgacctggcagctagttgtcaggggagggtggttgcagcagaggagaaaaatggggtggttttcatccgaggagaaggtgtgggagcttataacccccagctcaacctgaagaatgttcagaggaatctcatcctcctacatccacagctgcttctccttgtagaccaaatacacctgggagaggagagtcccttggagacagcagcgagcttcttccataatgtggatgttccttttgaggagactgtggtagatggtgtccatggggctttcatcaggcagagagatggtctctataaaatgtactggatggacgatactggctacagcgagaaagcaacctttgcctcagtgacatatcctcggggctatccctacaacgggacaaactatgtgaatgtcaccatgcacctccgaagtcccatcaccagggcagcttacctcttcatagggccatctatagatgttcagagcttcactgtccacggagactctcagcaactggatgtgttcatagccaccagcaaacatgcctacgccacatacctgtggacaggtgaggccacaggacagtctgcctttgcacaggtcattgctgatcgtcacaaaattctgtttgaccggaattcagccatcaagagcagcattgtccctgaggtgaaggactatgctgctattgtggaacagaacttgcagcattttaaaccagtgtttcagctgctggagaagcagatactgtcccgagtccggaacacagctagctttaggaagactgctgaacgcctgctgagattttcagataagagacagactgaggaggccattgacaggatttttgccatatcacagcaacagcagcagcaaagcaagtcaaagaaaaaccgaagggcaggcaaacgctataaatttgtggatgctgtccctgatatttttgcacagattgaagtcaatgagaaaaagattagacagaaagctcagattttggcacagaaagaactacccatagatgaagatgaagaaatgaaagaccttttagattttgcagatgtaacatacgagaaacataaaaatgggggcttgattaaaggccggtttggacaggcacggatggtgacaactacacacagcagggccccatcactgtctgcttcctataccaggttgttcctgattctgaacattgctattttctttgtcatgttggcaatgcaactgacttatttccagagggcccagagcctacatggccaaagatgtctttatgcagttcttctcatagatagctgtattttattatggttgtactcttcttgttcccaatcacagtgttagcactgaagctataaattacctggtcattttgtgatcacaagagtctatgcaaaaaaaaaaatttctttaccccagattatcagatttttttccctcagattcattttaacaaattaagggaagatattttgacacaagaaagcaggaacgtggagaaattggagcaggaaaagaaattatcaaagcaatagaaatagcttggtggtcctatggtgtttttggaagtatttggcattgctaattgagcagtccatatagtactacttttagaagaaacaaaaagtctattttttaaagtaatgttttttcttatgagaaaaaggtttagatagaattgggttttattaatattaatttaatgctattagcaatttccatatactatattgtggaaaagactgaagaatacaattctgagaaatataaaaaaattttaatggtatactcatgttgaaagataaatgttgctaagtcctggtatgatggtgtgagcttccttggggaagtacttcttgagttatgtaactaacaggatgttttactacagatctggatggctattcagataacatggcaaaaaatgatagcagaagatcattaaaaacttaaaatatattttattagaaaacatttatctatgaatgaatatttccttgatgctggtctctgcacacatatgcttggttacttgcatgcattcattggttgttcaataagtgagatgattacagataacttaatactgtattttccttatatggaaaaccgttatagacccaataacaactaaacctttcaaaagaaaatattttctattatgaatgttgattttcataccaaagaagatggagagtctaaaatttggatatgattcttatgtttttttaatagaaaaccttcttcaagtttattttcctaaataaacatcataattgtgaattttctctagtattcttcttctttgttccattatattcaaaatgcattaacattttccaaaatttttgaagagagatctttatttggacgtgtattcattaaatatataaagtagtgtttgaatc

SEQ ID NO: 431225 - DNA, 425 bp, Homo sapiens
cacttcaacatcaaccactttggccatccgtggcttaaacaacactttgcatttatgtatagaaccatcctgccaggtatagtgaggagtcagaagtgtgaaaacattaaactattgtaattttttctgattatgaaaatgagctagactaggcagagaaattaggtccttagagtttgtcatattgaaattaaatagatttttttaatcaaagaaaaattgaattcaagagttgcatatagccagaacattttggaggctaatgtgagtatttatgatttaggtattataaagtttggagggttatggattaaatacaatttctaggcccctcaatactttttttttatatatccaaacttgagtaatatacgaactcatcttcatcattgcaagcaaaatataaacatttgtgattacctgtc

SEQ ID NO: 431226 - DNA, 4267 bp, Homo sapiens
aagagaactgcttctctataggtgacccccgccccaaagtcccccctcccactaacttctctttgagaagagagtaaaaccgaattcgagagaaaagaggcagtaactattcgggaggaggcagactggagtgggcaccagtcccgcggagcctcagcgcccgccgcgtccctccctccgcccctttcgcccacacctacccgcccccgccggcccggctctcagtagcgtcgcccgaggctgcagcagcgcatcccggggcatggcgcggcgggggcgcggagggctcggttcggagggggccgggagcccgggcgccctggagtgaggaggaccgggagctggctctggaggctgcggaggcgacgccggagagaacgaagcctcggctgggagcggatctttcgaagatggtttggctgccttggagatttggagatctgatgccacgatgaggactcacacacggggggctcccagtgtgtttttcatatatttgctttgctttgtgtcagcctacatcaccgacgagaacccagaagttatgattcccttcaccaatgccaactacgacagccatcccatgctgtacttctccagggcagaagtggcggagctgcagctcagggctgccagctcgcacgagcacattgcagcccgcctcacggaggctgtgcacacgatgctgtccagccccttggaatacctccctccctgggatcccaaggactacagtgcccgctggaatgaaatttttggaaacaacttgggtgccttggcaatgttctgtgtgctgtatcctgagaacattgaagcccgagacatggccaaagactacatggagaggatggcagcgcagcctagttggttggtgaaagatgctccttgggatgaggtcccgcttgctcactccctggttggttttgccactgcttatgacttcttgtacaactacctgagcaagacacaacaggagaagtttcttgaagtgattgccaatgcctcagggtatatgtatgaaacttcatacaggagaggatggggatttcaatacctgcacaatcatcagcccaccaactgtatggctttgctcacgggaagcctagtcctgatgaatcaaggatatcttcaagaagcctacttatggaccaaacaagttctgaccatcatggagaaatctctggtcttgctcagggaggtgacggatggctccctctatgaaggagttgcgtatggcagctacaccactagatcactcttccaatacatgtttctcgtccagaggcacttcaacatcaaccactttggccatccgtggcttaaacaacactttgcatttatgtatagaaccatcctgccagggtttcaaaggactgtggctattgcggactcaaattacaactggttttatggtccagaaagccaattagtgttccttgataaatttgtcatgcgtaatggcagtggtaactggctagctgaccaaatcagaaggaaccgtgtggtggaaggtccaggaacaccatccaaagggcagcgctggtgcactctgcacacagaatttctctggtatgatggcagcttgaaatcggttcctcctccagactttggcacccctacactgcattattttgaagactggggtgtcgtgacttatggaagtgcactacctgcagaaatcaatagatctttcctttccttcaagtctggaaaactggggggacgtgcaatatatgacattgtccacagaaacaaatacaaagattggatcaaaggatggagaaattttaatgcagggcatgaacatcctgatcaaaactcatttacttttgctcccaatggtgtgcctttcattactgaggctctgtacgggccaaagtacaccttcttcaacaatgttttgatgttttccccagctgtgtcaaagagctgcttttctccctgggtgggtcaggtcacagaagactgctcatcaaaatggtctaaatacaagcatgacctggcagctagttgtcaggggagggtggttgcagcagaggagaaaaatggggtggttttcatccgaggagaaggtgtgggagcttataacccccagctcaacctgaagaatgttcagaggaatctcatcctcctacatccacagctgcttctccttgtagaccaaatacacctgggagaggagagtcccttggagacagcagcgagcttcttccataatgtggatgttccttttgaggagactgtggtagatggtgtccatggggctttcatcaggcagagagatggtctctataaaatgtactggatggacgatactggctacagcgagaaagcaacctttgcctcagtgacatatcctcggggctatccctacaacgggacaaactatgtgaatgtcaccatgcacctccgaagtcccatcaccagggcagcttacctcttcatagggccatctatagatgttcagagcttcactgtccacggagactctcagcaactggatgtgttcatagccaccagcaaacatgcctacgccacatacctgtggacaggtgaggccacaggacagtctgcctttgcacaggtcattgctgatcgtcacaaaattctgtttgaccggaattcagccatcaagagcagcattgtccctgaggtgaaggactatgctgctattgtggaacagaacttgcagcattttaaaccagtgtttcagctgctggagaagcagatactgtcccgagtccggaacacagctagctttaggaagactgctgaacgcctgctgagattttcagataagagacagactgaggaggccattgacaggatttttgccatatcacagcaacagcagcagcaaagcaagtcaaagaaaaaccgaagggcaggcaaacgctataaatttgtggatgctgtccctgatatttttgcacagattgaagtcaatgagaaaaagattagacagaaagctcagattttggcacagaaagaactacccatagatgaagatgaagaaatgaaagaccttttagattttgcagatgtaacatacgagaaacataaaaatgggggcttgattaaaggccggtttggacaggcacggatggtgacaactacacacagcagggccccatcactgtctgcttcctataccaggttgttcctgattctgaacattgctattttctttgtcatgttggcaatgcaactgacttatttccagagggcccagagcctacatggccaaagatgtctttatgcagttcttctcatagatagctgtattttattatggttgtactcttcttgttcccaatcacagtgttagcactgaagctataaattacctggtcattttgtgatcacaagagtctatgcaaaaaaaaaaatttctttaccccagattatcagatttttttccctcagattcattttaacaaattaagggaagatattttgacacaagaaagcaggaacgtggagaaattggagcaggaaaagaaattatcaaagcaatagaaatagcttggtggtcctatggtgtttttggaagtatttggcattgctaattgagcagtccatatagtactacttttagaagaaacaaaaagtctattttttaaagtaatgttttttcttatgagaaaaaggtttagatagaattgggttttattaatattaatttaatgctattagcaatttccatatactatattgtggaaaagactgaagaatacaattctgagaaatataaaaaaattttaatggtatactcatgttgaaagataaatgttgctaagtcctggtatgatggtgtgagcttccttggggaagtacttcttgagttatgtaactaacaggatgttttactacagatctggatggctattcagataacatggcaaaaaatgatagcagaagatcattaaaaacttaaaatatattttattagaaaacatttatctatgaatgaatatttccttgatgctggtctctgcacacatatgcttggttacttgcatgcattcattggttgttcaataagtgagatgattacagataacttaatactgtattttccttatatggaaaaccgttatagacccaataacaactaaacctttcaaaagaaaatattttctattatgaatgttgattttcataccaaagaagatggagagtctaaaatttggatatgattcttatgtttttttaatagaaaaccttcttcaagtttattttcctaaataaacatcataattgtgaa

SEQ ID NO: 431227 - DNA, 3015 bp, Homo sapiens
tgatctagaggatcccgtgtcgcaggcagatcctctgtacactctctctgcatcacactggagccaggatgtggcgagacacggcgatactccaaatccaacaacctgcagtcacctccaggacatgaggctctaacttttatctgagcgcttgtctgtgagggctgatccagccagcccttggcaaagaatggtgtaactttcctccccctcctgcgaacctatgtcataggttcgcaggggaaccgtgtggtggaaggtccaggaacaccatccaaagggcagcgctggtgcactctgcacacagaatttctctggtatgatggcagcttgaaatcggttcctcctccagactttggcacccctacactgcattattttgaagactggggtgtcgtgacttatggaagtgcactacctgcagaaatcaatagatctttcctttccttcaagtctggaaaactggggggacgtgcaatatatgacattgtccacagaaacaaatacaaagattggatcaaaggatggagaaattttaatgcagggcatgaacatcctgatcaaaactcatttacttttgctcccaatggtgtgcctttcattactgaggctctgtacgggccaaagtacaccttcttcaacaatgttttgatgttttccccagctgtgtcaaagagctgcttttctccctgggtgggtcaggtcacagaagactgctcatcaaaatggtctaaatacaagcatgacctggcagctagttgtcaggggagggtggttgcagcagaggagaaaaatggggtggttttcatccgaggagaaggtgtgggagcttataacccccagctcaacctgaagaatgttcagaggaatctcatcctcctacatccacagctgcttctccttgtagaccaaatacacctgggagaggagagtcccttggagacagcagcgagcttcttccataatgtggatgttccttttgaggagactgtggtagatggtgtccatggggctttcatcaggcagagagatggtctctataaaatgtactggatggacgatactggctacagcgagaaagcaacctttgcctcagtgacatatcctcggggctatccctacaacgggacaaactatgtgaatgtcaccatgcacctccgaagtcccatcaccagggcagcttacctcttcatagggccatctatagatgttcagagcttcactgtccacggagactctcagcaactggatgtgttcatagccaccagcaaacatgcctacgccacatacctgtggacaggtgaggccacaggacagtctgcctttgcacaggtcattgctgatcgtcacaaaattctgtttgaccggaattcagccatcaagagcagcattgtccctgaggtgaaggactatgctgctattgtggaacagaacttgcagcattttaaaccagtgtttcagctgctggagaagcagatactgtcccgagtccggaacacagctagctttaggaagactgctgaacgcctgctgagattttcagataagagacagactgaggaggccattgacaggatttttgccatatcacagcaacagcagcagcaaagcaagtcaaagaaaaaccgaagggcaggcaaacgctataaatttgtggatgctgtccctgatatttttgcacagattgaagtcaatgagaaaaagattagacagaaagctcagattttggcacagaaagaactacccatagatgaagatgaagaaatgaaagaccttttagattttgcagatgtaacatacgagaaacataaaaatgggggcttgattaaaggccggtttggacaggcacggatggtgacaactacacacagcagggccccatcactgtctgcttcctataccaggttgttcctgattctgaacattgctattttctttgtcatgttggcaatgcaactgacttatttccagagggcccagagcctacatggccaaagatgtctttatgcagttcttctcatagatagctgtattttattatggttgtactcttcttgttcccaatcacagtgttagcactgaagctataaattacctggtcattttgtgatcacaagagtctatgcaaaaaaaaaaatttctttaccccagattatcagatttttttccctcagattcattttaacaaattaagggaagatattttgacacaagaaagcaggaacgtggagaaattggagcaggaaaagaaattatcaaagcaatagaaatagcttggtggtcctatggtgtttttggaagtatttggcattgctaattgagcagtccatatagtactacttttagaagaaacaaaaagtctattttttaaagtaatgttttttcttatgagaaaaaggtttagatagaattgggttttattaatattaatttaatgctattagcaatttccatatactatattgtggaaaagactgaagaatacaattctgagaaatataaaaaaattttaatggtatactcatgttgaaagataaatgttgctaagtcctggtatgatggtgtgagcttccttggggaagtacttcttgagttatgtaactaacaggatgttttactacagatctggatggctattcagataacatggcaaaaaatgatagcagaagatcattaaaaacttaaaatatattttattagaaaacatttatctatgaatgaatatttccttgatgctggtctctgcacacatatgcttggttacttgcatgcattcattggttgttcaataagtgagatgattacagataacttaatactgtattttccttatatggaaaaccgttatagacccaataacaactaaacctttcaaaagaaaatattttctattatgaatgttgattttcataccaaagaagatggagagtctaaaatttggatatgattcttatgtttttttaatagaaaaccttcttcaagtttattttcctaaataaacatcataattgtgaa

SEQ ID NO: 431228 - DNA, 2807 bp, Homo sapiens
ctgggtatgtcaacatgactcaaaaggcaaccgtgttggtgtagatggttccatggaacactactacccaaagcggcatcgctcgtatacgctgcacacggcaatttctcagggattatagccgattgaaaaccgtccctcatccacacgtaggcactcctacatctgcattatccgtcgactgcgatgtctgactggaaaaccttgcgactgcagaaatcaatagatctttcctttccttcaagtctggaaaactggggggacgtgcaatatatgacattgtccacagaaacaaatacaaagattggatcaaaggatggagaaattttaatgcagggcatgaacatcctgatcaaaactcatttacttttgctcccaatggtgtgcctttcattactgaggctctgtacgggccaaagtacaccttcttcaacaatgttttgatgttttccccagctgtgtcaaagagctgcttttctccctgggtgggtcaggtcacagaagactgctcatcaaaatggtctaaatacaagcatgacctggcagctagttgtcaggggagggtggttgcagcagaggagaaaaatggggtggttttcatccgaggagaaggtgtgggagcttataacccccagctcaacctgaagaatgttcagaggaatctcatcctcctacatccacagctgcttctccttgtagaccaaatacacctgggagaggagagtcccttggagacagcagcgagcttcttccataatgtggatgttccttttgaggagactgtggtagatggtgtccatggggctttcatcaggcagagagatggtctctataaaatgtactggatggacgatactggctacagcgagaaagcaacctttgcctcagtgacatatcctcggggctatccctacaacgggacaaactatgtgaatgtcaccatgcacctccgaagtcccatcaccagggcagcttacctcttcatagggccatctatagatgttcagagcttcactgtccacggagactctcagcaactggatgtgttcatagccaccagcaaacatgcctacgccacatacctgtggacaggtgaggccacaggacagtctgcctttgcacaggtcattgctgatcgtcacaaaattctgtttgaccggaattcagccatcaagagcagcattgtccctgaggtgaaggactatgctgctattgtggaacagaacttgcagcattttaaaccagtgtttcagctgctggagaagcagatactgtcccgagtccggaacacagctagctttaggaagactgctgaacgcctgctgagattttcagataagagacagactgaggaggccattgacaggatttttgccatatcacagcaacagcagcagcaaagcaagtcaaagaaaaaccgaagggcaggcaaacgctataaatttgtggatgctgtccctgatatttttgcacagattgaagtcaatgagaaaaagattagacagaaagctcagattttggcacagaaagaactacccatagatgaagatgaagaaatgaaagaccttttagattttgcagatgtaacatacgagaaacataaaaatgggggcttgattaaaggccggtttggacaggcacggatggtgacaactacacacagcagggccccatcactgtctgcttcctataccaggttgttcctgattctgaacattgctattttctttgtcatgttggcaatgcaactgacttatttccagagggcccagagcctacatggccaaagatgtctttatgcagttcttctcatagatagctgtattttattatggttgtactcttcttgttcccaatcacagtgttagcactgaagctataaattacctggtcattttgtgatcacaagagtctatgcaaaaaaaaaaatttctttaccccagattatcagatttttttccctcagattcattttaacaaattaagggaagatattttgacacaagaaagcaggaacgtggagaaattggagcaggaaaagaaattatcaaagcaatagaaatagcttggtggtcctatggtgtttttggaagtatttggcattgctaattgagcagtccatatagtactacttttagaagaaacaaaaagtctattttttaaagtaatgttttttcttatgagaaaaaggtttagatagaattgggttttattaatattaatttaatgctattagcaatttccatatactatattgtggaaaagactgaagaatacaattctgagaaatataaaaaaattttaatggtatactcatgttgaaagataaatgttgctaagtcctggtatgatggtgtgagcttccttggggaagtacttcttgagttatgtaactaacaggatgttttactacagatctggatggctattcagataacatggcaaaaaatgatagcagaagatcattaaaaacttaaaatatattttattagaaaacatttatctatgaatgaatatttccttgatgctggtctctgcacacatatgcttggttacttgcatgcattcattggttgttcaataagtgagatgattacagataacttaatactgtattttccttatatggaaaaccgttatagacccaataacaactaaacctttcaaaagaaaatattttctattatgaatgttgattttcataccaaagaagatggagagtctaaaatttggatatgattcttatgtttttttaatagaaaaccttcttcaagtttattttcctaaataaacatcataattgtgaa

SEQ ID NO: 431229 - DNA, 4507 bp, Homo sapiens
aagagaactgcttctctataggtgacccccgccccaaagtcccccctcccactaacttctctttgagaagagagtaaaaccgaattcgagagaaaagaggcagtaactattcgggaggaggcagactggagtgggcaccagtcccgcggagcctcagcgcccgccgcgtccctccctccgcccctttcgcccacacctacccgcccccgccggcccggctctcagtagcgtcgcccgaggctgcagcagcgcatcccggggcatggcgcggcgggggcgcggagggctcggttcggagggggccgggagcccgggcgccctggagtgaggaggaccgggagctggctctggaggctgcggaggcgacgccggagagaacgaagcctcggctgggagcggatctttcgaagatggtttggctgccttggagatttggagatctgatgccacgatgaggactcacacacggggggctcccagtgtgtttttcatatatttgctttgctttgtgtcagcctacatcaccgacgagaacccagaagttatgattcccttcaccaatgccaactacgacagccatcccatgctgtacttctccagggcagaagtggcggagctgcagctcagggctgccagctcgcacgagcacattgcagcccgcctcacggaggctgtgcacacgatgctgtccagccccttggaatacctccctccctgggatcccaaggactacagtgcccgctggaatgaaatttttggaaacaacttgggtgccttggcaatgttctgtgtgctgtatcctgagaacattgaagcccgagacatggccaaagactacatggagaggatggcagcgcagcctagttggttggtgaaagatgctccttgggatgaggtcccgcttgctcactccctggttggttttgccactgcttatgacttcttgtacaactacctgagcaagacacaacaggagaagtttcttgaagtgattgccaatgcctcagggtatatgtatgaaacttcatacaggagaggatggggatttcaatacctgcacaatcatcagcccaccaactgtatggctttgctcacgggaagcctagtcctgatgaatcaaggatatcttcaagaagcctacttatggaccaaacaagttctgaccatcatggagaaatctctggtcttgctcagggaggtgacggatggctccctctatgaaggagttgcgtatggcagctacaccactagatcactcttccaatacatgtttctcgtccagaggcacttcaacatcaaccactttggccatccgtggcttaaacaacactttgcatttatgtatagaaccatcctgccagggtttcaaaggactgtggctattgcggactcaaattacaactggttttatggtccagaaagccaattagtgttccttgataaatttgtcatgcgtaatggcagtggtaactggctagctgaccaaatcagaaggaaccgtgtggtggaaggtccaggaacaccatccaaagggcagcgctggtgcactctgcacacagaatttctctggtatgatggcagcttgaaatcggttcctcctccagactttggcacccctacactgcattattttgaagactggggtgtcgtgacttatggaagtgcactacctgcagaaatcaatagatctttcctttccttcaagtctggaaaactggggggacgtgcaatatatgacattgtccacagaaacaaatacaaagattggatcaaaggatggagaaattttaatgcagggcatgaacatcctgatcaaaactcatttacttttgctcccaatggtgtgcctttcattactgaggctctgtacgggccaaagtacaccttcttcaacaatgttttgatgttttccccagctgtgtcaaagagctgcttttctccctgggtgggtcaggtcacagaagactgctcatcaaaatggtctaaatacaagcatgacctggcagctagttgtcaggggagggtggttgcagcagaggagaaaaatggggtggttttcatccgaggagaaggtgtgggagcttataacccccagctcaacctgaagaatgttcagaggaatctcatcctcctacatccacagctgcttctccttgtagaccaaatacacctgggagaggagagtcccttggagacagcagcgagcttcttccataatgtggatgttccttttgaggagactgtggtagatggtgtccatggggctttcatcaggcagagagatggtctctataaaatgtactggatggacgatactggctacagcgagaaagcaacctttgcctcagtgacatatcctcggggctatccctacaacgggacaaactatgtgaatgtcaccatgcacctccgaagtcccatcaccagggcagcttacctcttcatagggccatctatagatgttcagagcttcactgtccacggagactctcagcaactggatgtgttcatagccaccagcaaacatgcctacgccacatacctgtggacaggtgaggccacaggacagtctgcctttgcacaggtcattgctgatcgtcacaaaattctgtttgaccggaattcagccatcaagagcagcattgtccctgaggtgaaggactatgctgctattgtggaacagaacttgcagcattttaaaccagtgtttcagctgctggagaagcagatactgtcccgagtccggaacacagctagctttaggaagactgctgaacgcctgctgagattttcagataagagacagactgaggaggccattgacaggatttttgccatatcacagcaacagcagcagcaaagcaagtcaaagaaaaaccgaagggcaggcaaacgctataaatttgtggatgctgtccctgatatttttgcacagattgaagtcaatgagaaaaagattagacagaaagctcagattttggcacagaaagaactacccatagatgaagatgaagaaatgaaagaccttttagattttgcagatgtaacatacgagaaacataaaaatgggggcttgattaaaggccggtttggacaggcacggatggtgacaactacacacagcagggccccatcactgtctgcttcctataccaggttgttcctgattctgaacattgctattttctttgtcatgttggcaatgcaactgacttatttccagagggcccagagcctacatggccaaagatgtctttatgcagttcttctcatagatagctgtattttattatggttgtactcttcttgttcccaatcacagtgttagcactgaagctataaattacctggtcattttgtgatcacaagagtctatgcaaaaaaaaaaatttctttaccccagattatcagatttttttccctcagattcattttaacaaattaagggaagatattttgacacaagaaagcaggaacgtggagaaattggagcaggaaaagaaattatcaaagcaatagaaatagcttggtggtcctatggtgtttttggaagtatttggcattgctaattgagcagtccatatagtactacttttagaagaaacaaaaagtctattttttaaagtaatgttttttcttatgagaaaaaggtttagatagaattgggttttattaatattaatttaatgctattagcaatttccatatactatattgtggaaaagactgaagaatacaattctgagaaatataaaaaaattttaatggtatactcatgttgaaagataaatgttgctaagtcctggtatgatggtgtgagcttccttggggaagtacttcttgagttatgtaactaacaggatgttttactacagatctggatggctattcagataacatggcaaaaaatgatagcagaagatcattaaaaacttaaaatatattttattagaaaacatttatctatgaatgaatatttccttgatgctggtctctgcacacatatgcttggttacttgcatgcattcattggttgttcaataagtgagatgattacagataacttaatactgtattttccttatatggaaaaccgttatagacccaataacaactaaacctttcaaaagaaaatattttctattatgaatgttgattttcataccaaagaagatggagagtctaaaatttggatatgattcttatgtttttttaatagaaaaccttcttcaagtttattttcctaaataaacatcataattgtgaaaaaaaaaaaaaaaaaaaaaaaaatttgtggggggctgggcccggaaaaagttttacacacccatctgtgggcccggggcaccagtagggtagtggaacgtcgccatagccggccccaagaaaacccggccaagacatagcgcgtgggattcccccaataaaaacgccggggcaacccaccgttgtgaaaatccgaagggatcagaggcaagggaccacacgggccaggaacgatatataa

SEQ ID NO: 431230 - DNA, 265 bp, Homo sapiens
ggagaatggccccaggtaaaacatggtagatgttaatttaaatatagtgggagtttattaattgtatgtatgtagacttactcatttggatccacagatagcaatatctgtggacacctatactaggtattgttagcataatagatgcagagtaaatacagtagccagtattaagaagtcctcttccccatgagatactctatggaattaaatgtattattcttttttattctccaaactctttgaaccaattttctctttgtgt

SEQ ID NO: 431231 - DNA, 505 bp, Homo sapiens
tccgggcgcggaggtttgcgcgcctgggtgagccgttggcgtggtggtcccggagtgatcctggcagccggtggggaagacaaggagggctgagggtaaaaagctgggattggtaggctgggtccagaacactgaccggggcacagtgcaaggacaattgcaaggtcccatctccaaggtgcgtcatatgcaggaatggcttgaaacaagaggaagtcctaaatcacacatcgacaaagcaaacttcaacaatgaaaaagtcatcttgaagttggattactcagacttccaaattgtaaaataatggcctgaatttaagttttctaagataaactcagtggtttggtttttattattaatagagatagaactattgtgtgttaatattagcattagtcaataagttattttaatgtcagatttttgaatgttattatatattacctgtatgatggaaggattaccactgtacacaaatctaatcaataaaaacgttagaaccttc

SEQ ID NO: 431232 - DNA, 567 bp, Homo sapiens
ctactcgccgagttccctgtacgtgctgtgtccgatgacctgcagcgtggaagacaaggtttgagcatggcagaaggaaacaccctgatatcagtggattatgaaatttttgggaaggtgcaaggggtgtttttccgtaagcatactcaggctgagggtaaaaagctgggattggtaggctgggtccagaacactgaccggggcacagtgcaaggacaattgcaaggtcccatctccaaggtgcgtcatatgcaggaatggcttgaaacaagaggaagtcctaaatcacacatcgacaaagcaaacttcaacaatgaaaaagtcatcttgaagttggattactcagacttccaaattgtaaaataatggcctgaatttaagttttctaagataaactcagtggtttggtttttattattaatagagatagaactattgtgtgttaatattagcattagtcaataagttattttaatgtcagatttttgaatgttattatatattacctgtatgatggaaggattaccactgtacacaaatctaatcaataaaaacgttagaaccttc

SEQ ID NO: 431233 - DNA, 471 bp, Homo sapiens
cgctcccacccccatccgccatattcaaacgacaaaccgccgacgagactttaggctgagggtaaaaagctgggattggtaggctgggtccagaacactgaccggggcacagtgcaaggacaattgcaaggtcccatctccaaggtgcgtcatatgcaggaatggcttgaaacaagaggaagtcctaaatcacacatcgacaaagcaaacttcaacaatgaaaaagtcatcttgaagttggattactcagacttccaaattgtaaaataatggcctgaatttaagttttctaagataaactcagtggtttggtttttattattaatagagatagaactattgtgtgttaatattagcattagtcaataagttattttaatgtcagatttttgaatgttattatatattacctgtatgatggaaggattaccactgtacacaaatctaatcaataaaaacgttagaaccttc

SEQ ID NO: 431234 - DNA, 812 bp, Homo sapiens
tccgggcgcggaggtttgcgcgcctgggtgagccgttggcgtggtggtcccggagtgatcctggcagccggtggggaagacaaggagggtttgagcatggcagaaggaaacaccctgatatcagtggattatgaaatttttgggaaggtgcaaggggtgtttttccgtaagcatactcaggaaatgactgttgaaaacagaattgctgaaactcacagcaagagctgtgttccagttagctttgctaccagttatgcaggctgagggtaaaaagctgggattggtaggctgggtccagaacactgaccggggcacagtgcaaggacaattgcaaggtcccatctccaaggtgcgtcatatgcaggaatggcttgaaacaagaggaagtcctaaatcacacatcgacaaagcaaacttcaacaatgaaaaagtcatcttgaagttggattactcagacttccaaattgtaaaataatggcctgaatttaagttttctaagataaactcagtggtttggtttttattattaatagagatagaactattgtgtgttaatattagcattagtcaataagttattttaatgtcagatttttgaatgttattatatattacctgtatgatggaaggattaccactgtacacaaatctaatcaataaaaacgttagaaccttcgaaaaaaacaaacaacccaaaaaaaaattttgtgggggcggcttgtggccctcaaaaaagttttttaaacccttctgttggggggccgcgggccccttggtgttcgggcaccttggtcctacgggttcccgaggga

SEQ ID NO: 431235 - DNA, 627 bp, Homo sapiens
tccgggcgcggaggtttgcgcgcctgggtgagccgttggcgtggtggtcccggagtgatcctggcagccggtggggaagacaaggagggtttgagcatggcagaaggaaacaccctgatatcagtggattatgaaatttttgggaaggtgcaaggggtgtttttccgtaagcatactcaggtatgtggcctgcaggctttggggtggtaacctaggttgtgggcataggaacaagggacgtgttcttgacaaatgtgaactagaagccgctggctatttggtagctgcatggcaaagaggtagtttgtagagcaatgagtatgaaaatgctgtgcaatcggtaaaacatggtgtaaatggaagatcaccctgctgttattattagtcagtggtgcctgagcatctagatacacatattaatgagcttctctcttccaagggaaatagagggcttccccagtgctcgccgttgtggcatcatcaaaccaagtcaggtttcttatagaaaggctaacattgattgaagagctggcatttagatgacctgatgtcatgtatataacatatataaatgcttcctctgcagctgctgcactttcttcagacctctttctccaagcttccctc

SEQ ID NO: 431236 - DNA, 1782 bp, Homo sapiens
ttttgagacagagtcttgctctgttgcctaggctaaagtgcagtggtgcgatctcggctcactgcaacctccacttcctgggttaatttgaagcagaagagggcagttgttatactgccctgtcagttggatgcggagtcttactcaaaattcattctcagcattcttcttttatggtatcttctttggcacttagcagcgcatcaggtaggcatcttctatttttcttcattccttaatttcctttgtatccctcaaatggttatttatttggctggagtctgttttgttcattaagcaaacatgtctttgctttgaacatgtctttgatttgatggatacttaaattcctcatcaaacattttgttgctatgcataacgttttctttggccaactccagcaatttcccacattttgacatgcaatcatgttaactcccattttcttttgtaatccaacatcttctatttagataattactttaacaatcaatgacttaatattctaatcataaatttatacaaaaataaaattacctccaaaacattgctacctttcctaaacattcagtcttgccacagtttaataaaaggaaagaacattaaaaaggataagacactgtaatgattagatgctttttataagcctaaaggcattgtgattatttagacagaagagaagaaagtgaagtgaaaacctgatagttatgtagtctcatggtttgctgttgagaggctgaacaccagctgctttccttttctaggaagataataaagtgggctttggctacaacataaagatgttgggttagacagtttcactacagtaagaacaacgggatgagttgcccaggaaattgtgaaatactttctaatgatctttaaagatataatgaacactaattcatctggatttgtttaggtgtggtcctggttaaaggcaaagggaaggatcagataacttcatgttttttccatttaacatacccaatagattcttgattaggggaagggaaaatgagcaagatacagtccagtattctaaaaacaatcagccttaggggatcatttcaaaagcatctgttttggacttaagtctttgatacttaaccaaattgactacacagtgaaaaattctagtgcctgggttttatagggtagaagaaagacatgcagtcaagtggccaatacttcatgtgaagataagcaatgagatccttcttgctgtctttcttttgactgttctgggcaatatcaaattagtttcagtggcttgattctaggccaagattctggcaacagattgtagtcttaccttgttttcttcaatctcactggatctctctctctttttaccccccttaggctgagggtaaaaagctgggattggtaggctgggtccagaacactgaccggggcacagtgcaaggacaattgcaaggtcccatctccaaggtgcgtcatatgcaggaatggcttgaaacaagaggaagtcctaaatcacacatcgacaaagcaaacttcaacaatgaaaaagtcatcttgaagttggattactcagacttccaaattgtaaaataatggcctgaatttaagttttctaagataaactcagtggtttggtttttattattaatagagatagaactattgtgtgttaatattagcattagtcaataagttattttaatgtcagatttttgaatgttattatatattacctgtatgatggaaggattaccactgtacacaaatctaatcaataaaaacgttagaaccttc

SEQ ID NO: 431237 - DNA, 1804 bp, Homo sapiens
ttttgagacagagtcttgctctgttgcctaggctaaagtgcagtggtgcgatctcggctcactgcaacctccacttcctgggttaatttgaagcagaagagggcagttgttatactgccctgtcagttggatgcggagtcttactcaaaattcattctcagcattcttcttttatggtatcttctttggcacttagcagcgcatcaggtaggcatcttctatttttcttcattccttaatttcctttgtatccctcaaatggttatttatttggctggagtctgttttgttcattaagcaaacatgtctttgctttgaacatgtctttgatttgatggatacttaaattcctcatcaaacattttgttgctatgcataacgttttctttggccaactccagcaatttcccacattttgacatgcaatcatgttaactcccattttcttttgtaatccaacatcttctatttagataattactttaacaatcaatgacttaatattctaatcataaatttatacaaaaataaaattacctccaaaacattgctacctttcctaaacattcagtcttgccacagtttaataaaaggaaagaacattaaaaaggataagacactgtaatgattagatgctttttataagcctaaaggcattgtgattatttagacagaagagaagaaagtgaagtgaaaacctgatagttatgtagtctcatggtttgctgttgagaggctgaacaccagctgctttccttttctaggaagataataaagtgggctttggctacaacataaagatgttgggttagacagtttcactacagtaagaacaacgggatgagttgcccaggaaattgtgaaatactttctaatgatctttaaagatataatgaacactaattcatctggatttgtttaggtgtggtcctggttaaaggcaaagggaaggatcagataacttcatgttttttccatttaacatacccaatagattcttgattaggggaagggaaaatgagcaagatacagtccagtattctaaaaacaatcagccttaggggatcatttcaaaagcatctgttttggacttaagtctttgatacttaaccaaattgactacacagtgaaaaattctagtgcctgggttttatagggtagaagaaagacatgcagtcaagtggccaatacttcatgtgaagataagcaatgagatccttcttgctgtctttcttttgactgttctgggcaatatcaaattagtttcagtggcttgattctaggccaagattctggcaacagattgtagtcttaccttgttttcttcaatctcactggatctctctctctttttaccccccttaggctgagggtaaaaagctgggattggtaggctgggtccagaacactgaccggggcacagtgcaaggacaattgcaaggtcccatctccaaggtgcgtcatatgcaggaatggcttgaaacaagaggaagtcctaaatcacacatcgacaaagcaaacttcaacaatgaaaaagtcatcttgaagttggattactcagacttccaaattgtaaaataatggcctgaatttaagttttctaagataaactcagtggtttggtttttattattaatagagatagaactattgtgtgttaatattagcattagtcaataagttattttaatgtcagatttttgaatgttattatatattacctgtatgatggaaggattaccactgtacacaaatctaatcaataaaaacgttagaaccttctgcttagagtacttttaaaaaa

SEQ ID NO: 431238 - DNA, 711 bp, Homo sapiens
tccgggcgcggaggtttgcgcgcctgggtgagccgttggcgtggtggtcccggagtgatcctggcagccggtggggaagacaaggagggtttgagcatggcagaaggaaacaccctgatatcagtggattatgaaatttttgggaaggtgcaaggggtgtttttccgtaagcatactcagctttgtttttgggaggctgaggaaggaggatcatttgagcctgggaggttaaggctgcaataagctgtgactgtgccaccatccttcagaaaaaaaaaagaaaaaggaaaagaggctgagggtaaaaagctgggattggtaggctgggtccagaacactgaccggggcacagtgcaaggacaattgcaaggtcccatctccaaggtgcgtcatatgcaggaatggcttgaaacaagaggaagtcctaaatcacacatcgacaaagcaaacttcaacaatgaaaaagtcatcttgaagttggattactcagacttccaaattgtaaaataatggcctgaatttaagttttctaagataaactcagtggtttggtttttattattaatagagatagaactattgtgtgttaatattagcattagtcaataagttattttaatgtcagatttttgaatgttattatatattacctgtatgatggaaggattaccactgtacacaaatctaatcaataaaaacgttagaaccttc

SEQ ID NO: 431239 - DNA, 782 bp, Homo sapiens
tccgggcgcggaggtttgcgcgcctgggtgagccgttggcgtggtggtcccggagtgatcctggcagccggtggggaagacaaggagggtttgagcatggcagaaggaaacaccctgatatcagtggattatgaaatttttgggaaggtgcaaggggtgtttttccgtaagcatactcaggaaatgactgttgaaaacagaattgctgaaactcacagcaagagctgtgttccagttagctttgctaccagttatgcaggtattaatgaatttaaaaggatttaaatcaaggaatgttctccaactacagtggaactaaaccacattaaaaaaataaaaaggataactggaaaatcccaaaatatttggaaaccatatagcacacttacttctaaaattgtggtagaatacatataacatagaaattattgttctaaccatttttaaatgtacaattcagtggtcttaagcacattcacattgttctgtttatctacagaacgcttttcatcttgcaaaactgaaactctgtattcattaaacactaactccccattttctccttcccccatgcccctgacaatcataaatctacattctattaattcaactgctctagttacctcatataagtggaattttacagtatttgtccttttgtggctggcttatttcacttagcataatatcctcagggttcatctgtgttatatcatgaaagtaaaaacaatttcctttctttgtaagacggaataatatcctgttgtatgtgtatactttca

SEQ ID NO: 431240 - DNA, 469 bp, Homo sapiens
ccgtctcaaaaaaaaaaaaaaaaaaaaaaagagttcagataaatcacattgcaaatttttaaagatttatttgactgtgacaacctcctgtttaaaactgcacattcttacagctatttaccatataagataactcttaagaactggagatagtcagctcccctgggttaatttgaagcagaagagggcagttgttatactgccctgtcagttggatgcggagtcttactcaaaattcattctcagcattcttcttttatggtatcttctttggcacttagcagcgcatcaggtaggcatcttctatttttcttcattccttaatttcctttgtatccctcaaatggttatttatttggctggagtctgttttgttcattaagcaaacatgtctttgctttgaacatgtctttgatttgatggatacttaaattcctcatcaaacattttgttgctatgcataacgttt

SEQ ID NO: 431241 - DNA, 597 bp, Homo sapiens
tccgggcgcggaggtttgcgcgcctgggtgagccgttggcgtggtggtcccggagtgatcctggcagccggtggggaagacaaggagggtttgagcatggcagaaggaaacaccctgatatcagtggattatgaaatttttgggaaggtgcaaggggtgtttttccgtaagcatactcaggctgagggtaaaaagctgggattggtaggctgggtccagaacactgaccggggcacagtgcaaggacaattgcaaggtcccatctccaaggtgcgtcatatgcaggaatggcttgaaacaagaggaagtcctaaatcacacatcgacaaagcaaacttcaacaatgaaaaagtcatcttgaagttggattactcagacttccaaattgtaaaataatggcctgaatttaagttttctaagataaactcagtggtttggtttttattattaatagagatagaactattgtgtgttaatattagcattagtcaataagttattttaatgtcagatttttgaatgttattatatattacctgtatgatggaaggattaccactgtacacaaatctaatcaataaaaacgttagaaccttc

SEQ ID NO: 431242 - DNA, 493 bp, Homo sapiens
cgctcccacccccatccgccatattcaaacgacaaaccgccgacgagactttaggctgagggtaaaaagctgggattggtaggctgggtccagaacactgaccggggcacagtgcaaggacaattgcaaggtcccatctccaaggtgcgtcatatgcaggaatggcttgaaacaagaggaagtcctaaatcacacatcgacaaagcaaacttcaacaatgaaaaagtcatcttgaagttggattactcagacttccaaattgtaaaataatggcctgaatttaagttttctaagataaactcagtggtttggtttttattattaatagagatagaactattgtgtgttaatattagcattagtcaataagttattttaatgtcagatttttgaatgttattatatattacctgtatgatggaaggattaccactgtacacaaatctaatcaataaaaacgttagaaccttctgcttagagtacttttaaaaaa

SEQ ID NO: 431243 - DNA, 833 bp, Homo sapiens
tccgggcgcggaggtttgcgcgcctgggtgagccgttggcgtggtggtcccggagtgatcctggcagccggtggggaagacaaggagggtttgagcatggcagaaggaaacaccctgatatcagtggattatgaaatttttgggaaggtgcaaggggtgtttttccgtaagcatactcaggaaatgactgttgaaaacagaattgctgaaactcacagcaagagctgtgttccagttagctttgctaccagttatgcaggtattaatgaatttaaaaggatttaaatcaaggaatgttctccaactacagtggaactaaaccacattaaaaaaataaaaaggataactggaaaatcccaaaatatttggaaaccatatagcacacttacttctaaaattgtggtagaatacatataacatagaaattattgttctaaccatttttaaatgtacaattcagtggtcttaagcacattcacattgttctgtttatctacagaacgcttttcatcttgcaaaactgaaactctgtattcattaaacactaactccccattttctccttcccccatgcccctgacaatcataaatctacattctattaattcaactgctctagttacctcatataagtggaattttacagtatttgtccttttgtggctggcttatttcacttagcataatatcctcagggttcatctgtgttatatcatgaaagtaaaacattcttcttggaagaggataattcggtgttgtgttagacagaaaaactgcgggggcgggacattggctggtgtatcgggggtataagatgtggaaccggtccaccg

SEQ ID NO: 431244 - DNA, 336 bp, Homo sapiens
cttagtccttagatcttctaccacagccccgctctctcgagcttggtgtaaaaattgccaaagcagttgcctgccacaactttgtaaaagccaaaaaggaggttgaaaattcacaggctgcccgaaaaaagaagaaacttgcatgggggtttgaagcaaagaagagatgggaaaccaaaagcaacatgggatacatgtaacttgccagagtgcttcaagacatttgtagactcaaatgctcaatttactgagaatgttttcctgcctatgttaatatgtcagaaaattgatagcactaaaacaaaaataagcataaaatttgggattttgattatc

SEQ ID NO: 431245 - DNA, 386 bp, Homo sapiens
ctggggattcttattgttttgatatttaaaaattgaatctggccgggcgtggtggctcatgcctgtactcccaaagttctgggagtacagacatgagctaccatgctgcccttgtattttcttatctgtacccagtgtaactacacgtttactggaactgtgtttttaagactgacagttgtttataatggattagtcgtaagtgccaaaaagtctcagttgatattatctttacaaatgacttgaccttaatgttataaaagtagttactgtttttttttaattggaggcagacttgatatttcagagttgcatagtaaaagcaatttgttaatttttgtgtactttcagataaactattacaataaagaaaggagcagaatgta

SEQ ID NO: 431246 - DNA, 539 bp, Homo sapiens
  misc_feature (528)..(528): n is a, c, g, or t
ttaaaaaaaaaaagttctaacaattccattctgtaggtgagtgttagtattgtcattttataaatgagaaaactgaggctgaggcattaacttgcctaaaaggactcaggtggtgtgacaccacctgagtccaggaagataaagaggatgagagcatcagaaaaacagaaatcatagatttctcaacagatgaaccaaaaactgaaacagagtcaaatgtaaatgcctatgaagagtgtccttctggaattcccatagatatgtggaataaatttcaagaattgcataaaaaacattctgaacagaaaagcacaacctcaagattcagagggaaaagaagaaaacgctccagaaaagataaattgaagaatgaaaaagaattacatagtgaaccgtcctcaaatgaaacccagtggaaagagcttactcagtattttggagtcaatgatagatttgacccgcctgttaaaaggaaaaaagttgagaagtcaggccttaaaagaggatagactctggtggtgtggggtnccgagctcggc

SEQ ID NO: 431247 - DNA, 375 bp, Homo sapiens
cttcgttgaatgtttatcagattataaatatagaggcatttcttcatcctgtttaatgtttattttgtaatcattggagtatgtgaaaaatttttgtttgttttgctttggtctctaagtaaacatgttcagcaaagtatttttttttttaagaaataaattgagatttgtatgttcttccttttaggtttgaagcaaagaagagatgggaaaccaaaagcaacatgggatacatgtaacttgccagagtgcttcaagacatttgtagactcaaatgctcaatttactgagaatgttttcctgcctatgttaatatgtcagaaaattgatagcactaaaacaaaaataagcataaaatttgggattttgattatc

SEQ ID NO: 431248 - DNA, 3305 bp, Homo sapiens
gacgcaggagccaatgagaaggcgcgatgttgacggggtcctaagatggctgctgggcgaccacttcctgacagctccagttaatgggactgccagcaggctagacatccttcgccggaatgtgcagcgcttagttctgtgcccgggaggggcttctctctcttttgggattggagtgtggcattgccgccagaaagcctgcagaattccgggttgtgcagccaagcaggaacggtgtacctttctagacccatcctcttgcaatcttggaccctaagaaaagatgtggagtgggctgctacctcctggcctaaatgaaagtgacgctgagtcaaactcggaagatgaagctacgttggagaactctggacttaacttacaggaagataaagaggatgagagcatcagaaaaacagaaatcatagatttctcaacagatgaaccaaaaactgaaacagagtcaaatgtaaatgcctatgaagagtgtccttctggaattcccatagatatgtggaataaatttcaagaattgcataaaaaacattctgaacagaaaagcacaacctcaagattcagagggaaaagaagaaaacgctccagaaaagataaattgaagaatgaaaaagaattacatagtgaaccgtcctcaaatgaaacccagtggaaagagcttactcagtattttggagtcaatgatagatttgacccgcctgttaaaaggaaaaaagttgagaagtcaggccttgaaaagaggatagaccaggctgtggaggagtggaatattgagaaggctgaggaactcagcaaccagctagctactcgagagcttggtgtaaaaattgccaaagcagttgcctgccacaactttgtaaaagccaaaaaggaggttgaaaattcacaggctgcccgaaaaaagaagaaacttgcatgggggtttgaagcaaagaagagatgggaaaccaaaagcaacatgggatacatgtaacttgccagagtgcttcaagacatttgtagactcaaatgctcaatttactgagaatgttttcctgcctatgttaatatgtcagaaaattgatagcactaaaacaaaaataagcataaaatttgggattttgattatcagctcttttcagtctttctttaaggactttgtcctattgaagtgaataaaatgaagcattctgttatttgtataagaaatgtaagaaaaaaaatatagaaagaagaggataggattttgtttatttgtatggatggacccttggtataaaatcacttttggcgctttccattcatttggtttagcacagccagtgagcttctcgtactttctttcttttttttttttttttggagacagagcctcgcttgctctgtcacccaggctagagtgcagtagcacgatcttggctcactgcaaccactgcttcctgggttcaagtgattctcatgcctcagcctcctgagtagctgggattatggacaaatgccaccacacccggctaatttttttttttttttttgtatttttagtagagacagagttttgctgtgttggtcaggctggtcttgaactcctggcctcatatgattcacctgcctctgcctcccaaagttctgggagtacagacatgagctaccatgctgcccttgtattttcttatctgtacccagtgtaactacacgtttactggaactgtgtttttaagactgacagttgtttataatggattagtcgtaagtgccaaaaagtctcagttgatattatctttacaaatgacttgaccttaatgttataaaagtagttactgtttttttttaattggaggcagacttgatatttcagagttgcatagtaaaagcaatttgttaatttttgtgtactttcagataaactattacaataaagaaaggagcagaatgtagtatttggaagatgatttaaattcagcaacgcctaaaaatgtcttcctaagtatttttctcagccatgtcattctttaaattatgagatggttcttagaagagaaaatggtgtaattgtattaaacagacaattataactcaagataatataactttgaaccttctaagaactgatttgtttggttttcctcccattccccattcctccttaaaagattgaatgaattaatgagcagaaagagaggattggtaacatgggaaatcgttttcattagatgtacatttcctggttctgacaggaaaggggctccggaaaatcataaaacaagcaggtgaacaagaccaggtgtgtcggcacctccctgctcagtgcccagcggaggtaaagaaccactcagcatggtttttgtcagttcacctcttctgtcgttgtcagaggtttcctacctgtctgatataaactttctctgggttgataatataaattcagaaacatgtaaaatgaatcatgattatattactgttatttttagacttaaaatagtaacaaaattttatttatggtggcacatttaatggctttttttttctgtgttctggaataagagaatacctagctactatttaagcatccaaaaatcatatcttgctttcatttagttgagaaaagccagcatagagaaagcaaagttttagaatattatgtgtcatactaattcagtatccagaccaaatgttggaaagtcttattttatgatttaatatcccttgttccattttacagatatgatcatgtaaaacttacctacaatattcatttcaaactgctaaattagagcatttagtgacccctgcaggcatgttgcacttcccatactgaagccttgccagagtggcctcctgtagggtctgacttgggatcctgtccagccaaggaagcccttcttcagcctgctccagtgcccgcagttgccccctcagcatcccctcggggttctcatgtagatgggaacattttaactacgcggaaggcaggcatttcagcagaattaagtatagcgggggctcatctaataaaggaagccacttctcccaagtcgtcactcctttctgggcatgggttgtggaaagctctaaaacgttatgtgtagcagaagaaggggttggagggaagatttgtggggacaggttgtcttggattggccctgctgacatgtcatttgagagcagttttattttatcctttctaataggaattaggtattttactcctagaaacattattccttgagtacgcatgctgctcaaaggatgtagtcatttgtccactccattctagtcacagcaaaataaggattctttttggatcagtaataact

SEQ ID NO: 431249 - DNA, 1925 bp, Homo sapiens
gacgcaggagccaatgagaaggcgcgatgttgacggggtcctaagatggctgctgggcgaccacttcctgacagctccagttaatgggactgccagcaggctagacatccttcgccggaatgtgcagcgcttagttctgtgcccgggaggggcttctctctcttttgggattggagtgtggcattgccgccagaaagcctgcagaattccgggttgtgcagccaagcaggaacggtgtacctttctagacccatcctcttgcaatcttggaccctaagaaaagatgtggagtgggctgctacctcctggcctaaatgaaagtgacgctgagtcaaactcggaagatgaagctacgttggagaactctggacttaacttacaggaagataaagaggatgagagcatcagaaaaacagaaatcatagatttctcaacagatgaaccaaaaactgaaacagagtcaaatgtaaatgcctatgaagagtgtccttctggaattcccatagatatgtggaataaatttcaagaattgcataaaaaacattctgaacagaaaagcacaacctcaagattcagagggaaaagaagaaaacgctccagaaaagataaattgaagaatgaaaaagaattacatagtgaaccgtcctcaaatgaaacccagtggaaagagcttactcagtattttggagtcaatgatagatttgacccgcctgttaaaaggaaaaaagttgagaagtcaggccttgaaaagaggatagaccaggctgtggaggagtggaatattgagaaggctgaggaactcagcaaccagctagctactcgagagcttggtgtaaaaattgccaaagcagttgcctgccacaactttgtaaaagccaaaaaggaggttgaaaattcacaggctgcccgaaaaaagaagaaacttgcatgggggtttgaagcaaagaagagatgggaaaccaaaagcaacatgggatacatgtaacttgccagagtgcttcaagacatttgtagactcaaatgctcaatttactgagaatgttttcctgcctatgttaatatgtcagaaaattgatagcactaaaacaaaaataagcataaaatttgggattttgattatcagctcttttcagtctttctttaaggactttgtcctattgaagtgaataaaatgaagcattctgttatttgtataagaaatgtaagaaaaaaaatatagaaagaagaggataggattttgtttatttgtatggatggacccttggtataaaatcacttttggcgctttccattcatttggtttagcacagccagtgagcttctcgtactttctttcttttttttttttttttggagacagagcctcgcttgctctgtcacccaggctagagtgcagtagcacgatcttggctcactgcaaccactgcttcctgggttcaagtgattctcatgcctcagcctcctgagtagctgggattatggacaaatgccaccacacccggctaatttttttttttttttttgtatttttagtagagacagagttttgctgtgttggtcaggctggtcttgaactcctggcctcatatgattcacctgcctctgcctcccaaagttctgggagtacagacatgagctaccatgctgcccttgtattttcttatctgtacccagtgtaactacacgtttactggaactgtgtttttaagactgacagttgtttataatggattagtcgtaagtgccaaaaagtctcagttgatattatctttacaaatgacttgaccttaatgttataaaagtagttactgtttttttttaattggaggcagacttgatatttcagagttgcatagtaaaagcaatttgttaatttttgtgtactttcagataaactattacaataaagaaaggagcagaatgta

SEQ ID NO: 431250 - DNA, 2432 bp, Homo sapiens
  misc_feature (2432)..(2432): n is a, c, g, or t
gacgcaggagccaatgagaaggcgcgatgttgacggggtcctaagatggctgctgggcgaccacttcctgacagctccagttaatgggactgccagcaggctagacatccttcgccggaatgtgcagcgcttagttctgtgcccgggaggggcttctctctcttttgggattggagtgtggcattgccgccagaaagcctgcagaattccgggttgtgcagccaagcaggaacggtgtacctttctagacccatcctcttgcaatcttggaccctaagaaaagatgtggagtgggctgctacctcctggcctaaatgaaagtgacgctgagtcaaactcggaagatgaagctacgttggagaactctggacttaacttacaggaagataaagaggatgagagcatcagaaaaacagaaatcatagatttctcaacagatgaaccaaaaactgaaacagagtcaaatgtaaatgcctatgaagagtgtccttctggaattcccatagatatgtggaataaatttcaagaattgcataaaaaacattctgaacagaaaagcacaacctcaagattcagagggaaaagaagaaaacgctccagaaaagataaattgaagaatgaaaaagaattacatagtgaaccgtcctcaaatgaaacccagtggaaagagcttactcagtattttggagtcaatgatagatttgacccgcctgttaaaaggaaaaaagttgagaagtcaggccttgaaaagaggatagaccaggctgtggaggagtggaatattgagaaggctgaggaactcagcaaccagctagctactcgagagcttggtgtaaaaattgccaaagcagttgcctgccacaactttgtaaaagccaaaaaggaggttgaaaattcacaggctgcccgaaaaaagaagaaacttgcatgggggtttgaagcaaagaagagatgggaaaccaaaagcaacatgggatacatgtaacttgccagagtgcttcaagacatttgtagactcaaatgctcaatttactgagaatgttttcctgcctatgttaatatgtcagaaaattgatagcactaaaacaaaaataagcataaaatttgggattttgattatcagctcttttcagtctttctttaaggactttgtcctattgaagtgaataaaatgaagcattctgttatttgtataagaaatgtaagaaaaaaaatatagaaagaagaggataggattttgtttatttgtatggatggacccttggtataaaatcacttttggcgctttccattcatttggtttagcacagccagtgagcttctcgtactttctttcttttttttttttttttggagacagagcctcgcttgctctgtcacccaggctagagtgcagtagcacgatcttggctcactgcaaccactgcttcctgggttcaagtgattctcatgcctcagcctcctgagtagctgggattatggacaaatgccaccacacccggctaatttttttttttttttttgtatttttagtagagacagagttttgctgtgttggtcaggctggtcttgaactcctggcctcatatgattcacctgcctctgcctcccaaagttctgggagtacagacatgagctaccatgctgcccttgtattttcttatctgtacccagtgtaactacacgtttactggaactgtgtttttaagactgacagttgtttataatggattagtcgtaagtgccaaaaagtctcagttgatattatctttacaaatgacttgaccttaatgttataaaagtagttactgtttttttttaattggaggcagacttgatatttcagagttgcatagtaaaagcaatttgttaatttttgtgtactttcagataaactattacaataaagaaaggagcagaatgtagtatttggaagatgatttaaattcagcaacgcctaaaaatgtcttcctaagtatttttctcagccatgtcattctttaaattatgagatggttcttagaagagaaaatggtgtaattgtattaaacagacaattattaccaaaaaaaaaaaaaaaaaaaaaaaaatttggggggggggggccgaaaaaaagtttaaaaccttgtggggggcggggcccaggttgaactgaggccaccgttggcgccaaagaacacccgcgcacggcatgggtgcgcgttctccccaaaaaaagcgcggcgcacggcgttcgaccaccagaggttcgcgcgctagcgggccaaccaggccaggtcgttatcccccgccggttgtgggccacccccacggccaccagccagcgcgaagcagccgagcacgtccaagcgcgcgacgcaaccgtacacagcacacaacagcaaagccgggaccaaccacagagacaagcgcctccagcgacccgaatgagn

SEQ ID NO: 431251 - DNA, 2582 bp, Homo sapiens
gacgcaggagccaatgagaaggcgcgatgttgacggggtcctaagatggctgctgggcgaccacttcctgacagaagaaaagatgtggagtgggctgctacctcctggcctaaatgaaagtgacgctgagtcaaactcggaagatgaagctacgttggagaactctggacttaacttacaggaagataaagaggatgagagcatcagaaaaacagaaatcatagatttctcaacagatgaaccaaaaactgaaacagagtcaaatgtaaatgcctatgaagagtgtccttctggaattcccatagatatgtggaataaatttcaagaattgcataaaaaacattctgaacagaaaagcacaacctcaagattcagagggaaaagaagaaaacgctccagaaaagataaattgaagaatgaaaaagaattacatagtgaaccgtcctcaaatgaaacccagtggaaagagcttactcagtattttggagtcaatgatagatttgacccgcctgttaaaaggaaaaaagttgagaagtcaggccttgaaaagaggatagaccaggctgtggaggagtggaatattgagaaggctgaggaactcagcaaccagctagctactcgagagcttggtgtaaaaattgccaaagcagttgcctgccacaactttgtaaaagccaaaaaggaggttgaaaattcacaggctgcccgaaaaaagaagaaacttgcatgggggtttgaagcaaagaagagatgggaaaccaaaagcaacatgggatacatgtaacttgccagagtgcttcaagacatttgtagactcaaatgctcaatttactgagaatgttttcctgcctatgttaatatgtcagaaaattgatagcactaaaacaaaaataagcataaaatttgggattttgattatcagctcttttcagtctttctttaaggactttgtcctattgaagtgaataaaatgaagcattctgttatttgtataagaaatgtaagaaaaaaaatatagaaagaagaggataggattttgtttatttgtatggatggacccttggtataaaatcacttttggcgctttccattcatttggtttagcacagccagtgagcttctcgtactttctttcttttttttttttttttggagacagagcctcgcttgctctgtcacccaggctagagtgcagtagcacgatcttggctcactgcaaccactgcttcctgggttcaagtgattctcatgcctcagcctcctgagtagctgggattatggacaaatgccaccacacccggctaatttttttttttttttttgtatttttagtagagacagagttttgctgtgttggtcaggctggtcttgaactcctggcctcatatgattcacctgcctctgcctcccaaagttctgggagtacagacatgagctaccatgctgcccttgtattttcttatctgtacccagtgtaactacacgtttactggaactgtgtttttaagactgacagttgtttataatggattagtcgtaagtgccaaaaagtctcagttgatattatctttacaaatgacttgaccttaatgttataaaagtagttactgtttttttttaattggaggcagacttgatatttcagagttgcatagtaaaagcaatttgttaatttttgtgtactttcagataaactattacaataaagaaaggagcagaatgtagtatttggaagatgatttaaattcagcaacgcctaaaaatgtcttcctaagtatttttctcagccatgtcattctttaaattatgagatggttcttagaagagaaaatggtgtaattgtattaaacagacaattataactcaagataatataactttgaaccttctaagaactgatttgtttggttttcctcccattccccattcctccttaaaagattgaatgaattaatgagcagaaagagaggattggtaacatgggaaatcgttttcattagatgtacatttcctggttctgacaggaaaggggctccggaaaatcataaaacaagcaggtgaacaagaccaggtgtgtcggcacctccctgctcagtgcccagcggaggtaaagaaccactcagcatggtttttgtcagttcacctcttctgtcgttgtcagaggtttcctacctgtctgatataaactttctctgggttgataatataaattcagaaacatgtaaaatgaatcatgattatattactgttatttttagacttaaaatagtaacaaaattttatttatggtggcacatttaatggctttttttttctgtgttctggaataagagaatacctagctactatttaagcatccaaaaatcatatcttgctttcatttagttgagaaaagccagcatagagaaagcaaagttttagaatattatgtgtcatactaattcagtatccagaccaaatgttggaaagtcttattttatgatttaatatcccttgttccattttacagatatgatcatgtaaaacttacctacaatattcatttcaaactgctaaattaggtaaatacagacttttagtat

SEQ ID NO: 431252 - DNA, 2838 bp, Homo sapiens
cagcggcctccccagcctgttatgtggagggggttctccgtcccacccaggtcaaagtgagaggggattgaggaggctgtcgatagggaaaacaggctcacgtttacagttgctgtattccggaaaacactccagttaatgggactgccagcaggctagacatccttcgccggaatgtgcagcgcttagttctgtgcccgggaggggcttctctctcttttgggattggagtgtggcattgccgccagaaagcctgcagaattccgggttgtgcagccaagcaggaacggtgtacctttctagacccatcctcttgcaatcttggaccctaagaaaagatgtggagtgggctgctacctcctggcctaaatgaaagtgacgctgagtcaaactcggaagatgaagctacgttggagaactctggacttaacttacaggaagataaagaggatgagagcatcagaaaaacagaaatcatagatttctcaacagatgaaccaaaaactgaaacagagtcaaatgtaaatgcctatgaagagtgtccttctggaattcccatagatatgtggaataaatttcaagaattgcataaaaaacattctgaacagaaaagcacaacctcaagattcagagggaaaagaagaaaacgctccagaaaagataaattgaagaatgaaaaagaattacatagtgaaccgtcctcaaatgaaacccagtggaaagagcttactcagtattttggagtcaatgatagatttgacccgcctgttaaaaggaaaaaagttgagaagtcaggccttgaaaagaggatagaccaggctgtggaggagtggaatattgagaaggctgaggaactcagcaaccagctagctactcgagagcttggtgtaaaaattgccaaagcagttgcctgccacaactttgtaaaagccaaaaaggaggttgaaaattcacaggctgcccgaaaaaagaagaaacttgcatgggggtttgaagcaaagaagagatgggaaaccaaaagcaacatgggatacatgtaacttgccagagtgcttcaagacatttgtagactcaaatgctcaatttactgagaatgttttcctgcctatgttaatatgtcagaaaattgatagcactaaaacaaaaataagcataaaatttgggattttgattatcagctcttttcagtctttctttaaggactttgtcctattgaagtgaataaaatgaagcattctgttatttgtataagaaatgtaagaaaaaaaatatagaaagaagaggataggattttgtttatttgtatggatggacccttggtataaaatcacttttggcgctttccattcatttggtttagcacagccagtgagcttctcgtactttctttcttttttttttttttttggagacagagcctcgcttgctctgtcacccaggctagagtgcagtagcacgatcttggctcactgcaaccactgcttcctgggttcaagtgattctcatgcctcagcctcctgagtagctgggattatggacaaatgccaccacacccggctaatttttttttttttttttgtatttttagtagagacagagttttgctgtgttggtcaggctggtcttgaactcctggcctcatatgattcacctgcctctgcctcccaaagttctgggagtacagacatgagctaccatgctgcccttgtattttcttatctgtacccagtgtaactacacgtttactggaactgtgtttttaagactgacagttgtttataatggattagtcgtaagtgccaaaaagtctcagttgatattatctttacaaatgacttgaccttaatgttataaaagtagttactgtttttttttaattggaggcagacttgatatttcagagttgcatagtaaaagcaatttgttaatttttgtgtactttcagataaactattacaataaagaaaggagcagaatgtagtatttggaagatgatttaaattcagcaacgcctaaaaatgtcttcctaagtatttttctcagccatgtcattctttaaattatgagatggttcttagaagagaaaatggtgtaattgtattaaacagacaattataactcaagataatataactttgaaccttctaagaactgatttgtttggttttcctcccattccccattcctccttaaaagattgaatgaattaatgagcagaaagagaggattggtaacatgggaaatcgttttcattagatgtacatttcctggttctgacaggaaaggggctccggaaaatcataaaacaagcaggtgaacaagaccaggtgtgtcggcacctccctgctcagtgcccagcggaggtaaagaaccactcagcatggtttttgtcagttcacctcttctgtcgttgtcagaggtttcctacctgtctgatataaactttctctgggttgataatataaattcagaaacatgtaaaatgaatcatgattatattactgttatttttagacttaaaatagtaacaaaattttatttatggtggcacatttaatggctttttttttctgtgttctggaataagagaatacctagctactatttaagcatccaaaaatcatatcttgctttcatttagttgagaaaagccagcatagagaaagcaaagttttagaatattatgtgtcatactaattcagtatccagaccaaatgttggaaagtcttattttatgatttaatatcccttgttccattttacagatatgatcatgtaaaacttacctacaatattcatttcaaactgctaaattaggtaaatacagacttttagtat

SEQ ID NO: 431253 - DNA, 2752 bp, Homo sapiens
gacgcaggagccaatgagaaggcgcgatgttgacggggtcctaagatggctgctgggcgaccacttcctgacagctccagttaatgggactgccagcaggctagacatccttcgccggaatgtgcagcgcttagttctgtgcccgggaggggcttctctctcttttgggattggagtgtggcattgccgccagaaagcctgcagaattccgggttgtgcagccaagcaggaacggtgtacctttctagacccatcctcttgcaatcttggaccctaagaaaagatgtggagtgggctgctacctcctggcctaaatgaaagtgacgctgagtcaaactcggaagatgaagctacgttggagaactctggacttaacttacaggaagataaagaggatgagagcatcagaaaaacagaaatcatagatttctcaacagatgaaccaaaaactgaaacagagtcaaatgtaaatgcctatgaagagtgtccttctggaattcccatagatatgtggaataaatttcaagaattgcataaaaaacattctgaacagaaaagcacaacctcaagattcagagggaaaagaagaaaacgctccagaaaagtgaaccgtcctcaaatgaaacccagtggaaagagcttactcagtattttggagtcaatgatagatttgacccgcctgttaaaaggaaaaaagttgagaagtcaggccttgaaaagaggatagaccaggctgtggaggagtggaatattgagaaggctgaggaactcagcaaccagctagctactcgagagcttggtgtaaaaattgccaaagcagttgcctgccacaactttgtaaaagccaaaaaggaggttgaaaattcacaggctgcccgaaaaaagaagaaacttgcatgggggtttgaagcaaagaagagatgggaaaccaaaagcaacatgggatacatgtaacttgccagagtgcttcaagacatttgtagactcaaatgctcaatttactgagaatgttttcctgcctatgttaatatgtcagaaaattgatagcactaaaacaaaaataagcataaaatttgggattttgattatcagctcttttcagtctttctttaaggactttgtcctattgaagtgaataaaatgaagcattctgttatttgtataagaaatgtaagaaaaaaaatatagaaagaagaggataggattttgtttatttgtatggatggacccttggtataaaatcacttttggcgctttccattcatttggtttagcacagccagtgagcttctcgtactttctttcttttttttttttttttggagacagagcctcgcttgctctgtcacccaggctagagtgcagtagcacgatcttggctcactgcaaccactgcttcctgggttcaagtgattctcatgcctcagcctcctgagtagctgggattatggacaaatgccaccacacccggctaatttttttttttttttttgtatttttagtagagacagagttttgctgtgttggtcaggctggtcttgaactcctggcctcatatgattcacctgcctctgcctcccaaagttctgggagtacagacatgagctaccatgctgcccttgtattttcttatctgtacccagtgtaactacacgtttactggaactgtgtttttaagactgacagttgtttataatggattagtcgtaagtgccaaaaagtctcagttgatattatctttacaaatgacttgaccttaatgttataaaagtagttactgtttttttttaattggaggcagacttgatatttcagagttgcatagtaaaagcaatttgttaatttttgtgtactttcagataaactattacaataaagaaaggagcagaatgtagtatttggaagatgatttaaattcagcaacgcctaaaaatgtcttcctaagtatttttctcagccatgtcattctttaaattatgagatggttcttagaagagaaaatggtgtaattgtattaaacagacaattataactcaagataatataactttgaaccttctaagaactgatttgtttggttttcctcccattccccattcctccttaaaagattgaatgaattaatgagcagaaagagaggattggtaacatgggaaatcgttttcattagatgtacatttcctggttctgacaggaaaggggctccggaaaatcataaaacaagcaggtgaacaagaccaggtgtgtcggcacctccctgctcagtgcccagcggaggtaaagaaccactcagcatggtttttgtcagttcacctcttctgtcgttgtcagaggtttcctacctgtctgatataaactttctctgggttgataatataaattcagaaacatgtaaaatgaatcatgattatattactgttatttttagacttaaaatagtaacaaaattttatttatggtggcacatttaatggctttttttttctgtgttctggaataagagaatacctagctactatttaagcatccaaaaatcatatcttgctttcatttagttgagaaaagccagcatagagaaagcaaagttttagaatattatgtgtcatactaattcagtatccagaccaaatgttggaaagtcttattttatgatttaatatcccttgttccattttacagatatgatcatgtaaaacttacctacaatattcatttcaaactgctaaattaggtaaatacagacttttagtat

SEQ ID NO: 431254 - DNA, 2910 bp, Homo sapiens
gacgcaggagccaatgagaaggcgcgatgttgacggggtcctaagatggctgctgggcgaccacttcctgacagctccagttaatgggactgccagcaggctagacatccttcgccggaatgtgcagcgcttagttctgtgcccgggaggggcttctctctcttttgggattggagtgtggcattgccgccagaaagcctgcagaattccgggttgtgcagccaagcaggaacggtgtacctttctagacccatcctcttgcaatcttggaccctaagaaaagatgtggagtgggctgctacctcctggcctaaatgaaagtgacgctgagtcaaactcggaagatgaagctacgttggagaactctggacttaacttacaggaagataaagaggatgagagcatcagaaaaacagaaatcatagatttctcaacagatgaaccaaaaactgaaacagagtcaaatgtaaatgcctatgaagagtgtccttctggaattcccatagatatgtggaataaatttcaagaattgcataaaaaacattctgaacagaaaagcacaacctcaagattcagagggaaaagaagaaaacgctccagaaaaggtgttttgttttaactcaggttgttcgtcgtgctaatgctaagttgtgactgagtttaaccatttttttaaaatatggttttgaaattactgaagttaggtattgacactttgtgaattcttttcagataaattgaagaatgaaaaagaattacatagtgaaccgtcctcaaatgaaacccagtggaaagagcttactcagtattttggagtcaatgatagatttgacccgcctgttaaaaggaaaaaagttgagaagtcaggccttgaaaagaggatagaccaggctgtggaggagtggaatattgagaaggctgaggaactcagcaaccagctagctactcgagagcttggtgtaaaaattgccaaagcagttgcctgccacaactttgtaaaagccaaaaaggaggttgaaaattcacaggctgcccgaaaaaagaagaaacttgcatgggggtttgaagcaaagaagagatgggaaaccaaaagcaacatgggatacatgtaacttgccagagtgcttcaagacatttgtagactcaaatgctcaatttactgagaatgttttcctgcctatgttaatatgtcagaaaattgatagcactaaaacaaaaataagcataaaatttgggattttgattatcagctcttttcagtctttctttaaggactttgtcctattgaagtgaataaaatgaagcattctgttatttgtataagaaatgtaagaaaaaaaatatagaaagaagaggataggattttgtttatttgtatggatggacccttggtataaaatcacttttggcgctttccattcatttggtttagcacagccagtgagcttctcgtactttctttcttttttttttttttttggagacagagcctcgcttgctctgtcacccaggctagagtgcagtagcacgatcttggctcactgcaaccactgcttcctgggttcaagtgattctcatgcctcagcctcctgagtagctgggattatggacaaatgccaccacacccggctaatttttttttttttttttgtatttttagtagagacagagttttgctgtgttggtcaggctggtcttgaactcctggcctcatatgattcacctgcctctgcctcccaaagttctgggagtacagacatgagctaccatgctgcccttgtattttcttatctgtacccagtgtaactacacgtttactggaactgtgtttttaagactgacagttgtttataatggattagtcgtaagtgccaaaaagtctcagttgatattatctttacaaatgacttgaccttaatgttataaaagtagttactgtttttttttaattggaggcagacttgatatttcagagttgcatagtaaaagcaatttgttaatttttgtgtactttcagataaactattacaataaagaaaggagcagaatgtagtatttggaagatgatttaaattcagcaacgcctaaaaatgtcttcctaagtatttttctcagccatgtcattctttaaattatgagatggttcttagaagagaaaatggtgtaattgtattaaacagacaattataactcaagataatataactttgaaccttctaagaactgatttgtttggttttcctcccattccccattcctccttaaaagattgaatgaattaatgagcagaaagagaggattggtaacatgggaaatcgttttcattagatgtacatttcctggttctgacaggaaaggggctccggaaaatcataaaacaagcaggtgaacaagaccaggtgtgtcggcacctccctgctcagtgcccagcggaggtaaagaaccactcagcatggtttttgtcagttcacctcttctgtcgttgtcagaggtttcctacctgtctgatataaactttctctgggttgataatataaattcagaaacatgtaaaatgaatcatgattatattactgttatttttagacttaaaatagtaacaaaattttatttatggtggcacatttaatggctttttttttctgtgttctggaataagagaatacctagctactatttaagcatccaaaaatcatatcttgctttcatttagttgagaaaagccagcatagagaaagcaaagttttagaatattatgtgtcatactaattcagtatccagaccaaatgttggaaagtcttattttatgatttaatatcccttgttccattttacagatatgatcatgtaaaacttacctacaatattcatttcaaactgctaaattaggtaaatacagacttttagtat

SEQ ID NO: 431255 - DNA, 2859 bp, Homo sapiens
gacgcaggagccaatgagaaggcgcgatgttgacggggtcctaagatggctgctgggcgaccacttcctgacagctccagttaatgggactgccagcaggctagacatccttcgccggaatgtgcagcgcttagttctgtgcccgggaggggcttctctctcttttgggattggagtgtggcattgccgccagaaagcctgcagaattccgggttgtgcagccaagcaggaacggtgtacctttctagacccatcctcttgcaatcttggaccctaagaaaagatgtggagtgggctgctacctcctggcctaaatgaaagtgacgctgagtcaaactcggaagatgaagctacgttggagaactctggacttaacttacaggaagataaagaggatgagagcatcagaaaaacagaaatcatagatttctcaacagatgaaccaaaaactgaaacagagtcaaatgtaaatgcctatgaagagtgtccttctggaattcccatagatatgtggaataaatttcaagaattgcataaaaaacattctgaacagaaaagcacaacctcaagattcagagggaaaagaagaaaacgctccagaaaagtgaaccgtcctcaaatgaaacccagtggaaagagcttactcagtattttggagtcaatgatagatttgacccgcctgttaaaaggaaaaaagttgagaagtcaggccttgaaaagaggatagaccaggctgtggaggagtggaatattgagaaggctgaggaactcagcaaccagctagctactcgagaggaaaatcatgggagtaatgttgtgtgtttctcagtgtcagcgatccagagactcgtgctgtctctttgtccctttcctgatggtgttacttcgattaactacttcagcttggtgtaaaaattgccaaagcagttgcctgccacaactttgtaaaagccaaaaaggaggttgaaaattcacaggctgcccgaaaaaagaagaaacttgcatgggggtttgaagcaaagaagagatgggaaaccaaaagcaacatgggatacatgtaacttgccagagtgcttcaagacatttgtagactcaaatgctcaatttactgagaatgttttcctgcctatgttaatatgtcagaaaattgatagcactaaaacaaaaataagcataaaatttgggattttgattatcagctcttttcagtctttctttaaggactttgtcctattgaagtgaataaaatgaagcattctgttatttgtataagaaatgtaagaaaaaaaatatagaaagaagaggataggattttgtttatttgtatggatggacccttggtataaaatcacttttggcgctttccattcatttggtttagcacagccagtgagcttctcgtactttctttcttttttttttttttttggagacagagcctcgcttgctctgtcacccaggctagagtgcagtagcacgatcttggctcactgcaaccactgcttcctgggttcaagtgattctcatgcctcagcctcctgagtagctgggattatggacaaatgccaccacacccggctaatttttttttttttttttgtatttttagtagagacagagttttgctgtgttggtcaggctggtcttgaactcctggcctcatatgattcacctgcctctgcctcccaaagttctgggagtacagacatgagctaccatgctgcccttgtattttcttatctgtacccagtgtaactacacgtttactggaactgtgtttttaagactgacagttgtttataatggattagtcgtaagtgccaaaaagtctcagttgatattatctttacaaatgacttgaccttaatgttataaaagtagttactgtttttttttaattggaggcagacttgatatttcagagttgcatagtaaaagcaatttgttaatttttgtgtactttcagataaactattacaataaagaaaggagcagaatgtagtatttggaagatgatttaaattcagcaacgcctaaaaatgtcttcctaagtatttttctcagccatgtcattctttaaattatgagatggttcttagaagagaaaatggtgtaattgtattaaacagacaattataactcaagataatataactttgaaccttctaagaactgatttgtttggttttcctcccattccccattcctccttaaaagattgaatgaattaatgagcagaaagagaggattggtaacatgggaaatcgttttcattagatgtacatttcctggttctgacaggaaaggggctccggaaaatcataaaacaagcaggtgaacaagaccaggtgtgtcggcacctccctgctcagtgcccagcggaggtaaagaaccactcagcatggtttttgtcagttcacctcttctgtcgttgtcagaggtttcctacctgtctgatataaactttctctgggttgataatataaattcagaaacatgtaaaatgaatcatgattatattactgttatttttagacttaaaatagtaacaaaattttatttatggtggcacatttaatggctttttttttctgtgttctggaataagagaatacctagctactatttaagcatccaaaaatcatatcttgctttcatttagttgagaaaagccagcatagagaaagcaaagttttagaatattatgtgtcatactaattcagtatccagaccaaatgttggaaagtcttattttatgatttaatatcccttgttccattttacagatatgatcatgtaaaacttacctacaatattcatttcaaactgctaaattaggtaaatacagacttttagtat

SEQ ID NO: 431256 - DNA, 2065 bp, Homo sapiens
agacatggctttcttacccacaagttctcaattatttgtataagtgtaattactgtattagctggaatatttattttcacttttttttttctcctttgtaattcttagcttggtgtaaaaattgccaaagcagttgcctgccacaactttgtaaaagccaaaaaggaggttgaaaattcacaggctgcccgaaaaaagaagaaacttgcatgggggtttgaagcaaagaagagatgggaaaccaaaagcaacatgggatacatgtaacttgccagagtgcttcaagacatttgtagactcaaatgctcaatttactgagaatgttttcctgcctatgttaatatgtcagaaaattgatagcactaaaacaaaaataagcataaaatttgggattttgattatcagctcttttcagtctttctttaaggactttgtcctattgaagtgaataaaatgaagcattctgttatttgtataagaaatgtaagaaaaaaaatatagaaagaagaggataggattttgtttatttgtatggatggacccttggtataaaatcacttttggcgctttccattcatttggtttagcacagccagtgagcttctcgtactttctttcttttttttttttttttggagacagagcctcgcttgctctgtcacccaggctagagtgcagtagcacgatcttggctcactgcaaccactgcttcctgggttcaagtgattctcatgcctcagcctcctgagtagctgggattatggacaaatgccaccacacccggctaatttttttttttttttttgtatttttagtagagacagagttttgctgtgttggtcaggctggtcttgaactcctggcctcatatgattcacctgcctctgcctcccaaagttctgggagtacagacatgagctaccatgctgcccttgtattttcttatctgtacccagtgtaactacacgtttactggaactgtgtttttaagactgacagttgtttataatggattagtcgtaagtgccaaaaagtctcagttgatattatctttacaaatgacttgaccttaatgttataaaagtagttactgtttttttttaattggaggcagacttgatatttcagagttgcatagtaaaagcaatttgttaatttttgtgtactttcagataaactattacaataaagaaaggagcagaatgtagtatttggaagatgatttaaattcagcaacgcctaaaaatgtcttcctaagtatttttctcagccatgtcattctttaaattatgagatggttcttagaagagaaaatggtgtaattgtattaaacagacaattataactcaagataatataactttgaaccttctaagaactgatttgtttggttttcctcccattccccattcctccttaaaagattgaatgaattaatgagcagaaagagaggattggtaacatgggaaatcgttttcattagatgtacatttcctggttctgacaggaaaggggctccggaaaatcataaaacaagcaggtgaacaagaccaggtgtgtcggcacctccctgctcagtgcccagcggaggtaaagaaccactcagcatggtttttgtcagttcacctcttctgtcgttgtcagaggtttcctacctgtctgatataaactttctctgggttgataatataaattcagaaacatgtaaaatgaatcatgattatattactgttatttttagacttaaaatagtaacaaaattttatttatggtggcacatttaatggctttttttttctgtgttctggaataagagaatacctagctactatttaagcatccaaaaatcatatcttgctttcatttagttgagaaaagccagcatagagaaagcaaagttttagaatattatgtgtcatactaattcagtatccagaccaaatgttggaaagtcttattttatgatttaatatcccttgttccattttacagatatgatcatgtaaaacttacctacaatattcatttcaaactgctaaattaggtaaatacagacttttagtat

SEQ ID NO: 431257 - DNA, 2009 bp, Homo sapiens
  misc_feature (57)..(57): n is a, c, g, or t
  misc_feature (61)..(61): n is a, c, g, or t
aaacagtaaaactcttttaaaaatttttaacaaaatataaaaaaactagaatgaganactnaaaaattgccctgaagttgcctgccacaactttgtaaaagccaaaaaggaggttgaaaattcacaggctgcccgaaaaaagaagaaacttgcatgggggtttgaagcaaagaagagatgggaaaccaaaagcaacatgggatacatgtaacttgccagagtgcttcaagacatttgtagactcaaatgctcaatttactgagaatgttttcctgcctatgttaatatgtcagaaaattgatagcactaaaacaaaaataagcataaaatttgggattttgattatcagctcttttcagtctttctttaaggactttgtcctattgaagtgaataaaatgaagcattctgttatttgtataagaaatgtaagaaaaaaaatatagaaagaagaggataggattttgtttatttgtatggatggacccttggtataaaatcacttttggcgctttccattcatttggtttagcacagccagtgagcttctcgtactttctttcttttttttttttttttggagacagagcctcgcttgctctgtcacccaggctagagtgcagtagcacgatcttggctcactgcaaccactgcttcctgggttcaagtgattctcatgcctcagcctcctgagtagctgggattatggacaaatgccaccacacccggctaatttttttttttttttttgtatttttagtagagacagagttttgctgtgttggtcaggctggtcttgaactcctggcctcatatgattcacctgcctctgcctcccaaagttctgggagtacagacatgagctaccatgctgcccttgtattttcttatctgtacccagtgtaactacacgtttactggaactgtgtttttaagactgacagttgtttataatggattagtcgtaagtgccaaaaagtctcagttgatattatctttacaaatgacttgaccttaatgttataaaagtagttactgtttttttttaattggaggcagacttgatatttcagagttgcatagtaaaagcaatttgttaatttttgtgtactttcagataaactattacaataaagaaaggagcagaatgtagtatttggaagatgatttaaattcagcaacgcctaaaaatgtcttcctaagtatttttctcagccatgtcattctttaaattatgagatggttcttagaagagaaaatggtgtaattgtattaaacagacaattataactcaagataatataactttgaaccttctaagaactgatttgtttggttttcctcccattccccattcctccttaaaagattgaatgaattaatgagcagaaagagaggattggtaacatgggaaatcgttttcattagatgtacatttcctggttctgacaggaaaggggctccggaaaatcataaaacaagcaggtgaacaagaccaggtgtgtcggcacctccctgctcagtgcccagcggaggtaaagaaccactcagcatggtttttgtcagttcacctcttctgtcgttgtcagaggtttcctacctgtctgatataaactttctctgggttgataatataaattcagaaacatgtaaaatgaatcatgattatattactgttatttttagacttaaaatagtaacaaaattttatttatggtggcacatttaatggctttttttttctgtgttctggaataagagaatacctagctactatttaagcatccaaaaatcatatcttgctttcatttagttgagaaaagccagcatagagaaagcaaagttttagaatattatgtgtcatactaattcagtatccagaccaaatgttggaaagtcttattttatgatttaatatcccttgttccattttacagatatgatcatgtaaaacttacctacaatattcatttcaaactgctaaattaggtaaatacagacttttagtat

SEQ ID NO: 431258 - DNA, 2023 bp, Homo sapiens
ttgtaatatcattccttattataagtagctcttacattcatttgaaaacacacaatcttggacttgaacgcaaaaattgcctttaacacagttgcctgccacaactttgtaaaagccaaaaaggaggttgaaaattcacaggctgcccgaaaaaagaagaaacttgcatgggggtttgaagcaaagaagagatgggaaaccaaaagcaacatgggatacatgtaacttgccagagtgcttcaagacatttgtagactcaaatgctcaatttactgagaatgttttcctgcctatgttaatatgtcagaaaattgatagcactaaaacaaaaataagcataaaatttgggattttgattatcagctcttttcagtctttctttaaggactttgtcctattgaagtgaataaaatgaagcattctgttatttgtataagaaatgtaagaaaaaaaatatagaaagaagaggataggattttgtttatttgtatggatggacccttggtataaaatcacttttggcgctttccattcatttggtttagcacagccagtgagcttctcgtactttctttcttttttttttttttttggagacagagcctcgcttgctctgtcacccaggctagagtgcagtagcacgatcttggctcactgcaaccactgcttcctgggttcaagtgattctcatgcctcagcctcctgagtagctgggattatggacaaatgccaccacacccggctaatttttttttttttttttgtatttttagtagagacagagttttgctgtgttggtcaggctggtcttgaactcctggcctcatatgattcacctgcctctgcctcccaaagttctgggagtacagacatgagctaccatgctgcccttgtattttcttatctgtacccagtgtaactacacgtttactggaactgtgtttttaagactgacagttgtttataatggattagtcgtaagtgccaaaaagtctcagttgatattatctttacaaatgacttgaccttaatgttataaaagtagttactgtttttttttaattggaggcagacttgatatttcagagttgcatagtaaaagcaatttgttaatttttgtgtactttcagataaactattacaataaagaaaggagcagaatgtagtatttggaagatgatttaaattcagcaacgcctaaaaatgtcttcctaagtatttttctcagccatgtcattctttaaattatgagatggttcttagaagagaaaatggtgtaattgtattaaacagacaattataactcaagataatataactttgaaccttctaagaactgatttgtttggttttcctcccattccccattcctccttaaaagattgaatgaattaatgagcagaaagagaggattggtaacatgggaaatcgttttcattagatgtacatttcctggttctgacaggaaaggggctccggaaaatcataaaacaagcaggtgaacaagaccaggtgtgtcggcacctccctgctcagtgcccagcggaggtaaagaaccactcagcatggtttttgtcagttcacctcttctgtcgttgtcagaggtttcctacctgtctgatataaactttctctgggttgataatataaattcagaaacatgtaaaatgaatcatgattatattactgttatttttagacttaaaatagtaacaaaattttatttatggtggcacatttaatggctttttttttctgtgttctggaataagagaatacctagctactatttaagcatccaaaaatcatatcttgctttcatttagttgagaaaagccagcatagagaaagcaaagttttagaatattatgtgtcatactaattcagtatccagaccaaatgttggaaagtcttattttatgatttaatatcccttgttccattttacagatatgatcatgtaaaacttacctacaatattcatttcaaactgctaaattaggtaaatacagacttttagtat

SEQ ID NO: 431259 - DNA, 2037 bp, Homo sapiens
cttcgttgaatgtttatcagattataaatatagaggcatttcttcatcctgtttaatgtttattttgtaatcattggagtatgtgaaaaatttttgtttgttttgctttggtctctaagtaaacatgttcagcaaagtatttttttttttaagaaataaattgagatttgtatgttcttccttttaggtttgaagcaaagaagagatgggaaaccaaaagcaacatgggatacatgtaacttgccagagtgcttcaagacatttgtagactcaaatgctcaatttactgagaatgttttcctgcctatgttaatatgtcagaaaattgatagcactaaaacaaaaataagcataaaatttgggattttgattatcagctcttttcagtctttctttaaggactttgtcctattgaagtgaataaaatgaagcattctgttatttgtataagaaatgtaagaaaaaaaatatagaaagaagaggataggattttgtttatttgtatggatggacccttggtataaaatcacttttggcgctttccattcatttggtttagcacagccagtgagcttctcgtactttctttcttttttttttttttttggagacagagcctcgcttgctctgtcacccaggctagagtgcagtagcacgatcttggctcactgcaaccactgcttcctgggttcaagtgattctcatgcctcagcctcctgagtagctgggattatggacaaatgccaccacacccggctaatttttttttttttttttgtatttttagtagagacagagttttgctgtgttggtcaggctggtcttgaactcctggcctcatatgattcacctgcctctgcctcccaaagttctgggagtacagacatgagctaccatgctgcccttgtattttcttatctgtacccagtgtaactacacgtttactggaactgtgtttttaagactgacagttgtttataatggattagtcgtaagtgccaaaaagtctcagttgatattatctttacaaatgacttgaccttaatgttataaaagtagttactgtttttttttaattggaggcagacttgatatttcagagttgcatagtaaaagcaatttgttaatttttgtgtactttcagataaactattacaataaagaaaggagcagaatgtagtatttggaagatgatttaaattcagcaacgcctaaaaatgtcttcctaagtatttttctcagccatgtcattctttaaattatgagatggttcttagaagagaaaatggtgtaattgtattaaacagacaattataactcaagataatataactttgaaccttctaagaactgatttgtttggttttcctcccattccccattcctccttaaaagattgaatgaattaatgagcagaaagagaggattggtaacatgggaaatcgttttcattagatgtacatttcctggttctgacaggaaaggggctccggaaaatcataaaacaagcaggtgaacaagaccaggtgtgtcggcacctccctgctcagtgcccagcggaggtaaagaaccactcagcatggtttttgtcagttcacctcttctgtcgttgtcagaggtttcctacctgtctgatataaactttctctgggttgataatataaattcagaaacatgtaaaatgaatcatgattatattactgttatttttagacttaaaatagtaacaaaattttatttatggtggcacatttaatggctttttttttctgtgttctggaataagagaatacctagctactatttaagcatccaaaaatcatatcttgctttcatttagttgagaaaagccagcatagagaaagcaaagttttagaatattatgtgtcatactaattcagtatccagaccaaatgttggaaagtcttattttatgatttaatatcccttgttccattttacagatatgatcatgtaaaacttacctacaatattcatttcaaactgctaaattaggtaaatacagacttttagtat

SEQ ID NO: 431260 - DNA, 2783 bp, Homo sapiens
gacgcaggagccaatgagaaggcgcgatgttgacggggtcctaagatggctgctgggcgaccacttcctgacagctccagttaatgggactgccagcaggctagacatccttcgccggaatgtgcagcgcttagttctgtgcccgggaggggcttctctctcttttgggattggagtgtggcattgccgccagaaagcctgcagaattccgggttgtgcagccaagcaggaacggtgtacctttctagacccatcctcttgcaatcttggaccctaagaaaagatgtggagtgggctgctacctcctggcctaaatgaaagtgacgctgagtcaaactcggaagatgaagctacgttggagaactctggacttaacttacaggaagataaagaggatgagagcatcagaaaaacagaaatcatagatttctcaacagatgaaccaaaaactgaaacagagtcaaatgtaaatgcctatgaagagtgtccttctggaattcccatagatatgtggaataaatttcaagaattgcataaaaaacattctgaacagaaaagcacaacctcaagattcagagggaaaagaagaaaacgctccagaaaagataaattgaagaatgaaaaagaattacatagtgaaccgtcctcaaatgaaacccagtggaaagagcttactcagtattttggagtcaatgatagatttgacccgcctgttaaaaggaaaaaagttgagaagtcaggccttgaaaagaggatagaccaggctgtggaggagtggaatattgagaaggctgaggaactcagcaaccagctagctactcgagagcttggtgtaaaaattgccaaagcagttgcctgccacaactttgtaaaagccaaaaaggaggttgaaaattcacaggctgcccgaaaaaagaagaaacttgcatgggggtttgaagcaaagaagagatgggaaaccaaaagcaacatgggatacatgtaacttgccagagtgcttcaagacatttgtagactcaaatgctcaatttactgagaatgttttcctgcctatgttaatatgtcagaaaattgatagcactaaaacaaaaataagcataaaatttgggattttgattatcagctcttttcagtctttctttaaggactttgtcctattgaagtgaataaaatgaagcattctgttatttgtataagaaatgtaagaaaaaaaatatagaaagaagaggataggattttgtttatttgtatggatggacccttggtataaaatcacttttggcgctttccattcatttggtttagcacagccagtgagcttctcgtactttctttcttttttttttttttttggagacagagcctcgcttgctctgtcacccaggctagagtgcagtagcacgatcttggctcactgcaaccactgcttcctgggttcaagtgattctcatgcctcagcctcctgagtagctgggattatggacaaatgccaccacacccggctaatttttttttttttttttgtatttttagtagagacagagttttgctgtgttggtcaggctggtcttgaactcctggcctcatatgattcacctgcctctgcctcccaaagttctgggagtacagacatgagctaccatgctgcccttgtattttcttatctgtacccagtgtaactacacgtttactggaactgtgtttttaagactgacagttgtttataatggattagtcgtaagtgccaaaaagtctcagttgatattatctttacaaatgacttgaccttaatgttataaaagtagttactgtttttttttaattggaggcagacttgatatttcagagttgcatagtaaaagcaatttgttaatttttgtgtactttcagataaactattacaataaagaaaggagcagaatgtagtatttggaagatgatttaaattcagcaacgcctaaaaatgtcttcctaagtatttttctcagccatgtcattctttaaattatgagatggttcttagaagagaaaatggtgtaattgtattaaacagacaattataactcaagataatataactttgaaccttctaagaactgatttgtttggttttcctcccattccccattcctccttaaaagattgaatgaattaatgagcagaaagagaggattggtaacatgggaaatcgttttcattagatgtacatttcctggttctgacaggaaaggggctccggaaaatcataaaacaagcaggtgaacaagaccaggtgtgtcggcacctccctgctcagtgcccagcggaggtaaagaaccactcagcatggtttttgtcagttcacctcttctgtcgttgtcagaggtttcctacctgtctgatataaactttctctgggttgataatataaattcagaaacatgtaaaatgaatcatgattatattactgttatttttagacttaaaatagtaacaaaattttatttatggtggcacatttaatggctttttttttctgtgttctggaataagagaatacctagctactatttaagcatccaaaaatcatatcttgctttcatttagttgagaaaagccagcatagagaaagcaaagttttagaatattatgtgtcatactaattcagtatccagaccaaatgttggaaagtcttattttatgatttaatatcccttgttccattttacagatatgatcatgtaaaacttacctacaatattcatttcaaactgctaaattaggtaaatacagacttttagtat

SEQ ID NO: 431261 - DNA, 2903 bp, Homo sapiens
gacgcaggagccaatgagaaggcgcgatgttgacggggtcctaagatggctgctgggcgaccacttcctgacagctccagttaatgggactgccagcaggctagacatccttcgccggaatgtgcagcgcttagttctgtgcccgggaggggcttctctctcttttgggattggagtgtggcattgccgccagaaagcctgcagaattccgggttgtgcagccaagcaggaacggtgtacctttctagacccatcctcttgcaatcttggaccctaagaaaagatgtggagtgggctgctacctcctggcctaaatgaaagtgacgctgagtcaaactcggaagatgaagctacgttggagaactctggacttaacttacaggaagataaagaggatgagagcatcagaaaaacagaaatcatagatttctcaacagatgaaccaaaaactgaaacagagtcaaatgtaaatgcctatgaagagtgtccttctggaattcccatagatatgtggaataaatttcaagaattgcataaaaaacattctgaacagaaaagcacaacctcaagattcagagggaaaagaagaaaacgctccagaaaagataaattgaagaatgaaaaagaattacatagtgaaccgtcctcaaatgaaacccagtggaaagagcttactcagtattttggagtcaatgatagatttgacccgcctgttaaaaggaaaaaagttgagaagtcaggccttgaaaagaggatagaccaggctgtggaggagtggaatattgagaaggctgaggaactcagcaaccagctagctactcgagagcttggtgtaaaaattgccaaagcagttgcctgccacaactttgtaaaagccaaaaaggaggttgaaaattcacaggctgcccgaaaaaagaagaaacttgcatgggggtttgaagcaaagaagagatgggaaaccaaaagcaacatgggatacatgtaacttgccagagtgcttcaagacatttgtagactcaaatgctcaatttactgagaatgttttcctgcctatgttaatatgtcagaaaattgatagcactaaaacaaaaataagcataaaatttgggattttgattatcagctcttttcagtctttctttaaggactttgtcctattgaagtgaataaaatgaagcattctgttatttgtataagaaatgtaagaaaaaaaatatagaaagaagaggataggattttgtttatttgtatggatggacccttggtataaaatcacttttggcgctttccattcatttggtttagcacagccagtgagcttctcgtactttctttcttttttttttttttttggagacagagcctcgcttgctctgtcacccaggctagagtgcagtagcacgatcttggctcactgcaaccactgcttcctgggttcaagtgattctcatgcctcagcctcctgagtagctgggattatggacaaatgccaccacacccggctaatttttttttttttttttgtatttttagtagagacagagttttgctgtgttggtcaggctggtcttgaactcctggcctcatatgattcacctgcctctgcctcccaaagttctgggagtacagacatgagctaccatgctgcccttgtattttcttatctgtacccagtgtaactacacgtttactggaactgtgtttttaagactgacagttgtttataatggattagtcgtaagtgccaaaaagtctcagttgatattatctttacaaatgacttgaccttaatgttataaaagtagttactgtttttttttaattggaggcagacttgatatttcagagttgcatagtaaaagcaatttgttaatttttgtgtactttcagataaactattacaataaagaaaggagcagaatgtagtatttggaagatgatttaaattcagcaacgcctaaaaatgtcttcctaagtatttttctcagccatgtcattctttaaattatgagatggttcttagaagagaaaatggtgtaattgtattaaacagacaattataactcaagataatataactttgaaccttctaagaactgatttgtttggttttcctcccattccccattcctccttaaaagattgaatgaattaatgagcagaaagagaggattggtaacatgggaaatcgttttcattagatgtacatttcctggttctgacaggaaaggggctccggaaaatcataaaacaagcaggtgaacaagaccaggtgtgtcggcacctccctgctcagtgcccagcggagatatgatcatgtaaaacttacctacaatattcatttcaaactgctaaattagagcatttagtgacccctgcaggcatgttgcacttcccatactgaagccttgccagagtggcctcctgtagggtctgacttgggatcctgtccagccaaggaagcccttcttcagcctgctccagtgcccgcagttgccccctcagcatcccctcggggttctcatgtagatgggaacattttaactacgcggaaggcaggcatttcagcagaattaagtatagcgggggctcatctaataaaggaagccacttctcccaagtcgtcactcctttctgggcatgggttgtggaaagctctaaaacgttatgtgtagcagaagaaggggttggagggaagatttgtggggacaggttgtcttggattggccctgctgacatgtcatttgagagcagttttattttatcctttctaataggaattaggtattttactcctagaaacattattccttgagtacgcatgctgctcaaaggatgtagtcatttgtccactccattctagtcacagcaaaataaggattctttttggatcagtaataact

SEQ ID NO: 431262 - DNA, 1121 bp, Homo sapiens
gacgcaggagccaatgagaaggcgcgatgttgacggggtcctaagatggctgctgggcgaccacttcctgacagctccagttaatgggactgccagcaggctagacatccttcgccggaatgtgcagcgcttagttctgtgcccgggaggggcttctctctcttttgggattggagtgtggcattgccgccagaaagcctgcagaattccgggttgtgcagccaagcaggaacggtgtacctttctagacccatcctcttgcaatcttggaccctaagaaaagatgtggagtgggctgctacctcctggcctaaatgaaagtgacgctgagtcaaactcggaagatgaagctacgttggagaactctggacttaacttacaggaagataaagaggatgagagcatcagaaaaacagaaatcatagatttctcaacagatgaaccaaaaactgaaacagagtcaaatgtaaatgcctatgaagagtgtccttctggaattcccatagatatgtggaataaatttcaagaattgcataaaaaacattctgaacagaaaagcacaacctcaagattcagagggaaaagaagaaaacgctccagaaaagataaattgaagaatgaaaaagaattacatagtgaaccgtcctcaaatgaaacccagtggaaagagcttactcagtattttggagtcaatgatagatttgacccgcctgttaaaaggaaaaaagttgagaagtcaggccttgaaaagaggatagaccaggctgtggaggagtggaatattgagaaggctgaggaactcagcaaccagctagctactcgagagcttggtgtaaaaattgccaaagcagttgcctgccacaactttgtaaaagccaaaaaggaggttgaaaattcacaggctgcccgaaaaaagaagaaacttgcatgggggtttgaagcaaagaagagatgggaaaccaaaagcaacatgggatacatgtaacttgccagagtgcttcaagacatttgtagactcaaatgctcaatttactgagaatgttttcctgcctatgttaatatgtcagaaaattgatagcactaaaacaaaaataagcataaaatttgggattttgattatc

SEQ ID NO: 431263 - DNA, 2772 bp, Homo sapiens
aaacttaggtaggtacgaggccggtggttaattcggccgagggctgggcgaacacttcctgacctccagttaatgggactgccagcaggctagacatccttcgccggaatgtgcagcgcttagttctgtgcccgggaggggcttctctctcttttgggattggagtgtggcattgccgccagaaagcctgcagaattccgggttgtgcagccaagcaggaacggtgtacctttctagacccatcctcttgcaatcttggaccctaagaaaagatgtggagtgggctgctacctcctggcctaaatgaaagtgacgctgagtcaaactcggaagatgaagctacgttggagaactctggacttaacttacaggaagataaagaggatgagagcatcagaaaaacagaaatcatagatttctcaacagatgaaccaaaaactgaaacagagtcaaatgtaaatgcctatgaagagtgtccttctggaattcccatagatatgtggaataaatttcaagaattgcataaaaaacattctgaacagaaaagcacaacctcaagattcagagggaaaagaagaaaacgctccagaaaagataaattgaagaatgaaaaagaattacatagtgaaccgtcctcaaatgaaacccagtggaaagagcttactcagtattttggagtcaatgatagatttgacccgcctgttaaaaggaaaaaagttgagaagtcaggccttgaaaagaggatagaccaggctgtggaggagtggaatattgagaaggctgaggaactcagcaaccagctagctactcgagagcttggtgtaaaaattgccaaagcagttgcctgccacaactttgtaaaagccaaaaaggaggttgaaaattcacaggctgcccgaaaaaagaagaaacttgcatgggggtttgaagcaaagaagagatgggaaaccaaaagcaacatgggatacatgtaacttgccagagtgcttcaagacatttgtagactcaaatgctcaatttactgagaatgttttcctgcctatgttaatatgtcagaaaattgatagcactaaaacaaaaataagcataaaatttgggattttgattatcagctcttttcagtctttctttaaggactttgtcctattgaagtgaataaaatgaagcattctgttatttgtataagaaatgtaagaaaaaaaatatagaaagaagaggataggattttgtttatttgtatggatggacccttggtataaaatcacttttggcgctttccattcatttggtttagcacagccagtgagcttctcgtactttctttcttttttttttttttttggagacagagcctcgcttgctctgtcacccaggctagagtgcagtagcacgatcttggctcactgcaaccactgcttcctgggttcaagtgattctcatgcctcagcctcctgagtagctgggattatggacaaatgccaccacacccggctaatttttttttttttttttgtatttttagtagagacagagttttgctgtgttggtcaggctggtcttgaactcctggcctcatatgattcacctgcctctgcctcccaaagttctgggagtacagacatgagctaccatgctgcccttgtattttcttatctgtacccagtgtaactacacgtttactggaactgtgtttttaagactgacagttgtttataatggattagtcgtaagtgccaaaaagtctcagttgatattatctttacaaatgacttgaccttaatgttataaaagtagttactgtttttttttaattggaggcagacttgatatttcagagttgcatagtaaaagcaatttgttaatttttgtgtactttcagataaactattacaataaagaaaggagcagaatgtagtatttggaagatgatttaaattcagcaacgcctaaaaatgtcttcctaagtatttttctcagccatgtcattctttaaattatgagatggttcttagaagagaaaatggtgtaattgtattaaacagacaattataactcaagataatataactttgaaccttctaagaactgatttgtttggttttcctcccattccccattcctccttaaaagattgaatgaattaatgagcagaaagagaggattggtaacatgggaaatcgttttcattagatgtacatttcctggttctgacaggaaaggggctccggaaaatcataaaacaagcaggtgaacaagaccaggtgtgtcggcacctccctgctcagtgcccagcggaggtaaagaaccactcagcatggtttttgtcagttcacctcttctgtcgttgtcagaggtttcctacctgtctgatataaactttctctgggttgataatataaattcagaaacatgtaaaatgaatcatgattatattactgttatttttagacttaaaatagtaacaaaattttatttatggtggcacatttaatggctttttttttctgtgttctggaataagagaatacctagctactatttaagcatccaaaaatcatatcttgctttcatttagttgagaaaagccagcatagagaaagcaaagttttagaatattatgtgtcatactaattcagtatccagaccaaatgttggaaagtcttattttatgatttaatatcccttgttccattttacagatatgatcatgtaaaacttacctacaatattcatttcaaactgctaaattaggtaaatacagacttttagtat

SEQ ID NO: 431264 - DNA, 2573 bp, Homo sapiens
gcgcatatctgggacagtcaggccgggtgtgaatcggccgaggctggggcgacacttcctgacagaagaaaagatgtggagtgggctgctacctcctggcctaaatgaaagtgacgctgagtcaaactcggaagatgaagctacgttggagaactctggacttaacttacaggaagataaagaggatgagagcatcagaaaaacagaaatcatagatttctcaacagatgaaccaaaaactgaaacagagtcaaatgtaaatgcctatgaagagtgtccttctggaattcccatagatatgtggaataaatttcaagaattgcataaaaaacattctgaacagaaaagcacaacctcaagattcagagggaaaagaagaaaacgctccagaaaagataaattgaagaatgaaaaagaattacatagtgaaccgtcctcaaatgaaacccagtggaaagagcttactcagtattttggagtcaatgatagatttgacccgcctgttaaaaggaaaaaagttgagaagtcaggccttgaaaagaggatagaccaggctgtggaggagtggaatattgagaaggctgaggaactcagcaaccagctagctactcgagagcttggtgtaaaaattgccaaagcagttgcctgccacaactttgtaaaagccaaaaaggaggttgaaaattcacaggctgcccgaaaaaagaagaaacttgcatgggggtttgaagcaaagaagagatgggaaaccaaaagcaacatgggatacatgtaacttgccagagtgcttcaagacatttgtagactcaaatgctcaatttactgagaatgttttcctgcctatgttaatatgtcagaaaattgatagcactaaaacaaaaataagcataaaatttgggattttgattatcagctcttttcagtctttctttaaggactttgtcctattgaagtgaataaaatgaagcattctgttatttgtataagaaatgtaagaaaaaaaatatagaaagaagaggataggattttgtttatttgtatggatggacccttggtataaaatcacttttggcgctttccattcatttggtttagcacagccagtgagcttctcgtactttctttcttttttttttttttttggagacagagcctcgcttgctctgtcacccaggctagagtgcagtagcacgatcttggctcactgcaaccactgcttcctgggttcaagtgattctcatgcctcagcctcctgagtagctgggattatggacaaatgccaccacacccggctaatttttttttttttttttgtatttttagtagagacagagttttgctgtgttggtcaggctggtcttgaactcctggcctcatatgattcacctgcctctgcctcccaaagttctgggagtacagacatgagctaccatgctgcccttgtattttcttatctgtacccagtgtaactacacgtttactggaactgtgtttttaagactgacagttgtttataatggattagtcgtaagtgccaaaaagtctcagttgatattatctttacaaatgacttgaccttaatgttataaaagtagttactgtttttttttaattggaggcagacttgatatttcagagttgcatagtaaaagcaatttgttaatttttgtgtactttcagataaactattacaataaagaaaggagcagaatgtagtatttggaagatgatttaaattcagcaacgcctaaaaatgtcttcctaagtatttttctcagccatgtcattctttaaattatgagatggttcttagaagagaaaatggtgtaattgtattaaacagacaattataactcaagataatataactttgaaccttctaagaactgatttgtttggttttcctcccattccccattcctccttaaaagattgaatgaattaatgagcagaaagagaggattggtaacatgggaaatcgttttcattagatgtacatttcctggttctgacaggaaaggggctccggaaaatcataaaacaagcaggtgaacaagaccaggtgtgtcggcacctccctgctcagtgcccagcggaggtaaagaaccactcagcatggtttttgtcagttcacctcttctgtcgttgtcagaggtttcctacctgtctgatataaactttctctgggttgataatataaattcagaaacatgtaaaatgaatcatgattatattactgttatttttagacttaaaatagtaacaaaattttatttatggtggcacatttaatggctttttttttctgtgttctggaataagagaatacctagctactatttaagcatccaaaaatcatatcttgctttcatttagttgagaaaagccagcatagagaaagcaaagttttagaatattatgtgtcatactaattcagtatccagaccaaatgttggaaagtcttattttatgatttaatatcccttgttccattttacagatatgatcatgtaaaacttacctacaatattcatttcaaactgctaaattaggtaaatacagacttttagtat

SEQ ID NO: 431265 - DNA, 2890 bp, Homo sapiens
gacgcaggagccaatgagaaggcgcgatgttgacggggtcctaagatggctgctgggcgaccacttcctgacagctccagttaatgggactgccagcaggctagacatccttcgccggaatgtgcagcgcttagttctgtgcccgggaggggcttctctctcttttgggattggagtgtggcattgccgccagaaagcctgcagaattccgggttgtgcagccaagcaggaacggtgtacctttctagacccatcctcttgcaatcttggaccctaagaaaagatgtggagtgggctgctacctcctggcctaaatgaaagtgacgctgagtcaaactcggaagatgaagctacgttggagaactctggacttaacttacaggaagataaagaggatgagagcatcagaaaaacagaaatcatagatttctcaacagatgaaccaaaaactgaaacagagtcaaatgtaaatgcctatgaagagtgtccttctggaattcccatagatatgtggaataaatttcaagaattgcataaaaaacattctgaacagaaaagcacaacctcaagattcagagggaaaagaagaaaacgctccagaaaagataaattgaagaatgaaaaagaattacatagtgaaccgtcctcaaatgaaacccagtggaaagagcttactcagtattttggagtcaatgatagatttgacccgcctgttaaaaggaaaaaagttgagaagtcaggccttgaaaagaggatagaccaggctgtggaggagtggaatattgagaaggctgaggaactcagcaaccagctagctactcgagaggaaaatcatgggagtaatgttgtgtgtttctcagtgtcagcgatccagagactcgtgctgtctctttgtccctttcctgatggtgttacttcgattaactacttcagcttggtgtaaaaattgccaaagcagttgcctgccacaactttgtaaaagccaaaaaggaggttgaaaattcacaggctgcccgaaaaaagaagaaacttgcatgggggtttgaagcaaagaagagatgggaaaccaaaagcaacatgggatacatgtaacttgccagagtgcttcaagacatttgtagactcaaatgctcaatttactgagaatgttttcctgcctatgttaatatgtcagaaaattgatagcactaaaacaaaaataagcataaaatttgggattttgattatcagctcttttcagtctttctttaaggactttgtcctattgaagtgaataaaatgaagcattctgttatttgtataagaaatgtaagaaaaaaaatatagaaagaagaggataggattttgtttatttgtatggatggacccttggtataaaatcacttttggcgctttccattcatttggtttagcacagccagtgagcttctcgtactttctttcttttttttttttttttggagacagagcctcgcttgctctgtcacccaggctagagtgcagtagcacgatcttggctcactgcaaccactgcttcctgggttcaagtgattctcatgcctcagcctcctgagtagctgggattatggacaaatgccaccacacccggctaatttttttttttttttttgtatttttagtagagacagagttttgctgtgttggtcaggctggtcttgaactcctggcctcatatgattcacctgcctctgcctcccaaagttctgggagtacagacatgagctaccatgctgcccttgtattttcttatctgtacccagtgtaactacacgtttactggaactgtgtttttaagactgacagttgtttataatggattagtcgtaagtgccaaaaagtctcagttgatattatctttacaaatgacttgaccttaatgttataaaagtagttactgtttttttttaattggaggcagacttgatatttcagagttgcatagtaaaagcaatttgttaatttttgtgtactttcagataaactattacaataaagaaaggagcagaatgtagtatttggaagatgatttaaattcagcaacgcctaaaaatgtcttcctaagtatttttctcagccatgtcattctttaaattatgagatggttcttagaagagaaaatggtgtaattgtattaaacagacaattataactcaagataatataactttgaaccttctaagaactgatttgtttggttttcctcccattccccattcctccttaaaagattgaatgaattaatgagcagaaagagaggattggtaacatgggaaatcgttttcattagatgtacatttcctggttctgacaggaaaggggctccggaaaatcataaaacaagcaggtgaacaagaccaggtgtgtcggcacctccctgctcagtgcccagcggaggtaaagaaccactcagcatggtttttgtcagttcacctcttctgtcgttgtcagaggtttcctacctgtctgatataaactttctctgggttgataatataaattcagaaacatgtaaaatgaatcatgattatattactgttatttttagacttaaaatagtaacaaaattttatttatggtggcacatttaatggctttttttttctgtgttctggaataagagaatacctagctactatttaagcatccaaaaatcatatcttgctttcatttagttgagaaaagccagcatagagaaagcaaagttttagaatattatgtgtcatactaattcagtatccagaccaaatgttggaaagtcttattttatgatttaatatcccttgttccattttacagatatgatcatgtaaaacttacctacaatattcatttcaaactgctaaattaggtaaatacagacttttagtat

SEQ ID NO: 431266 - DNA, 899 bp, Homo sapiens
gacgcaggagccaatgagaaggcgcgatgttgacggggtcctaagatggctgctgggcgaccacttcctgacagctccagttaatgggactgccagcaggctagacatccttcgccggaatgtgcagcgcttagttctgtgcccgggaggggcttctctctcttttgggattggagtgtggcattgccgccagaaagcctgcagaattccgggttgtgcagccaagcaggaacggtgtacctttctagacccatcctcttgcaatcttggaccctaagaaaagatgtggagtgggctgctacctcctggcctaaatgaaagtgacgctgagtcaaactcggaagatgaagctacgttggagaactctggacttaacttacaggaagataaagaggatgagagcatcagaaaaacagaaatcatagatttctcaacagatgaaccaaaaactgaaacagagtcaaatgtaaatgcctatgaagagtgtccttctggaattcccatagatatgtggaataaatttcaagaattgcataaaaaacattctgaacagaaaagcacaacctcaagattcagagggaaaagaagaaaacgctccagaaaaggtgttttgttttaactcaggttgttcgtcgtgctaatgctaagttgtgactgagtttaaccatttttttaaaatatggttttgaaattactgaagttaggtattgacactttgtgaattcttttcagataaattgaagaatgaaaaagaattacataggtaggtagaatttaaaatagttatctattttaggccattgtagaaattgttgaactaattgtttctgatagtaatcaaacatatgaactagtaattgtagtataattgtagtaaccgattaaaaacagtaaaagta

SEQ ID NO: 431267 - DNA, 2189 bp, Homo sapiens
aattgaatcatgggtgcggtttcccccatcctattctcgtggtagtgagtaagtctcacgagatctgatggttttataagggattttccctttcacttggccctcattcgctcctgcctgccaccatgtaaggcaaacagattaccagaaatacagcagccactttgcagaaaggaaggattatgtcaaatagttagaagattcccagaactgcaacttccagtgagtccctctgtgtgtctggatcagggaatgcaattaaagccgagtacttcgagtcaccttttaaaaacagtgaagccacgtgtgtggaaaccaggggactggagtcgtgaacagctgaatgaaacgacagtccttgctccacatgaaacaatctttcgagccgaagatctatctgtgattcttaaagcgtatgtgttggtgacgtccttaacccctttgcgtgcattcattcattcgacgggcacagtttggaatccaccaaagaaaaaacgcttcactgtcaagctgcaaacattttttgagacattcctgagagccagttcacctcaacaggcttttgacattatgaaggaagcaattggcaaactactgctagcggctgaagtattcagtgaaacatctactctgggaccaaagaccttccatagatgcagattctgctttcaacttctaacttttgatattggttatggcagtttcatgtaccctgtagtgctccaggtacacgagcatttaaattttcaagattatgataatatggattttgaggaccaaaatacagaagaattccttttaaatgacactttcaattttctcttccctaatgaatcatcactttccatattttctgagatatttcagagactttatagatcagatgttttcaagggtgaaaactatcaaaaggaactaaatcagtgtctgtccttagaagaaattaactcaattatgactttcataaaggaacttggaagtctgggacaattccaactgctcttcccatctactactcctgggattcagtcactgatgcatgaattttatgatgtggcaaatcctgtgggaaatcctggctcagtcctgacccaatactggtctcttttaaatgtatttgaacaatttcagttcatgaataaaaagacacagccacatccactggaatggaattctttcacagaagataagaacattgaaaaaccacaagtgccatttgatgcaatagaaaataaaaaagctgcagttccacaaattaaaaatgaaaataaagaaatacattgcagtgatgatgaaaacacaccatgtcatatcaagcagatcttcacacatccacatttggaactaaatcctgactttcatccaaagatcaaagattattactgtgaagtcccatttgatgtggtaacagtgacaattggagtggaaactcctaagtgtctgtgcaaggtgcacctgtacgagcaggcagggccaagctttgccagctaccctctgggcttaggaatgaacaaaatctcaatatttgttgtggatgaatctccagcacacggtgagactctgatcacgtacaaactcaccatctatagagaagaccgcccaagtctgcccttgtttgaggccttcacagcatgtggttttgtgcaggattgtggtttgctgattcatccagaggaaacctgtgggttacagcctatttcttctgactacattgaagccattttacagtctgaactaaaaagatgtccatctggggacatgaaaggccagtggattgtgccttgccttagttgttcggacaacaggacgtgtgactggagagaaataacctggcagccccacaactgccaatatggtgtcctaactaagcctcaactccagcagtgcctgggaggaaggaagttgggtgtcgatgtccagagagttcctagaagccgtaattgaagacacaatccagtcatcctgggaccctaaatgacctccctgccccacccctgcacataaacctgacttgaatcacctggactatttttctgagagagtaataaactttaattgggtttgacctattccaagttttttgggctatctgttacagtgcttagcttatctcacctaatacagggactatgcaaccaagaaactggaaataaaaacaaagataattaaaccattttataataagccta

SEQ ID NO: 431268 - DNA, 1508 bp, Homo sapiens
tgtacatttcaacccaagtcttttagtattcgttcacctttcatttgaggagaagctaagtgctgactgccagaggatggaataggaagacaatggtacatcaatattgaaaaggagaaaaaccaatgacattccactggcaagtagaagttgtcctttcattctttaccaggagaaaatgtgatgtttatgatggcttaggcttgtgaatctaatgcttatgaaaaacatttcttcctatactttttaaattttattactgaaaggaaaagaacaggaatgttccacaagggaatttgaagagattctgtgagagagatatgaaatattttatagttaaaacaccaatatattcaactttacacttcttgtgtttttcataaacattccctcttgtcttatctgtgtacttcgatgggtaactgcagtctgaattaatgaaatatgtaattttaaagtaagtaacaaaatgtagttcctcatgtattactgtactatgtttcattgatgatattacttaaatcttgtgtttgccattacagccctatgtaacttaaaattacaattatattttatgtaaatattttgcaaaggactatgcattctgaaatgcataggtgctttttcccaccaagcatttgcatatgtccacaaatagtattatgttactagtatctatattttgattttcctgagcaactgtatcaaatccaaatttagattagacaaaaaattattattttaattaaactgtggcatacatataatacatacctaattatagtagtgagaactatttcttttatctctttaggttcaaaatggtgaatttctttattatatgaatgctttgttgtgagataacatcacactgttacaatggattttagaggttgtctttttgggtggggtgggaagctgagagggttaattcaatacatggctgaaattaccaaatgtataaatacctcattttcactaccatacaagaaaaaaacacctattttgattgatcagttcttttgtatgaatatccacctcctttaaatactctatttttatatatatttttatatgaagataaacatgaatttatatttaactgtcttaaattatatttacataaatgcaaatatcacttgatataaacaatacaaatctgcatcttacagatgataatttttttagaagaatgatacagaattaactttaaaaataaaacttttctaatatacacttaaatgcaaacatcatttttaaattttcagtgatttttttaatgacataaaacgttaccaatgtgtgcagcctctccatcatgttttaacatactgtatactctatagcagtattacagtcagtatttcatataattttctttagacctaactgttaccatctgactgaggttactctggtatttatctcttcgctgctgaaataataatggattttagaaacaattgtaataatatcattaataaatgtcttactagtaatagtctgtg

SEQ ID NO: 431269 - DNA, 5802 bp, Homo sapiens
gcgatgccgaggtcctctgctcccgccgggcgtgcagcgggcgcgcgcgcgtgtgtttatgtgtctgtgtgcgtgtgtgtgtgtgtctctctctgtgtgtgtgtgagatgaattggagtcatacgactgggtgtttccttccgagtggttttcatcagcaatccattaggaaatcatggaaactttttttttcctggctaaaaggatgaaaactgagtaagtacatagaactttgaacttgagacggaatgaaacaaattcaagcaaaaaccctgacagtaaccatgtccattcaaattgcgtatgccctttttatgttaaaagccgtgaatacttacaggacagtgggaatttaaaactaaatgaagggaagcatacaaaaggctgaaagcaagactgctttaaaaccggaggaaaattgaggaactgctaaggcaacctggcctgagttcagctgtgcaacaggcactttgggttttaatcttttgcgttcttcaatgctgttttcagactccagatatactttggtattgttttctctcttcctgcaaagctgaggcagagtcggactcctttactgtgagttgaaagatgtgagaataaggcattgctggaagcaacagtttggcagcctggggtacactcaggttattcgttacaactattattatttgatgtctttttttaaactcaggtcatccacttttgactgtcatccatggaagagctcttattaaaagcctcagactttcgggacctatgattctttggcacaaccttttggaaaattcttaagcagggatgaagcaaacttgattggagttggggaaaaagaagacagattagtatttttcatgctgacaaaaaatagctgctatgacttttcccgcaacgtggacaggggccaagtgaagctgaactggtcatggtctgtcgcccagtgttcccttgtcgtcggcgattttgcccccgacccttcttggtgggcttagtggtggcaatctgtctcttctaccagactctgaccctccgagggtcgaggaagctcacagccgctgcccctggggctgtcccacacacatccactgaaacccaggcaagcagatgcaagaaaggattctctcaggacaaacagtgcttccttctctctggtaatgcccaggaaaccagaaaggtcaaagaatcaatggagacacactttggcagccatggccgaagggccatactctacaggcctcctttctacagcaaaacagagcttcagctacaccagcacattctgactcaacatggctatacggttgtcatcgctgaagaaaggctcaatgctggcctagggccggggctactagaacaaggtgatctgggctcttgggatctgctcatttgcctgtcttctaagaaagcagaaggaacaccctgtatatccaaggaagtcatgtgccagttaggtttacatcaaaaggcaaacagattaccagaaatacagcagccactttgcagaaaggaaggattatgtcaaatagttagaagattcccagaactgcaacttccagtgagtccctctgtgtgtctggatcagggaatgcaattaaagccgagtacttcgagtcaccttttaaaaacagtgaagccacgtgtgtggaaaccaggggactggagtcgtgaacagctgaatgaaacgacagtccttgctccacatgaaacaatctttcgagccgaagatctatctgtgattcttaaagcgtatgtgttggtgacgtccttaacccctttgcgtgcattcattcattcgacgggcacagtttggaatccaccaaagaaaaaacgcttcactgtcaagctgcaaacattttttgagacattcctgagagccagttcacctcaacaggcttttgacattatgaaggaagcaattggcaaactactgctagcggctgaagtattcagtgaaacatctactctgggaccaaagaccttccatagatgcagattctgctttcaacttctaacttttgatattggttatggcagtttcatgtaccctgtagtgctccaggtacacgagcatttaaattttcaagattatgataatatggattttgaggaccaaaatacagaagaattccttttaaatgacactttcaattttctcttccctaatgaatcatcactttccatattttctgagatatttcagagactttatagatcagatgttttcaagggtgaaaactatcaaaaggaactaaatcagtgtctgtccttagaagaaattaactcaattatgactttcataaaggaacttggaagtctgggacaattccaactgctcttcccatctactactcctgggattcagtcactgatgcatgaattttatgatgtggcaaatcctgtgggaaatcctggctcagtcctgacccaatactggtctcttttaaatgtatttgaacaatttcagttcatgaataaaaagacacagccacatccactggaatggaattctttcacagaagataagaacattgaaaaaccacaagtgccatttgatgcaatagaaaataaaaaagctgcagttccacaaattaaaaatgaaaataaagaaatacattgcagtgatgatgaaaacacaccatgtcatatcaagcagatcttcacacatccacatttggaactaaatcctgactttcatccaaagatcaaagattattactgtgaagtcccatttgatgtggtaacagtgacaattggagtggaaactcctaagtgtctgtgcaaggtgcacctgtacgagcaggcagggccaagctttgccagctaccctctgggcttaggaatgaacaaaatctcaatatttgttgtggatgaatctccagcacacggtgagactctgatcacgtacaaactcaccatctatagagaagaccgcccaagtctgcccttgtttgaggccttcacagcatgtggttttgtgcaggattgtggtttgctgattcatccagaggaaacctgtgggttacagcctatttcttctgactacattgaagccattttacagtctgaactaaaaagatgtccatctggggacatgaaaggccagtggattgtgccttgccttagttgttcggacaacaggacgtgtgactggagagaaataacctggcagccccacaactgccaatatggtgtcctaactaagcctcaactccagcagtgcctgggaggaaggaagattctgttcattggagattcaaccaacagagggatcatgtactatcttattgaaaggctgaatgaaacgttgcaggaatggcagaaagtacatggcactaaattctatcacaacgtcaatggtgggaagactttgatcagttattcctactatccccagttctggataagcccttcattgagaccaacatttgaaaatgcacttgaacacctcttgcaaagatcacgtcccctagagaatactggccagactgtattggttgttggtggtgttcagtggcttaattccaatcacctgcaaattattcacaaagttttgaagagggaaaatttactcaatatcctagtgatcatcaaaactttgggaattggatttcatctgccagtggatggagtacatttcttaacacagagtgaagtacagaacttatggaaagaaaatttgattattctggatactgcaaaaaaacatggctatgaagtagttgacacattcactataacaatggggcgttacaaagagtttctacaggggaagtgtggatgtcatttccatgaggtagtgaaatcaaagttatccaaagaatataactttattaaaatgaaaagatcaagaaatcatatcatgggaagatatttcagcaatcaaagcaaactacaacaaggcactgtaacaaattttcgatcgccatatcatgtcagaggtccaataaatcaggtttgttctgaaatccttctcagcaggatgtgtgcaaataaaaggactatgtaggctccctgcaggagagctgaatctggagctggagacgagctagtcacccggacaatggtctaggagccaagcgctgcacatcgcacacatttgggatcgaccacacacacttgtgcacaccagcacatgcatgcacaccagtacacacacagttaaataatgataacacttcttacagctttatgaattcaagatgtgaccttgaacaccagtccatttcacagtgaaagatatacctagagaaacgttacttgaagcataattattaaccagaaccactgtgggccaggtatggcattatgataataaagagaaatatagacacttaaaattatgtgaaaaaaaggataatgctctttcatgttgtcttaccatatctataggtacatcaatattgaaaaggagaaaaaccaatgacattccactggcaagtagaagttgtcctttcattctttaccaggagaaaatgtgatgtttatgatggcttaggcttgtgaatctaatgcttatgaaaaacatttcttcctatactttttaaattttattactgaaaggaaaagaacaggaatgttccacaagggaatttgaagagattctgtgagagagatatgaaatattttatagttaaaacaccaatatattcaactttacacttcttgtgtttttcataaacattccctcttgtcttatctgtgtacttcgatgggtaactgcagtctgaattaatgaaatatgtaattttaaagtaagtaacaaaatgtagttcctcatgtattactgtactatgtttcattgatgatattacttaaatcttgtgtttgccattacagccctatgtaacttaaaattacaattatattttatgtaaatattttgcaaaggactatgcattctgaaatgcataggtgctttttcccaccaagcatttgcatatgtccacaaatagtattatgttactagtatctatattttgattttcctgagcaactgtatcaaatccaaatttagattagacaaaaaattattattttaattaaactgtggcatacatataatacatacctaattatagtagtgagaactatttcttttatctctttaggttcaaaatggtgaatttctttattatatgaatgctttgttgtgagataacatcacactgttacaatggattttagaggttgtctttttgggtggggtgggaagctgagagggttaattcaatacatggctgaaattaccaaatgtataaatacctcattttcactaccatacaagaaaaaaacacctattttgattgatcagttcttttgtatgaatatccacctcctttaaatactctatttttatatatatttttatatgaagataaacatgaatttatatttaactgtcttaaattatatttacataaatgcaaatatcacttgatataaacaatacaaatctgcatcttacagatgataatttttttagaagaatgatacagaattaactttaaaaataaaacttttctaatatacacttaaatgcaaacatcatttttaaattttcagtgatttttttaatgacataaaacgttaccaatgtgtgcagcctctccatcatgttttaacatactgtatactctatagcagtattacagtcagtatttcatataattttctttagacctaactgttaccatctgactgaggttactctggtatttatctcttcgctgctgaaataataatggattttagaaacaattgtaataatatcattaataaatgtcttactagtaatagtctgtg

SEQ ID NO: 431270 - DNA, 5324 bp, Homo sapiens
gcgatgccgaggtcctctgctcccgccgggcgtgcagcgggcgcgcgcgcgtgtgtttatgtgtctgtgtgcgtgtgtgtgtgtgtctctctctgtgtgtgtgtgagatgaattggagtcatacgactgggtgtttccttccgagtggttttcatcagcaatccattaggaaatcatggaaactttttttttcctggctaaaaggatgaaaactgagtcatccacttttgactgtcatccatggaagagctcttattaaaagcctcagactttcgggacctatgattctttggcacaaccttttggaaaattcttaagcagggatgaagcaaacttgattggagttggggaaaaagaagacagattagtatttttcatgctgacaaaaaatagctgctatgacttttcccgcaacgtggacaggggccaagtgaagctgaactggtcatggtctgtcgcccagtgttcccttgtcgtcggcgattttgcccccgacccttcttggtgggcttagtggtggcaatctgtctcttctaccagactctgaccctccgagggtcgaggaagctcacagccgctgcccctggggctgtcccacacacatccactgaaacccaggcaagcagatgcaagaaaggattctctcaggacaaacagtgcttccttctctctggtaatgcccaggaaaccagaaaggtcaaagaatcaatggagacacactttggcagccatggccgaagggccatactctacaggcctcctttctacagcaaaacagagcttcagctacaccagcacattctgactcaacatggctatacggttgtcatcgctgaagaaaggctcaatgctggcctagggccggggctactagaacaaggtgatctgggctcttgggatctgctcatttgcctgtcttctaagaaagcagaaggaacaccctgtatatccaaggaagtcatgtgccagttaggtttacatcaaaaggcaaacagattaccagaaatacagcagccactttgcagaaaggaaggattatgtcaaatagttagaagattcccagaactgcaacttccagtgagtccctctgtgtgtctggatcagggaatgcaattaaagccgagtacttcgagtcaccttttaaaaacagtgaagccacgtgtgtggaaaccaggggactggagtcgtgaacagctgaatgaaacgacagtccttgctccacatgaaacaatctttcgagccgaagatctatctgtgattcttaaagcgtatgtgttggtgacgtccttaacccctttgcgtgcattcattcattcgacgggcacagtttggaatccaccaaagaaaaaacgcttcactgtcaagctgcaaacattttttgagacattcctgagagccagttcacctcaacaggcttttgacattatgaaggaagcaattggcaaactactgctagcggctgaagtattcagtgaaacatctactctgggaccaaagaccttccatagatgcagattctgctttcaacttctaacttttgatattggttatggcagtttcatgtaccctgtagtgctccaggtacacgagcatttaaattttcaagattatgataatatggattttgaggaccaaaatacagaagaattccttttaaatgacactttcaattttctcttccctaatgaatcatcactttccatattttctgagatatttcagagactttatagatcagatgttttcaagggtgaaaactatcaaaaggaactaaatcagtgtctgtccttagaagaaattaactcaattatgactttcataaaggaacttggaagtctgggacaattccaactgctcttcccatctactactcctgggattcagtcactgatgcatgaattttatgatgtggcaaatcctgtgggaaatcctggctcagtcctgacccaatactggtctcttttaaatgtatttgaacaatttcagttcatgaataaaaagacacagccacatccactggaatggaattctttcacagaagataagaacattgaaaaaccacaagtgccatttgatgcaatagaaaataaaaaagctgcagttccacaaattaaaaatgaaaataaagaaatacattgcagtgatgatgaaaacacaccatgtcatatcaagcagatcttcacacatccacatttggaactaaatcctgactttcatccaaagatcaaagattattactgtgaagtcccatttgatgtggtaacagtgacaattggagtggaaactcctaagtgtctgtgcaaggtgcacctgtacgagcaggcagggccaagctttgccagctaccctctgggcttaggaatgaacaaaatctcaatatttgttgtggatgaatctccagcacacggtgagactctgatcacgtacaaactcaccatctatagagaagaccgcccaagtctgcccttgtttgaggccttcacagcatgtggttttgtgcaggattgtggtttgctgattcatccagaggaaacctgtgggttacagcctatttcttctgactacattgaagccattttacagtctgaactaaaaagatgtccatctggggacatgaaaggccagtggattgtgccttgccttagttgttcggacaacaggacgtgtgactggagagaaataacctggcagccccacaactgccaatatggtgtcctaactaagcctcaactccagcagtgcctgggaggaaggaagattctgttcattggagattcaaccaacagagggatcatgtactatcttattgaaaggctgaatgaaacgttgcaggaatggcagaaagtacatggcactaaattctatcacaacgtcaatggtgggaagactttgatcagttattcctactatccccagttctggataagcccttcattgagaccaacatttgaaaatgcacttgaacacctcttgcaaagatcacgtcccctagagaatactggccagactgtattggttgttggtggtgttcagtggcttaattccaatcacctgcaaattattcacaaagttttgaagagggaaaatttactcaatatcctagtgatcatcaaaactttgggaattggatttcatctgccagtggatggagtacatttcttaacacagagtgaagtacagaacttatggaaagaaaatttgattattctggatactgcaaaaaaacatggctatgaagtagttgacacattcactataacaatggggcgttacaaagagtttctacaggggaagtgtggatgtcatttccatgaggtagtgaaatcaaagttatccaaagaatataactttattaaaatgaaaagatcaagaaatcatatcatgggaagatatttcagcaatcaaagcaaactacaacaaggcactgtaacaaattttcgatcgccatatcatgtcagaggtccaataaatcaggtttgttctgaaatccttctcagcaggatgtgtgcaaataaaaggactatgtaggctccctgcaggagagctgaatctggagctggagacgagctagtcacccggacaatggtctaggagccaagcgctgcacatcgcacacatttgggatcgaccacacacacttgtgcacaccagcacatgcatgcacaccagtacacacacagttaaataatgataacacttcttacagctttatgaattcaagatgtgaccttgaacaccagtccatttcacagtgaaagatatacctagagaaacgttacttgaagcataattattaaccagaaccactgtgggccaggtatggcattatgataataaagagaaatatagacacttaaaattatgtgaaaaaaaggataatgctctttcatgttgtcttaccatatctataggtacatcaatattgaaaaggagaaaaaccaatgacattccactggcaagtagaagttgtcctttcattctttaccaggagaaaatgtgatgtttatgatggcttaggcttgtgaatctaatgcttatgaaaaacatttcttcctatactttttaaattttattactgaaaggaaaagaacaggaatgttccacaagggaatttgaagagattctgtgagagagatatgaaatattttatagttaaaacaccaatatattcaactttacacttcttgtgtttttcataaacattccctcttgtcttatctgtgtacttcgatgggtaactgcagtctgaattaatgaaatatgtaattttaaagtaagtaacaaaatgtagttcctcatgtattactgtactatgtttcattgatgatattacttaaatcttgtgtttgccattacagccctatgtaacttaaaattacaattatattttatgtaaatattttgcaaaggactatgcattctgaaatgcataggtgctttttcccaccaagcatttgcatatgtccacaaatagtattatgttactagtatctatattttgattttcctgagcaactgtatcaaatccaaatttagattagacaaaaaattattattttaattaaactgtggcatacatataatacatacctaattatagtagtgagaactatttcttttatctctttaggttcaaaatggtgaatttctttattatatgaatgctttgttgtgagataacatcacactgttacaatggattttagaggttgtctttttgggtggggtgggaagctgagagggttaattcaatacatggctgaaattaccaaatgtataaatacctcattttcactaccatacaagaaaaaaacacctattttgattgatcagttcttttgtatgaatatccacctcctttaaatactctatttttatatatatttttatatgaagataaacatgaatttatatttaactgtcttaaattatatttacataaatgcaaatatcacttgatataaacaatacaaatctgcatcttacagatgataatttttttagaagaatgatacagaattaactttaaaaataaaacttttctaatatacacttaaatgcaaacatcatttttaaattttcagtgatttttttaatgacataaaacgttaccaatgtgtgcagcctctccatcatgttttaacatactgtatactctatagcagtattacagtcagtatttcatataattttctttagacctaactgttaccatctgactgaggttactctggtatttatctcttcgctgctgaaataataatggattttagaaacaattgtaataatatcattaataaatgtcttactagtaatagtctgtg

SEQ ID NO: 431271 - DNA, 5000 bp, Homo sapiens
gcgatgccgaggtcctctgctcccgccgggcgtgcagcgggcgcgcgcgcgtgtgtttatgtgtctgtgtgcgtgtgtgtgtgtgtctctctctgtgtgtgtgtgagatgaattggagtcatacgactgggtgtttccttccgagtggttttcatcagcaatccattaggaaatcatggaaactttttttttcctggctaaaaggatgaaaactgaactctgaccctccgagggtcgaggaagctcacagccgctgcccctggggctgtcccacacacatccactgaaacccaggcaagcagatgcaagaaaggattctctcaggacaaacagtgcttccttctctctggtaatgcccaggaaaccagaaaggtcaaagaatcaatggagacacactttggcagccatggccgaagggccatactctacaggcctcctttctacagcaaaacagagcttcagctacaccagcacattctgactcaacatggctatacggttgtcatcgctgaagaaaggctcaatgctggcctagggccggggctactagaacaaggtgatctgggctcttgggatctgctcatttgcctgtcttctaagaaagcagaaggaacaccctgtatatccaaggaagtcatgtgccagttaggtttacatcaaaaggcaaacagattaccagaaatacagcagccactttgcagaaaggaaggattatgtcaaatagttagaagattcccagaactgcaacttccagtgagtccctctgtgtgtctggatcagggaatgcaattaaagccgagtacttcgagtcaccttttaaaaacagtgaagccacgtgtgtggaaaccaggggactggagtcgtgaacagctgaatgaaacgacagtccttgctccacatgaaacaatctttcgagccgaagatctatctgtgattcttaaagcgtatgtgttggtgacgtccttaacccctttgcgtgcattcattcattcgacgggcacagtttggaatccaccaaagaaaaaacgcttcactgtcaagctgcaaacattttttgagacattcctgagagccagttcacctcaacaggcttttgacattatgaaggaagcaattggcaaactactgctagcggctgaagtattcagtgaaacatctactctgggaccaaagaccttccatagatgcagattctgctttcaacttctaacttttgatattggttatggcagtttcatgtaccctgtagtgctccaggtacacgagcatttaaattttcaagattatgataatatggattttgaggaccaaaatacagaagaattccttttaaatgacactttcaattttctcttccctaatgaatcatcactttccatattttctgagatatttcagagactttatagatcagatgttttcaagggtgaaaactatcaaaaggaactaaatcagtgtctgtccttagaagaaattaactcaattatgactttcataaaggaacttggaagtctgggacaattccaactgctcttcccatctactactcctgggattcagtcactgatgcatgaattttatgatgtggcaaatcctgtgggaaatcctggctcagtcctgacccaatactggtctcttttaaatgtatttgaacaatttcagttcatgaataaaaagacacagccacatccactggaatggaattctttcacagaagataagaacattgaaaaaccacaagtgccatttgatgcaatagaaaataaaaaagctgcagttccacaaattaaaaatgaaaataaagaaatacattgcagtgatgatgaaaacacaccatgtcatatcaagcagatcttcacacatccacatttggaactaaatcctgactttcatccaaagatcaaagattattactgtgaagtcccatttgatgtggtaacagtgacaattggagtggaaactcctaagtgtctgtgcaaggtgcacctgtacgagcaggcagggccaagctttgccagctaccctctgggcttaggaatgaacaaaatctcaatatttgttgtggatgaatctccagcacacggtgagactctgatcacgtacaaactcaccatctatagagaagaccgcccaagtctgcccttgtttgaggccttcacagcatgtggttttgtgcaggattgtggtttgctgattcatccagaggaaacctgtgggttacagcctatttcttctgactacattgaagccattttacagtctgaactaaaaagatgtccatctggggacatgaaaggccagtggattgtgccttgccttagttgttcggacaacaggacgtgtgactggagagaaataacctggcagccccacaactgccaatatggtgtcctaactaagcctcaactccagcagtgcctgggaggaaggaagattctgttcattggagattcaaccaacagagggatcatgtactatcttattgaaaggctgaatgaaacgttgcaggaatggcagaaagtacatggcactaaattctatcacaacgtcaatggtgggaagactttgatcagttattcctactatccccagttctggataagcccttcattgagaccaacatttgaaaatgcacttgaacacctcttgcaaagatcacgtcccctagagaatactggccagactgtattggttgttggtggtgttcagtggcttaattccaatcacctgcaaattattcacaaagttttgaagagggaaaatttactcaatatcctagtgatcatcaaaactttgggaattggatttcatctgccagtggatggagtacatttcttaacacagagtgaagtacagaacttatggaaagaaaatttgattattctggatactgcaaaaaaacatggctatgaagtagttgacacattcactataacaatggggcgttacaaagagtttctacaggggaagtgtggatgtcatttccatgaggtagtgaaatcaaagttatccaaagaatataactttattaaaatgaaaagatcaagaaatcatatcatgggaagatatttcagcaatcaaagcaaactacaacaaggcactgtaacaaattttcgatcgccatatcatgtcagaggtccaataaatcaggtttgttctgaaatccttctcagcaggatgtgtgcaaataaaaggactatgtaggctccctgcaggagagctgaatctggagctggagacgagctagtcacccggacaatggtctaggagccaagcgctgcacatcgcacacatttgggatcgaccacacacacttgtgcacaccagcacatgcatgcacaccagtacacacacagttaaataatgataacacttcttacagctttatgaattcaagatgtgaccttgaacaccagtccatttcacagtgaaagatatacctagagaaacgttacttgaagcataattattaaccagaaccactgtgggccaggtatggcattatgataataaagagaaatatagacacttaaaattatgtgaaaaaaaggataatgctctttcatgttgtcttaccatatctataggtacatcaatattgaaaaggagaaaaaccaatgacattccactggcaagtagaagttgtcctttcattctttaccaggagaaaatgtgatgtttatgatggcttaggcttgtgaatctaatgcttatgaaaaacatttcttcctatactttttaaattttattactgaaaggaaaagaacaggaatgttccacaagggaatttgaagagattctgtgagagagatatgaaatattttatagttaaaacaccaatatattcaactttacacttcttgtgtttttcataaacattccctcttgtcttatctgtgtacttcgatgggtaactgcagtctgaattaatgaaatatgtaattttaaagtaagtaacaaaatgtagttcctcatgtattactgtactatgtttcattgatgatattacttaaatcttgtgtttgccattacagccctatgtaacttaaaattacaattatattttatgtaaatattttgcaaaggactatgcattctgaaatgcataggtgctttttcccaccaagcatttgcatatgtccacaaatagtattatgttactagtatctatattttgattttcctgagcaactgtatcaaatccaaatttagattagacaaaaaattattattttaattaaactgtggcatacatataatacatacctaattatagtagtgagaactatttcttttatctctttaggttcaaaatggtgaatttctttattatatgaatgctttgttgtgagataacatcacactgttacaatggattttagaggttgtctttttgggtggggtgggaagctgagagggttaattcaatacatggctgaaattaccaaatgtataaatacctcattttcactaccatacaagaaaaaaacacctattttgattgatcagttcttttgtatgaatatccacctcctttaaatactctatttttatatatatttttatatgaagataaacatgaatttatatttaactgtcttaaattatatttacataaatgcaaatatcacttgatataaacaatacaaatctgcatcttacagatgataatttttttagaagaatgatacagaattaactttaaaaataaaacttttctaatatacacttaaatgcaaacatcatttttaaattttcagtgatttttttaatgacataaaacgttaccaatgtgtgcagcctctccatcatgttttaacatactgtatactctatagcagtattacagtcagtatttcatataattttctttagacctaactgttaccatctgactgaggttactctggtatttatctcttcgctgctgaaataataatggattttagaaacaattgtaataatatcattaataaatgtcttactagtaatagtctgtg

SEQ ID NO: 431272 - DNA, 627 bp, Homo sapiens
tgctacccagcagagcagcagagccaacacaatgtgcaggagaattgggtcttcctagcttctgacagcatccagagaagtttctgattgtggtttgctgattcatccagaggaaacctgtgggttacagcctatttcttctgactacattgaagccattttacagtctgaactaaaaagatgtccatctggggacatgaaaggccagtggattgtgccttgccttagttgttcggacaacaggacgtgtgactggagagaaataacctggcagccccacaactgccaatatggtgtcctaactaagcctcaactccagcagtgcctgggaggaaggaagttgggtgtcgatgtccagagagttcctagaagccgtaattgaagacacaatccagtcatcctgggaccctaaatgacctccctgccccacccctgcacataaacctgacttgaatcacctggactatttttctgagagagtaataaactttaattgggtttgacctattccaagttttttgggctatctgttacagtgcttagcttatctcacctaatacagggactatgcaaccaagaaactggaaataaaaacaaagataattaaaccattttataataagccta

SEQ ID NO: 431273 - DNA, 298 bp, Homo sapiens
gaatgaaacgacagtccttgctccacatgaaacaatctttcgagccgaagatctatctgtgattcttaaagcgtatgtgttggtgacgtccttaacccctttgcgtgcattcattcattcgacgggcacagtttggaatccaccaaagaaaaaacgcttcactgtcaaggtaagctctcggttgaagctattatttcacgtaagtacactgaagtaaagtaaagtgagttgggctgccattttcccacctttatggttatcaaatcccattgaacaaggatcacatcttttttattgc

SEQ ID NO: 431274 - DNA, 4356 bp, Homo sapiens
tgtacatttcaacccaagtcttttagtattcgttcacctttcatttgaggagaagctaagtgctgactgccagaggatggaataggaagacaatgaactgcaacttccagtgagtccctctgtgtgtctggatcagggaatgcaattaaagccgagtacttcgagtcaccttttaaaaacagtgaagccacgtgtgtggaaaccaggggactggagtcgtgaacagctgaatgaaacgacagtccttgctccacatgaaacaatctttcgagccgaagatctatctgtgattcttaaagcgtatgtgttggtgacgtccttaacccctttgcgtgcattcattcattcgacgggcacagtttggaatccaccaaagaaaaaacgcttcactgtcaagctgcaaacattttttgagacattcctgagagccagttcacctcaacaggcttttgacattatgaaggaagcaattggcaaactactgctagcggctgaagtattcagtgaaacatctactctgggaccaaagaccttccatagatgcagattctgctttcaacttctaacttttgatattggttatggcagtttcatgtaccctgtagtgctccaggtacacgagcatttaaattttcaagattatgataatatggattttgaggaccaaaatacagaagaattccttttaaatgacactttcaattttctcttccctaatgaatcatcactttccatattttctgagatatttcagagactttatagatcagatgttttcaagggtgaaaactatcaaaaggaactaaatcagtgtctgtccttagaagaaattaactcaattatgactttcataaaggaacttggaagtctgggacaattccaactgctcttcccatctactactcctgggattcagtcactgatgcatgaattttatgatgtggcaaatcctgtgggaaatcctggctcagtcctgacccaatactggtctcttttaaatgtatttgaacaatttcagttcatgaataaaaagacacagccacatccactggaatggaattctttcacagaagataagaacattgaaaaaccacaagtgccatttgatgcaatagaaaataaaaaagctgcagttccacaaattaaaaatgaaaataaagaaatacattgcagtgatgatgaaaacacaccatgtcatatcaagcagatcttcacacatccacatttggaactaaatcctgactttcatccaaagatcaaagattattactgtgaagtcccatttgatgtggtaacagtgacaattggagtggaaactcctaagtgtctgtgcaaggtgcacctgtacgagcaggcagggccaagctttgccagctaccctctgggcttaggaatgaacaaaatctcaatatttgttgtggatgaatctccagcacacggtgagactctgatcacgtacaaactcaccatctatagagaagaccgcccaagtctgcccttgtttgaggccttcacagcatgtggttttgtgcaggattgtggtttgctgattcatccagaggaaacctgtgggttacagcctatttcttctgactacattgaagccattttacagtctgaactaaaaagatgtccatctggggacatgaaaggccagtggattgtgccttgccttagttgttcggacaacaggacgtgtgactggagagaaataacctggcagccccacaactgccaatatggtgtcctaactaagcctcaactccagcagtgcctgggaggaaggaagattctgttcattggagattcaaccaacagagggatcatgtactatcttattgaaaggctgaatgaaacgttgcaggaatggcagaaagtacatggcactaaattctatcacaacgtcaatggtgggaagactttgatcagttattcctactatccccagttctggataagcccttcattgagaccaacatttgaaaatgcacttgaacacctcttgcaaagatcacgtcccctagagaatactggccagactgtattggttgttggtggtgttcagtggcttaattccaatcacctgcaaattattcacaaagttttgaagagggaaaatttactcaatatcctagtgatcatcaaaactttgggaattggatttcatctgccagtggatggagtacatttcttaacacagagtgaagtacagaacttatggaaagaaaatttgattattctggatactgcaaaaaaacatggctatgaagtagttgacacattcactataacaatggggcgttacaaagagtttctacaggggaagtgtggatgtcatttccatgaggtagtgaaatcaaagttatccaaagaatataactttattaaaatgaaaagatcaagaaatcatatcatgggaagatatttcagcaatcaaagcaaactacaacaaggcactgtaacaaattttcgatcgccatatcatgtcagaggtccaataaatcaggtttgttctgaaatccttctcagcaggatgtgtgcaaataaaaggactatgtaggctccctgcaggagagctgaatctggagctggagacgagctagtcacccggacaatggtctaggagccaagcgctgcacatcgcacacatttgggatcgaccacacacacttgtgcacaccagcacatgcatgcacaccagtacacacacagttaaataatgataacacttcttacagctttatgaattcaagatgtgaccttgaacaccagtccatttcacagtgaaagatatacctagagaaacgttacttgaagcataattattaaccagaaccactgtgggccaggtatggcattatgataataaagagaaatatagacacttaaaattatgtgaaaaaaaggataatgctctttcatgttgtcttaccatatctataggtacatcaatattgaaaaggagaaaaaccaatgacattccactggcaagtagaagttgtcctttcattctttaccaggagaaaatgtgatgtttatgatggcttaggcttgtgaatctaatgcttatgaaaaacatttcttcctatactttttaaattttattactgaaaggaaaagaacaggaatgttccacaagggaatttgaagagattctgtgagagagatatgaaatattttatagttaaaacaccaatatattcaactttacacttcttgtgtttttcataaacattccctcttgtcttatctgtgtacttcgatgggtaactgcagtctgaattaatgaaatatgtaattttaaagtaagtaacaaaatgtagttcctcatgtattactgtactatgtttcattgatgatattacttaaatcttgtgtttgccattacagccctatgtaacttaaaattacaattatattttatgtaaatattttgcaaaggactatgcattctgaaatgcataggtgctttttcccaccaagcatttgcatatgtccacaaatagtattatgttactagtatctatattttgattttcctgagcaactgtatcaaatccaaatttagattagacaaaaaattattattttaattaaactgtggcatacatataatacatacctaattatagtagtgagaactatttcttttatctctttaggttcaaaatggtgaatttctttattatatgaatgctttgttgtgagataacatcacactgttacaatggattttagaggttgtctttttgggtggggtgggaagctgagagggttaattcaatacatggctgaaattaccaaatgtataaatacctcattttcactaccatacaagaaaaaaacacctattttgattgatcagttcttttgtatgaatatccacctcctttaaatactctatttttatatatatttttatatgaagataaacatgaatttatatttaactgtcttaaattatatttacataaatgcaaatatcacttgatataaacaatacaaatctgcatcttacagatgataatttttttagaagaatgatacagaattaactttaaaaataaaacttttctaatatacacttaaatgcaaacatcatttttaaattttcagtgatttttttaatgacataaaacgttaccaatgtgtgcagcctctccatcatgttttaacatactgtatactctatagcagtattacagtcagtatttcatataattttctttagacctaactgttaccatctgactgaggttactctggtatttatctcttcgctgctgaaataataatggattttagaaacaattgtaataatatcattaataaatgtcttactagtaatagtctgtg

SEQ ID NO: 431275 - DNA, 4469 bp, Homo sapiens
aattgaatcatgggtgcggtttcccccatcctattctcgtggtagtgagtaagtctcacgagatctgatggttttataagggattttccctttcacttggccctcattcgctcctgcctgccaccatgtaaggcaaacagattaccagaaatacagcagccactttgcagaaaggaaggattatgtcaaatagttagaagattcccagaactgcaacttccagtgagtccctctgtgtgtctggatcagggaatgcaattaaagccgagtacttcgagtcaccttttaaaaacagtgaagccacgtgtgtggaaaccaggggactggagtcgtgaacagctgaatgaaacgacagtccttgctccacatgaaacaatctttcgagccgaagatctatctgtgattcttaaagcgtatgtgttggtgacgtccttaacccctttgcgtgcattcattcattcgacgggcacagtttggaatccaccaaagaaaaaacgcttcactgtcaagctgcaaacattttttgagacattcctgagagccagttcacctcaacaggcttttgacattatgaaggaagcaattggcaaactactgctagcggctgaagtattcagtgaaacatctactctgggaccaaagaccttccatagatgcagattctgctttcaacttctaacttttgatattggttatggcagtttcatgtaccctgtagtgctccaggtacacgagcatttaaattttcaagattatgataatatggattttgaggaccaaaatacagaagaattccttttaaatgacactttcaattttctcttccctaatgaatcatcactttccatattttctgagatatttcagagactttatagatcagatgttttcaagggtgaaaactatcaaaaggaactaaatcagtgtctgtccttagaagaaattaactcaattatgactttcataaaggaacttggaagtctgggacaattccaactgctcttcccatctactactcctgggattcagtcactgatgcatgaattttatgatgtggcaaatcctgtgggaaatcctggctcagtcctgacccaatactggtctcttttaaatgtatttgaacaatttcagttcatgaataaaaagacacagccacatccactggaatggaattctttcacagaagataagaacattgaaaaaccacaagtgccatttgatgcaatagaaaataaaaaagctgcagttccacaaattaaaaatgaaaataaagaaatacattgcagtgatgatgaaaacacaccatgtcatatcaagcagatcttcacacatccacatttggaactaaatcctgactttcatccaaagatcaaagattattactgtgaagtcccatttgatgtggtaacagtgacaattggagtggaaactcctaagtgtctgtgcaaggtgcacctgtacgagcaggcagggccaagctttgccagctaccctctgggcttaggaatgaacaaaatctcaatatttgttgtggatgaatctccagcacacggtgagactctgatcacgtacaaactcaccatctatagagaagaccgcccaagtctgcccttgtttgaggccttcacagcatgtggttttgtgcaggattgtggtttgctgattcatccagaggaaacctgtgggttacagcctatttcttctgactacattgaagccattttacagtctgaactaaaaagatgtccatctggggacatgaaaggccagtggattgtgccttgccttagttgttcggacaacaggacgtgtgactggagagaaataacctggcagccccacaactgccaatatggtgtcctaactaagcctcaactccagcagtgcctgggaggaaggaagattctgttcattggagattcaaccaacagagggatcatgtactatcttattgaaaggctgaatgaaacgttgcaggaatggcagaaagtacatggcactaaattctatcacaacgtcaatggtgggaagactttgatcagttattcctactatccccagttctggataagcccttcattgagaccaacatttgaaaatgcacttgaacacctcttgcaaagatcacgtcccctagagaatactggccagactgtattggttgttggtggtgttcagtggcttaattccaatcacctgcaaattattcacaaagttttgaagagggaaaatttactcaatatcctagtgatcatcaaaactttgggaattggatttcatctgccagtggatggagtacatttcttaacacagagtgaagtacagaacttatggaaagaaaatttgattattctggatactgcaaaaaaacatggctatgaagtagttgacacattcactataacaatggggcgttacaaagagtttctacaggggaagtgtggatgtcatttccatgaggtagtgaaatcaaagttatccaaagaatataactttattaaaatgaaaagatcaagaaatcatatcatgggaagatatttcagcaatcaaagcaaactacaacaaggcactgtaacaaattttcgatcgccatatcatgtcagaggtccaataaatcaggtttgttctgaaatccttctcagcaggatgtgtgcaaataaaaggactatgtaggctccctgcaggagagctgaatctggagctggagacgagctagtcacccggacaatggtctaggagccaagcgctgcacatcgcacacatttgggatcgaccacacacacttgtgcacaccagcacatgcatgcacaccagtacacacacagttaaataatgataacacttcttacagctttatgaattcaagatgtgaccttgaacaccagtccatttcacagtgaaagatatacctagagaaacgttacttgaagcataattattaaccagaaccactgtgggccaggtatggcattatgataataaagagaaatatagacacttaaaattatgtgaaaaaaaggataatgctctttcatgttgtcttaccatatctataggtacatcaatattgaaaaggagaaaaaccaatgacattccactggcaagtagaagttgtcctttcattctttaccaggagaaaatgtgatgtttatgatggcttaggcttgtgaatctaatgcttatgaaaaacatttcttcctatactttttaaattttattactgaaaggaaaagaacaggaatgttccacaagggaatttgaagagattctgtgagagagatatgaaatattttatagttaaaacaccaatatattcaactttacacttcttgtgtttttcataaacattccctcttgtcttatctgtgtacttcgatgggtaactgcagtctgaattaatgaaatatgtaattttaaagtaagtaacaaaatgtagttcctcatgtattactgtactatgtttcattgatgatattacttaaatcttgtgtttgccattacagccctatgtaacttaaaattacaattatattttatgtaaatattttgcaaaggactatgcattctgaaatgcataggtgctttttcccaccaagcatttgcatatgtccacaaatagtattatgttactagtatctatattttgattttcctgagcaactgtatcaaatccaaatttagattagacaaaaaattattattttaattaaactgtggcatacatataatacatacctaattatagtagtgagaactatttcttttatctctttaggttcaaaatggtgaatttctttattatatgaatgctttgttgtgagataacatcacactgttacaatggattttagaggttgtctttttgggtggggtgggaagctgagagggttaattcaatacatggctgaaattaccaaatgtataaatacctcattttcactaccatacaagaaaaaaacacctattttgattgatcagttcttttgtatgaatatccacctcctttaaatactctatttttatatatatttttatatgaagataaacatgaatttatatttaactgtcttaaattatatttacataaatgcaaatatcacttgatataaacaatacaaatctgcatcttacagatgataatttttttagaagaatgatacagaattaactttaaaaataaaacttttctaatatacacttaaatgcaaacatcatttttaaattttcagtgatttttttaatgacataaaacgttaccaatgtgtgcagcctctccatcatgttttaacatactgtatactctatagcagtattacagtcagtatttcatataattttctttagacctaactgttaccatctgactgaggttactctggtatttatctcttcgctgctgaaataataatggattttagaaacaattgtaataatatcattaataaatgtcttactagtaatagtctgtg

SEQ ID NO: 431276 - DNA, 1595 bp, Homo sapiens
tgtacatttcaacccaagtcttttagtattcgttcacctttcatttgaggagaagctaagtgctgactgccagaggatggaataggaagacaatgaactgcaacttccagtgagtccctctgtgtgtctggatcagggaatgcaattaaagccgagtacttcgagtcaccttttaaaaacagtgaagccacgtgtgtggaaaccaggggactggagtcgtgaacagctgaatgaaacgacagtccttgctccacatgaaacaatctttcgagccgaagatctatctgtgattcttaaagcgtatgtgttggtgacgtccttaacccctttgcgtgcattcattcattcgacgggcacagtttggaatccaccaaagaaaaaacgcttcactgtcaagctgcaaacattttttgagacattcctgagagccagttcacctcaacaggcttttgacattatgaaggaagcaattggcaaactactgctagcggctgaagtattcagtgaaacatctactctgggaccaaagaccttccatagatgcagattctgctttcaacttctaacttttgatattggttatggcagtttcatgtaccctgtagtgctccaggtacacgagcatttaaattttcaagattatgataatatggattttgaggaccaaaatacagaagaattccttttaaatgacactttcaattttctcttccctaatgaatcatcactttccatattttctgagatatttcagagactttatagatcagatgttttcaagggtgaaaactatcaaaaggaactaaatcagtgtctgtccttagaagaaattaactcaattatgactttcataaaggaacttggaagtctgggacaattccaactgctcttcccatctactactcctgggattcagtcactgatgcatgaattttatgatgtggcaaatcctgtgggaaatcctggctcagtcctgacccaatactggtctcttttaaatgtatttgaacaatttcagttcatgaataaaaagacacagccacatccactggaatggcaattcctttcaacgagacagatcaagaaccattgcacaaacaccaacgaaggtgccaagtttggatgcaagtagcaaagataaagcaaagcgtgcagatgtccacgaaagttaaaaacatggaaaatagagagaaaattagcatgtgccaggtggatggcatgcaggaaacgacgagccaatggtcgataattcgaaggcgaataatcgtatcgagcagacaagtcgcaacgagtgtgtggggaaaagcgtagacaacggttcgccttggaagcgttgtgttccaagttccccaaaacagggaagtccagacgatgacattgtaagtgttaacccgtgggtggaagagggatgcgacaccaagtgtgagggaattggagttggaggataaaagacgagaggtttgcaagccgacaaattatagggggaagaggtgggaggaaaaacacagtttgacactgttaaaatggcggttggggtcagattgggattgggcacaaaagaggggattggtcaccaagacccttgtggataaaag

SEQ ID NO: 431277 - DNA, 531 bp, Homo sapiens
ctcaacttaagcaagcgcttttatgttctagtcacttaccctagcacttgaggtttgtcaatttaattctcataacaaccccagaggaagataagaagataatatcgtcccttatttaccaactgggacaatttactgttgtccaagtgctctgggcaggacagaagggtgtgggtgtgctgcttccaggcttggaacaggaggtagaacaatgaacaatgacagaaagtattaataggccaggcacggtggctcacacctgcaatcccggcactttgggaggccaagaagggcggatcactcgaggtcaggagtttgagaccagcctggccaccacggtaaaaccctgtctctaccaaaaatacaaatattagctaggcatggtggtgcatgcctgtaatcccagctacttgggaagctgagtcagaagaatcacttgaatccaggaggcagaggttgcagtgagccgagattgtgccactgcactccaggctgggtgacagagctaagattctgtctcaaaaaaaaaga

SEQ ID NO: 431278 - DNA, 970 bp, Homo sapiens
gagcaaagtgttgaaggatccttacactatgtttgggtttactgagagtgctatgattgattagcagtgtccaccccattgggtacaggactaaatagtagcaacatgtgtagcatatttgtcaagaatcaggttttgatagtcctgtcaacactccagaagagaattagtttctctggcatggtaattaagaacttgggcattgaaaatagactgcctgggttcaaatcctgtagttcccatacttactaatcatgtgactttagaaaagttacataacttttctctaccccagactgtcaatctgaaaaatgagggtaacagtaacaacctgatagaccattattaggattgagtaatttcatctaaagcacttagaataaaggttagcacatagtaagtgctcattaagtattagggatggttgttatacattctacaaaattgatagattcattaaaataggatactctaagccaaactgaccttctgaagagaaattccacagtcatggtaaagttctattttttttaataggaaactgatgactatagatattttgatcccaaaatgctgcggggcaatgacagctcagttcccagaaataaaaatccattccaagaggccattgtttttgtggtgggaggaggcaactacattgaatatcagaatcttgttgactacataaaggggaaacaaggcaaacacattttatatggctgcagtgagctttttaatgctacacagttcataaaacagttgtcacaacttggacaaaagtaacacagaagaaccttactatgataatctacttggaatgtggataaatgtaaaaagaagaaaagttagaagagcaatatgtttccttctctgtaacagtgtcctaacagtgaaaatcagagttatttgttaatttttaaggaaattatatacttaatatgtattgattaaaagaaacatttcagaaata

SEQ ID NO: 431279 - DNA, 1314 bp, Homo sapiens
caaaataaaaatggtcaataaagttgtttgtgtatccatatacccattttcctaagtacaaaaaatacctttttattagaaatgaacgaactcttacatcatttaatctcatacgttttcacgaactttaaaagttactttatttttaaagagaacttttataatccacagagaggaaatgaaaaaaatacagtgggattctggccaggcatggtggctcacgcctgtaatcccagcagtttgggaagctgatcacctaaggtcaggagtttgagaccagcctggccaacatggcgaaaccctgtctctactaaaaatataaaaattagccgggcgtggtggcaagagcctgtattcccagctacttgggaggctgaggcaggaggatcacttgaacccaggaggcagaggctgcagtgagctgagattgcgccactgcactccagcctgggcgacagcgagtctccatgtcaaaaaaaaaaaaaaaacgggattcttgtttgatcaaaacaaaagcttgcagttactagtattaaaagcaaacacccaacaaagtaaaaagcccaaacatgtatttgtactaaaacctgaatacacctatacatttaaagaagcattttacttagaattatattttcctgtggaaacttgagtagtgccaagagtatttacatctttgacatcacctttaccattcacagactacttaatcttagaatgtgtttaattgaaaggtaagcatacttaactgtagaatgatcaggttgttttaatagagaagaactttggtttaatattctaatatttaacaaaatacttttccacagaatctacctgttactcgtattttggacaatcttatggagatgaagtcaaaccccgaaactgatgactatagatattttgatcccaaaatgctgcggggcaatgacagctcagttcccagaaataaaaatccattccaagaggccattgtttttgtggtgggaggaggcaactacattgaatatcagaatcttgttgactacataaaggggaaacaaggcaaacacattttatatggctgcagtgagctttttaatgctacacagttcataaaacagttgtcacaacttggacaaaagtaacacagaagaaccttactatgataatctacttggaatgtggataaatgtaaaaagaagaaaagttagaagagcaatatgtttccttctctgtaacagtgtcctaacagtgaaaatcagagttatttgttaatttttaaggaaattatatacttaatatgtattgattaaaagaaacatttcagaaata

SEQ ID NO: 431280 - DNA, 2074 bp, Homo sapiens
agcagcggtagtggctcgtgggagccaagatggcggcggcggcggcagcgacagcagcagcagcagccagtattcgggaaaggcagacaggtactcatttatgacagatttggccaagatataatctctcctctgctatctgtgaaggagctaagagacatgggaatcactctgcatctgcttttacactctgatcgagatcctattccagatgttcctgcagtatactttgtaatgccaactgaagaaaatattgacagaatgtgccaggatcttcgaaatcaactatatgaatcatattatttaaattttatttctgctatttcaagaagtaaactggaagatattgcaaatgcagcgttagcagctagtgcagtaacacaagtagccaaggtttttgaccaatatctcaattttattactttggaagatgatatgtttgtattatgtaatcaaaataaggagcttgtttcatatcgtgccattaacaggccagatatcacagacacggaaatggaaactgttatggacactatagttgacagcctcttctgcttttttgttactctgggtgctgttcctataatcagatgttcaagaggaacagcagcagaaatggtagcagtgaaactagacaagaaacttcgagaaaatctaagagatgcaagaaacagtctttttacaggtgatacacttggagctggccaattcagcttccagaggcccttattagtccttgttgacagaaacatagatttggcaactcctttacatcatacttggacatatcaagcattggtgcacgatgtactggatttccatttaaacagggttaatttggaagaatcttcaggagtggaaaactctccagctggtgctagaccaaagagaaaaaacaagaagtcttatgatttaactccggttgataaattttggcaaaaacataaaggaagtccattcccagaagttgcagaatcagttcagcaagaactagaatcttacagagcacaggaagatgaggtcaaacgacttaaaagcattatgggactagaaggggaagatgaaggagccataagtatgctttctgacaataccgctaagctaacatcagctgttagttctttgccagaactccttgagaaaaaaagacttattgatctccatacaaatgttgccactgctgttttagaacatataaaggcaagaaaattggatgtatattttgaatatgaagaaaaaataatgagcaaaactactctggataaatctcttctagatataatatcagaccctgatgcaggaactccagaagataaaatgaggttgtttcttatctattatataagcacacagcaagcaccttctgaggctgatttggagcaatataaaaaagctttaactgatgcaggatgcaaccttaatcctttacaatatatcaaacagtggaaggcttttaccaagatggcctcagctccggccagctatggcagcactaccactaaaccaatgggtcttttatcacgagtcatgaatacaggatcacagtttgtgatggaaggagtgaagaacctggttttgaaacagcaaaatctacctgttactcgtattttggacaatcttatggagatgaagtcaaaccccgaaactgatgactatagatattttgatcccaaaatgctgcggggcaatgacagctcagttcccagaaataaaaatccattccaagaggccattgtttttgtggtgggaggaggcaactacattgaatatcagaatcttgttgactacataaaggggaaacaaggcaaacacattttatatggctgcagtgagctttttaatgctacacagttcataaaacagttgtcacaacttggacaaaagtaacacagaagaaccttactatgataatctacttggaatgtggataaatgtaaaaagaagaaaagttagaagagcaatatgtttccttctctgtaacagtgtcctaacagtgaaaatcagagttatttgttaatttttaaggaaattatatacttaatatgtattgattaaaagaaacatttcagaaata

SEQ ID NO: 431281 - DNA, 998 bp, Homo sapiens
  misc_feature (100)..(100): n is a, c, g, or t
  misc_feature (293)..(293): n is a, c, g, or t
gcgtcgttggtattcacgcggtctacgcgcgtgcgtgtgattagttgtagttaggctgcgatgtatggtgtggcttctgctgtgttgtgcgtgtagagtncacagtgatgtacagagaagcagtacagacctgggggtctttcgcaatctggttcccccgacatgtgtccactccctcgtaacagtcggcaactggatatttcgtgttttacgactttactgttatacgctggatagagtctggccggatccagaataatgagtgttctattatatataccacacacaacacntttgagctgatttgaccaatataaaagctttaactaagccggatccacctaaaccttcacgattatatcaaacagtggaggcttttaccaagatggcctcagctccggccagctatggcagcactaccactaaaccaatgggtcttttatcacgagtcatgaatacaggatcacagtttgtgatggaaggagtgaagaacctggttttgaaacagcaaaatctacctgttactcgtattttggacaatcttatggagatgaagtcaaaccccgaaactgatgactatagatattttgatcccaaaatgctgcggggcaatgacagctcagttcccagaaataaaaatccattccaagaggccattgtttttgtggtgggaggaggcaactacattgaatatcagaatcttgttgactacataaaggggaaacaaggcaaacacattttatatggctgcagtgagctttttaatgctacacagttcataaaacagttgtcacaacttggacaaaagtaacacagaagaaccttactatgataatctacttggaatgtggataaatgtaaaaagaagaaaagttagaagagcaatatgtttccttctctgtaacagtgtcctaacagtgaaaatcagagttatttgttaatttttaaggaaattatatacttaatatgtattgattaaaagaaacatttcagaaata

SEQ ID NO: 431282 - DNA, 562 bp, Homo sapiens
ttaatgaaacccagttcactacctggctcagcaaaattaaaggacccacccctctaagaaggtgaaggaggtagaattgtaaatacttacctaatagtgcatgtgtgtgtatttcccatacctattttattcataataaaagccatgggtgaaattttcattacggtttttctttattacagctcagttcccagaaataaaaatccattccaagaggccattgtttttgtggtgggaggaggcaactacattgaatatcagaatcttgttgactacataaaggggaaacaaggcaaacacattttatatggctgcagtgagctttttaatgctacacagttcataaaacagttgtcacaacttggacaaaagtaacacagaagaaccttactatgataatctacttggaatgtggataaatgtaaaaagaagaaaagttagaagagcaatatgtttccttctctgtaacagtgtcctaacagtgaaaatcagagttatttgttaatttttaaggaaattatatacttaatatgtattgattaaaagaaacatttcagaaata

SEQ ID NO: 431283 - DNA, 797 bp, Homo sapiens
attgggttccaacattgtaactgtgacttttattcctgatgttgacaatgtggaatgagatgtattaacttataaatactgtgttgctcaagtgagactaaaagcacaatccatgccacctgcaccatagcccactttcagcataaagaaactcgaatgtattcttcaagtagtacacatcctacattggaagaatgttgttctaagattttataggtaactgttgctcctgtgaaatttgacagtgagattccttctatttttagtgtaataggaaatggcaccaatagtatgccatagtatatattttgggggacaaaaatactatgctcatttcaccactttattcctctttatttcatgcaattttaggtagatgtgtatactaaaatccaacagtatcccaaagaaagactgttaagaataacaaaaaaactagcatattaatctcttttcttgggaatattgaatatatttcttgttacttgtatctaagttctgactctgatttttacaggggaaacaaggcaaacacattttatatggctgcagtgagctttttaatgctacacagttcataaaacagttgtcacaacttggacaaaagtaacacagaagaaccttactatgataatctacttggaatgtggataaatgtaaaaagaagaaaagttagaagagcaatatgtttccttctctgtaacagtgtcctaacagtgaaaatcagagttatttgttaatttttaaggaaattatatacttaatatgtattgattaaaagaaacatttcagaaata

SEQ ID NO: 431284 - DNA, 2208 bp, Homo sapiens
agcagcggtagtggctcgtgggagccaagatggcggcggcggcggcagcgacagcagcagcagcagccagtattcgggaaaggcagacaggtactgacttattctcttctccttgaagcttcgtgactgccccgacgacatccttctcctctgtggctttgaagcgtatgttgaatttcaatgtgcctcatattaaaaacagcacaggagaaccagtatggaaggtactcatttatgacagatttggccaagatataatctctcctctgctatctgtgaaggagctaagagacatgggaatcactctgcatctgcttttacactctgatcgagatcctattccagatgttcctgcagtatactttgtaatgccaactgaagaaaatattgacagaatgtgccaggatcttcgaaatcaactatatgaatcatattatttaaattttatttctgctatttcaagaagtaaactggaagatattgcaaatgcagcgttagcagctagtgcagtaacacaagtagccaaggtttttgaccaatatctcaattttattactttggaagatgatatgtttgtattatgtaatcaaaataaggagcttgtttcatatcgtgccattaacaggccagatatcacagacacggaaatggaaactgttatggacactatagttgacagcctcttctgcttttttgttactctgggtgctgttcctataatcagatgttcaagaggaacagcagcagaaatggtagcagtgaaactagacaagaaacttcgagaaaatctaagagatgcaagaaacagtctttttacaggtgatacacttggagctggccaattcagcttccagaggcccttattagtccttgttgacagaaacatagatttggcaactcctttacatcatacttggacatatcaagcattggtgcacgatgtactggatttccatttaaacagggttaatttggaagaatcttcaggagtggaaaactctccagctggtgctagaccaaagagaaaaaacaagaagtcttatgatttaactccggttgataaattttggcaaaaacataaaggaagtccattcccagaagttgcagaatcagttcagcaagaactagaatcttacagagcacaggaagatgaggtcaaacgacttaaaagcattatgggactagaaggggaagatgaaggagccataagtatgctttctgacaataccgctaagctaacatcagctgttagttctttgccagaactccttgagaaaaaaagacttattgatctccatacaaatgttgccactgctgttttagaacatataaaggcaagaaaattggatgtatattttgaatatgaagaaaaaataatgagcaaaactactctggataaatctcttctagatataatatcagaccctgatgcaggaactccagaagataaaatgaggttgtttcttatctattatataagcacacagcaagcaccttctgaggctgatttggagcaatataaaaaagctttaactgatgcaggatgcaaccttaatcctttacaatatatcaaacagtggaaggcttttaccaagatggcctcagctccggccagctatggcagcactaccactaaaccaatgggtcttttatcacgagtcatgaatacaggatcacagtttgtgatggaaggagtgaagaacctggttttgaaacagcaaaatctacctgttactcgtattttggacaatcttatggagatgaagtcaaaccccgaaactgatgactatagatattttgatcccaaaatgctgcggggcaatgacagctcagttcccagaaataaaaatccattccaagaggccattgtttttgtggtgggaggaggcaactacattgaatatcagaatcttgttgactacataaaggggaaacaaggcaaacacattttatatggctgcagtgagctttttaatgctacacagttcataaaacagttgtcacaacttggacaaaagtaacacagaagaaccttactatgataatctacttggaatgtggataaatgtaaaaagaagaaaagttagaagagcaatatgtttccttctctgtaacagtgtcctaacagtgaaaatcagagttatttgttaatttttaaggaaattatatacttaatatgtattgattaaaagaaacatttcagaaata

SEQ ID NO: 431285 - DNA, 2137 bp, Homo sapiens
  misc_feature (29)..(29): n is a, c, g, or t
gcccacgcgtccggtcgccgccggcagcnaacagcagcagcagtcagccttcattcaggaaagacagccagttgctctcatgtggctttgaagcgtatgttgaatttcaatgtgcctcatattaaaaacagcacaggagaaccagtatggaaggtactcatttatgacagatttggccaagatataatctctcctctgctatctgtgaaggagctaagagacatgggaatcactctgcatctgcttttacactctgatcgagatcctattccagatgttcctgcagtatactttgtaatgccaactgaagaaaatattgacagaatgtgccaggatcttcgaaatcaactatatgaatcatattatttaaattttatttctgctatttcaagaagtaaactggaagatattgcaaatgcagcgttagcagctagtgcagtaacacaagtagccaaggtttttgaccaatatctcaattttattactttggaagatgatatgtttgtattatgtaatcaaaataaggagcttgtttcatatcgtgccattaacaggccagatatcacagacacggaaatggaaactgttatggacactatagttgacagcctcttctgcttttttgttactctgggtgctgttcctataatcagatgttcaagaggaacagcagcagaaatggtagcagtgaaactagacaagaaacttcgagaaaatctaagagatgcaagaaacagtctttttacaggtgatacacttggagctggccaattcagcttccagaggcccttattagtccttgttgacagaaacatagatttggcaactcctttacatcatacttggacatatcaagcattggtgcacgatgtactggatttccatttaaacagggttaatttggaagaatcttcaggagtggaaaactctccagctggtgctagaccaaagagaaaaaacaagaagtcttatgatttaactccggttgataaattttggcaaaaacataaaggaagtccattcccagaagttgcagaatcagttcagcaagaactagaatcttacagagcacaggaagatgaggtcaaacgacttaaaagcattatgggactagaaggggaagatgaaggagccataagtatgctttctgacaataccgctaagctaacatcagctgttagttctttgccagaactccttgagaaaaaaagacttattgatctccatacaaatgttgccactgctgttttagaacatataaaggcaagaaaattggatgtatattttgaatatgaagaaaaaataatgagcaaaactactctggataaatctcttctagatataatatcagaccctgatgcaggaactccagaagataaaatgaggttgtttcttatctattatataagcacacagcaagcaccttctgaggctgatttggagcaatataaaaaagctttaactgatgcaggatgcaaccttaatcctttacaatatatcaaacagtggaaggcttttaccaagatggcctcagctccggccagctatggcagcactaccactaaaccaatgggtcttttatcacgagtcatgaatacaggatcacagtttgtgatggaaggagtgaagaacctggttttgaaacagcaaaatctacctgttactcgtattttggacaatcttatggagatgaagtcaaaccccgaaactgatgactatagatattttgatcccaaaatgctgcggggcaatgacagctcagttcccagaaataaaaatccattccaagaggccattgtttttgtggtgggaggaggcaactacattgaatatcagaatcttgttgactacataaaggggaaacaaggcaaacacattttatatggctgcagtgagctttttaatgctacacagttcataaaacagttgtcacaacttggacaaaagtaacacagaagaaccttactatgataatctacttggaatgtggataaatgtaaaaagaagaaaagttagaagagcaatatgtttccttctctgtaacagtgtcctaacagtgaaaatcagagttatttgttaatttttaaggaaattatatacttaatatgtattgattaaaagaaacatttcagaaata

SEQ ID NO: 431286 - DNA, 2091 bp, Homo sapiens
agcagcggtagtggctcgtgggagccaagatggcggcggcggcggcagcgacagcagcagcagcagccagtattcgggaaaggcagacagtggctttgaagcgtatgttgaatttcaatgtgcctcatattaaaaacagcacaggagaaccagtatggaaggtactcatttatgacagatttggccaagatataatctctcctctgctatctgtgaaggagctaagagacatgggaatcactctgcatctgcttttacactctgatcgagatcctattccagatgttcctgcagtatactttgtaatgccaactgaagatttaaattttatttctgctatttcaagaagtaaactggaagatattgcaaatgcagcgttagcagctagtgcagtaacacaagtagccaaggtttttgaccaatatctcaattttattactttggaagatgatatgtttgtattatgtaatcaaaataaggagcttgtttcatatcgtgccattaacaggccagatatcacagacacggaaatggaaactgttatggacactatagttgacagcctcttctgcttttttgttactctgggtgctgttcctataatcagatgttcaagaggaacagcagcagaaatggtagcagtgaaactagacaagaaacttcgagaaaatctaagagatgcaagaaacagtctttttacaggtgatacacttggagctggccaattcagcttccagaggcccttattagtccttgttgacagaaacatagatttggcaactcctttacatcatacttggacatatcaagcattggtgcacgatgtactggatttccatttaaacagggttaatttggaagaatcttcaggagtggaaaactctccagctggtgctagaccaaagagaaaaaacaagaagtcttatgatttaactccggttgataaattttggcaaaaacataaaggaagtccattcccagaagttgcagaatcagttcagcaagaactagaatcttacagagcacaggaagatgaggtcaaacgacttaaaagcattatgggactagaaggggaagatgaaggagccataagtatgctttctgacaataccgctaagctaacatcagctgttagttctttgccagaactccttgagaaaaaaagacttattgatctccatacaaatgttgccactgctgttttagaacatataaaggcaagaaaattggatgtatattttgaatatgaagaaaaaataatgagcaaaactactctggataaatctcttctagatataatatcagaccctgatgcaggaactccagaagataaaatgaggttgtttcttatctattatataagcacacagcaagcaccttctgaggctgatttggagcaatataaaaaagctttaactgatgcaggatgcaaccttaatcctttacaatatatcaaacagtggaaggcttttaccaagatggcctcagctccggccagctatggcagcactaccactaaaccaatgggtcttttatcacgagtcatgaatacaggatcacagtttgtgatggaaggagtgaagaacctggttttgaaacagcaaaatctacctgttactcgtattttggacaatcttatggagatgaagtcaaaccccgaaactgatgactatagatattttgatcccaaaatgctgcggggcaatgacagctcagttcccagaaataaaaatccattccaagaggccattgtttttgtggtgggaggaggcaactacattgaatatcagaatcttgttgactacataaaggggaaacaaggcaaacacattttatatggctgcagtgagctttttaatgctacacagttcataaaacagttgtcacaacttggacaaaagtaacacagaagaaccttactatgataatctacttggaatgtggataaatgtaaaaagaagaaaagttagaagagcaatatgtttccttctctgtaacagtgtcctaacagtgaaaatcagagttatttgttaatttttaaggaaattatatacttaatatgtattgattaaaagaaacatttcagaaata

SEQ ID NO: 431287 - DNA, 2088 bp, Homo sapiens
agcagcggtagtggctcgtgggagccaagatggcggcggcggcggcagcgacagcagcagcagcagccagtattcgggaaaggcagacagtggctttgaagcgtatgttgaatttcaatgtgcctcatattaaaaacagcacaggagaaccagtatggaaggtactcatttatgacagatttggccaagatataatctctcctctgctatctgtgaaggagctaagagacatgggaatcactctgcatctgcttttacactctgatcgagatcctattccagatgttcctgcagtatactttgtaatgccaactgaagaaaatattgacagaatgtgccaggatcttcgaaatcaactatatgaatcatattatttaaattttatttctgctatttcaagaagtaaactggaagatattgcaaatgcagcgttagcagctagtgcagtaacacaagtagccaaggtttttgaccaatatctcaattttattactttggaagatgatatgtttgtattatgtaatcaaaataaggagcttgtttcatatcgtgccattaacaggccagatatcacagacacggaaatggaaactgttatggacactatagttgacagcctcttctgcttttttgttactctgggtgctgttcctataatcagatgttcaagaggaacagcagcagaaatggtagcagtgaaactagacaagaaacttcgagaaaatctcttccagaggcccttattagtccttgttgacagaaacatagatttggcaactcctttacatcatacttggacatatcaagcattggtgcacgatgtactggatttccatttaaacagggttaatttggaagaatcttcaggagtggaaaactctccagctggtgctagaccaaagagaaaaaacaagaagtcttatgatttaactccggttgataaattttggcaaaaacataaaggaagtccattcccagaagttgcagaatcagttcagcaagaactagaatcttacagagcacaggaagatgaggtcaaacgacttaaaagcattatgggactagaaggggaagatgaaggagccataagtatgctttctgacaataccgctaagctaacatcagctgttagttctttgccagaactccttgagaaaaaaagacttattgatctccatacaaatgttgccactgctgttttagaacatataaaggcaagaaaattggatgtatattttgaatatgaagaaaaaataatgagcaaaactactctggataaatctcttctagatataatatcagaccctgatgcaggaactccagaagataaaatgaggttgtttcttatctattatataagcacacagcaagcaccttctgaggctgatttggagcaatataaaaaagctttaactgatgcaggatgcaaccttaatcctttacaatatatcaaacagtggaaggcttttaccaagatggcctcagctccggccagctatggcagcactaccactaaaccaatgggtcttttatcacgagtcatgaatacaggatcacagtttgtgatggaaggagtgaagaacctggttttgaaacagcaaaatctacctgttactcgtattttggacaatcttatggagatgaagtcaaaccccgaaactgatgactatagatattttgatcccaaaatgctgcggggcaatgacagctcagttcccagaaataaaaatccattccaagaggccattgtttttgtggtgggaggaggcaactacattgaatatcagaatcttgttgactacataaaggggaaacaaggcaaacacattttatatggctgcagtgagctttttaatgctacacagttcataaaacagttgtcacaacttggacaaaagtaacacagaagaaccttactatgataatctacttggaatgtggataaatgtaaaaagaagaaaagttagaagagcaatatgtttccttctctgtaacagtgtcctaacagtgaaaatcagagttatttgttaatttttaaggaaattatatacttaatatgtattgattaaaagaaacatttcagaaata

SEQ ID NO: 431288 - DNA, 1560 bp, Homo sapiens
agcagcggtagtggctcgtgggagccaagatggcggcggcggcggcagcgacagcagcagcagcagccagtattcgggaaaggcagacagtggctttgaagcgtatgttgaatttcaatgtgcctcatattaaaaacagcacaggagaaccagtatggaaggtactcatttatgacagatttggccaagatataatctctcctctgctatctgtgaaggagctaagagacatgggaatcactctgcatctgcttttacactctgatcgagatcctattccagatgttcctgcagtatactttgtaatgccaactgaagaaaatattgacagaatgtgccaggatcttcgaaatcaactatatgaatcatattatttaaattttatttctgctatttcaagaagtaaactggaagatattgcaaatgcagcgttagcagctagtgcagtaacacaagtagccaaggtttttgaccaatatctcaattttattactttggaagatgatatgtttgtattatgtaatcaaaataaggagcttgtttcatatcgtgccattaacaggccagatatcacagacacggaaatggaaactgttatggacactatagttgacagcctcttctgcttttttgttactctgggtgctgttcctataatcagatgttcaagaggaacagcagcagaaatggtagcagtgaaactagacaagaaacttcgagaaaatctaagagatgcaagaaacagtctttttacaggtgatacacttggagctggccaattcagcttccagaggcccttattagtccttgttgacagaaacatagatttggcaactcctttacatcatacttggacatatcaagcattggtgcacgatgtactggatttccatttaaacagggttaatttggaagaatcttcaggagtggaaaactctccagctggtgctagaccaaagagaaaaaacaagaagtcttatgatttaactccggttgataaattttggcaaaaacataaaggaagtccattcccagaagttgcagaatcagttcagcaagaactagaatcttacagagcacaggaagatgaggtcaaacgacttaaaagcattatgggactagaaggggaagatgaaggagccataagtatgctttctgacaataccgctaagctaacatcagctgttagttctttgccagaactccttgagaaaaaaagacttattgatctccatacaaatgttgccactgctgttttagaacatataaaggtaaatttaactttttcccccccacaatatgacttgcatttacatagggttttatactttgtaagatgctttagtattcattatcttattgagtccccactgtaacatgaagtataattatggaagacagcagtattatagttatttttttgcaaataaagtaacctaggaatccagaaagataagtgatttccaaggtcacatgtttagtaaatagaagtgggaatctatgatatttctattatattgcactgcctcaatatcactgctgtacatactactgtattaa

SEQ ID NO: 431289 - DNA, 1278 bp, Homo sapiens
agcagcggtagtggctcgtgggagccaagatggcggcggcggcggcagcgacagcagcagcagcagccagtattcgggaaaggcagacagtggctttgaagcgtatgttgaatttcaatgtgcctcatattaaaaacagcacaggagaaccagtatggaaggtactcatttatgacagatttggccaagatataatctctcctctgctatctgtgaaggagctaagagacatgggaatcactctgcatctgcttttacactctgatcgagatcctattccagatgttcctgcagtatactttgtaatgccaactgaagaaaatattgacagaatgtgccaggatcttcgaaatcaactatatgaatcatattatttaaattttatttctgctatttcaagaagtaaactggaagatattgcaaatgcagcgttagcagctagtgcagtaacacaagtagccaaggtttttgaccaatatctcaattttattactttggaagatgatatgtttgtattatgtaatcaaaataaggagcttgtttcatatcgtgccattaacaggccagatatcacagacacggaaatggaaactgttatggacactatagttgacagcctcttctgcttttttgttactctgggtgctgttcctataatcagatgttcaagaggaacagcagcagaaatggtagcagtgaaactagacaagaaacttcgagaaaatctaagagatgcaagaaacagtctttttacaggtgatacacttggagctggccaattcagcttccagaggcccttattagtccttgttgacagaaacatagatttggcaactcctttacatcatacttggacatatcaagcattggtgcacgatgtactggtaagagactaaatgcagcacttattactgaaatatagtaacatgcagtgttccctttaatttaaaattaacatcatggctacagaaacaaaaatgagaaggatggaactgagacctatgaacaaaacaagtgatgggatttggtattactgggtgtggatgctggaaaatgtgaagcattaaagtttagtttcaaatttatgatctttatagggtaaagtagtggttttgttggccatggaaaagaaggaaaagaaaacaattgaagaaaatggattattttgttttatttttaattttctaaccgaataagtaaataaatgtgttctcccttaggagaaaagcagtaatttctcccttttctctgggagtcagttaaacctcattttacgtt

SEQ ID NO: 431290 - DNA, 248 bp, Homo sapiens
aatcagctcggaccgatttgtgaatgtgatactgtgattgtcacaacttggacaaaagtaacacagaagaaccttactatgataatctacttggaatgtggataaatgtaaaaagaagaaaagttagaagagcaatatgtttccttctctgtaacagtgtcctaacagtgaaaatcagagttatttgttaatttttaaggaaattatatacttaatatgtattgattaaaagaaacatttcagaaata

SEQ ID NO: 431291 - DNA, 278 bp, Homo sapiens
cctgggtgacagagtgagatcttgtctcaaaaaataataataataattcagtgttttagtactaattgtagtgtacttgtattcgttgaaaaattctcttttcagaaaatgtctgcatcatagaagttagagttagtcagtagatattttaataccgtgacacccagagttagttctaataattagcttttaagtacaacttccttctttcatagggcttttaccaagatggcctcagctccggccagctatggcagcactaccactaaaccaatggg

SEQ ID NO: 431292 - DNA, 2174 bp, Homo sapiens
agcagcggtagtggctcgtgggagccaagatggcggcggcggcggcagcgacagcagcagcagcagccagtattcgggaaaggcagacagtggctttgaagcgtatgttgaatttcaatgtgcctcatattaaaaacagcacaggagaaccagtatggaaggtactcatttatgacagatttggccaagatataatctctcctctgctatctgtgaaggagctaagagacatgggaatcactctgcatctgcttttacactctgatcgagatcctattccagatgttcctgcagtatactttgtaatgccaactgaagaaaatattgacagaatgtgccaggatcttcgaaatcaactatatgaatcatattatttaaattttatttctgctatttcaagaagtaaactggaagatattgcaaatgcagcgttagcagctagtgcagtaacacaagtagccaaggtttttgaccaatatctcaattttattactttggaagatgatatgtttgtattatgtaatcaaaataaggagcttgtttcatatcgtgccattaacaggccagatatcacagacacggaaatggaaactgttatggacactatagttgacagcctcttctgcttttttgttactctgggtgctgttcctataatcagatgttcaagaggaacagcagcagaaatggtagcagtgaaactagacaagaaacttcgagaaaatctaagagatgcaagaaacagtctttttacaggtgatacacttggagctggccaattcagcttccagaggcccttattagtccttgttgacagaaacatagatttggcaactcctttacatcatacttggacatatcaagcattggtgcacgatgtactggatttccatttaaacagggttaatttggaagaatcttcaggagtggaaaactctccagctggtgctagaccaaagagaaaaaacaagaagtcttatgatttaactccggttgataaattttggcaaaaacataaaggaagtccattcccagaagttgcagaatcagttcagcaagaactagaatcttacagagcacaggaagatgaggtcaaacgacttaaaagcattatgggactagaaggggaagatgaaggagccataagtatgctttctgacaataccgctaagctaacatcagctgttagttctttgccagaactccttgagaaaaaaagacttattgatctccatacaaatgttgccactgctgttttagaacatataaaggcaagaaaattggatgtatattttgaatatgaagaaaaaataatgagcaaaactactctggataaatctcttctagatataatatcagaccctgatgcaggaactccagaagataaaatgaggttgtttcttatctattatataagcacacagcaagcaccttctgaggctgatttggagcaatataaaaaagctttaactgatgcaggatgcaaccttaatcctttacaatatatcaaacagtggaaggcttttaccaagatggcctcagctccggccagctatggcagcactaccactaaaccaatgggtcttttatcacgagtcatgaatacaggatcacagtttgtgatggaaggagtgaagaacctggttttgaaacagcaaaatctacctgttactcgtattttggacaatcttatggagatgaagtcaaaccccgaaactgatgactatagatattttgatcccaaaatgctgcggggcaatgacagctcagttcccagaaataaaaatccattccaagaggccattgtttttgtggtgggaggaggcaactacattgaatatcagaatcttgttgactacataaaggggaaacaaggcaaacacattttatatggctgcagtgagctttttaatgctacacagttcataaaacagttgtcacaacttggacaaaagtaacacagaagaaccttactatgataatctacttggaatgtggataaatgtaaaaagaagaaaagttagaagagcaatatgtttccttctctgtaacagtgtcctaacagtgaaaatcagagttatttgttaatttttaaggaaattatatacttaatatgtattgattaaaagaaacatttcagaaataaaatttcaacattgttaattttctctgat

SEQ ID NO: 431293 - DNA, 810 bp, Homo sapiens
atttataatacatttttttattgacagcatagaagtcttcctattttattataacgttttctaggcaagaaaattggatgtatattttgaatatgaagaaaaaataatgagcaaaactactctggataaatctcttctagatataatatcagaccctgatgcaggaactccagaagataaaatgaggttgtttcttatctattatataagcacacagcaagcaccttctgaggctgatttggagcaatataaaaaagctttaactgatgcaggatgcaaccttaatcctttacaatatatcaaacagtggaaggcttttaccaagatggcctcagctccggccagctatggcagcactaccactaaaccaatgggtcttttatcacgagtcatgaatacaggatcacagtttgtgatggaaggagtgaagaacctggttttgaaacagcaaaatctacctgttactcgtattttggacaatcttatggagatgaagtcaaaccccgaaactgatgactatagatattttgatcccaaaatgctgcggggcaatgacagctcagttcccagaaataaaaatccattccaagaggccattgtttttgtggtgggaggaggcaactacattgaatatcagaatcttgttgactacataaaggggaaacaaggaaaacacatataattttgtttgtgagtacttttaattgctcctatttcatattctttacgacatacttagaattatttcacaaataaccattttattataattatcggtacgctcgattatttttaacccatacttctacc

SEQ ID NO: 431294 - DNA, 2091 bp, Homo sapiens
agcagcggtagtggctcgtgggagccaagatggcggcggcggcggcagcgacagcagcagcagcagccagtattcgggaaaggcagacagtggctttgaagcgtatgttgaatttcaatgtgcctcatattaaaaacagcacaggagaaccagtatggaaggtactcatttatgacagatttggccaagatataatctctcctctgctatctgtgaaggagctaagagacatgggaatcactctgcatctgcttttacactctgatcgagatcctattccagatgttcctgcagtatactttgtaatgccaactgaagaaaatattgacagaatgtgccaggatcttcgaaatcaactatatgaatcatattatttaaattttatttctgctatttcaagaagtaaactggaagatattgcaaatgcagcgttagcagctagtgcagtaacacaagtagccaaggtttttgaccaatatctcaattttattactttggaagatgatatgtttgtattatgtaatccggaaatggaaactgttatggacactatagttgacagcctcttctgcttttttgttactctgggtgctgttcctataatcagatgttcaagaggaacagcagcagaaatggtagcagtgaaactagacaagaaacttcgagaaaatctaagagatgcaagaaacagtctttttacaggtgatacacttggagctggccaattcagcttccagaggcccttattagtccttgttgacagaaacatagatttggcaactcctttacatcatacttggacatatcaagcattggtgcacgatgtactggatttccatttaaacagggttaatttggaagaatcttcaggagtggaaaactctccagctggtgctagaccaaagagaaaaaacaagaagtcttatgatttaactccggttgataaattttggcaaaaacataaaggaagtccattcccagaagttgcagaatcagttcagcaagaactagaatcttacagagcacaggaagatgaggtcaaacgacttaaaagcattatgggactagaaggggaagatgaaggagccataagtatgctttctgacaataccgctaagctaacatcagctgttagttctttgccagaactccttgagaaaaaaagacttattgatctccatacaaatgttgccactgctgttttagaacatataaaggcaagaaaattggatgtatattttgaatatgaagaaaaaataatgagcaaaactactctggataaatctcttctagatataatatcagaccctgatgcaggaactccagaagataaaatgaggttgtttcttatctattatataagcacacagcaagcaccttctgaggctgatttggagcaatataaaaaagctttaactgatgcaggatgcaaccttaatcctttacaatatatcaaacagtggaaggcttttaccaagatggcctcagctccggccagctatggcagcactaccactaaaccaatgggtcttttatcacgagtcatgaatacaggatcacagtttgtgatggaaggagtgaagaacctggttttgaaacagcaaaatctacctgttactcgtattttggacaatcttatggagatgaagtcaaaccccgaaactgatgactatagatattttgatcccaaaatgctgcggggcaatgacagctcagttcccagaaataaaaatccattccaagaggccattgtttttgtggtgggaggaggcaactacattgaatatcagaatcttgttgactacataaaggggaaacaaggcaaacacattttatatggctgcagtgagctttttaatgctacacagttcataaaacagttgtcacaacttggacaaaagtaacacagaagaaccttactatgataatctacttggaatgtggataaatgtaaaaagaagaaaagttagaagagcaatatgtttccttctctgtaacagtgtcctaacagtgaaaatcagagttatttgttaatttttaaggaaattatatacttaatatgtattgattaaaagaaacatttcagaaata

SEQ ID NO: 431295 - DNA, 2030 bp, Homo sapiens
atgcgttgcgacttctcaacccaataataaagacgcaccgagtgtgaaatactcgtagcctgttgctgataactgatagtccagtatgtgagtactcgatggtcattcacttgcgtatctactcgaatctagtgagtctcatggcttgagctctcattattaacattatgtcccggccctatactttgtaatgccaactgaagaaaatattgacagaatgtgccaggatcttcgaaatcaactatatgaatcatattatttaaattttatttctgctatttcaagaagtaaactggaagatattgcaaatgcagcgttagcagctagtgcagtaacacaagtagccaaggtttttgaccaatatctcaattttattactttggaagatgatatgtttgtattatgtaatcaaaataaggagcttgtttcatatcgtgccattaacaggccagatatcacagacacggaaatggaaactgttatggacactatagttgacagcctcttctgcttttttgttactctgggtgctgttcctataatcagatgttcaagaggaacagcagcagaaatggtagcagtgaaactagacaagaaacttcgagaaaatctaagagatgcaagaaacagtctttttacaggtgatacacttggagctggccaattcagcttccagaggcccttattagtccttgttgacagaaacatagatttggcaactcctttacatcatacttggacatatcaagcattggtgcacgatgtactggatttccatttaaacagggttaatttggaagaatcttcaggagtggaaaactctccagctggtgctagaccaaagagaaaaaacaagaagtcttatgatttaactccggttgataaattttggcaaaaacataaaggaagtccattcccagaagttgcagaatcagttcagcaagaactagaatcttacagagcacaggaagatgaggtcaaacgacttaaaagcattatgggactagaaggggaagatgaaggagccataagtatgctttctgacaataccgctaagctaacatcagctgttagttctttgccagaactccttgagaaaaaaagacttattgatctccatacaaatgttgccactgctgttttagaacatataaaggcaagaaaattggatgtatattttgaatatgaagaaaaaataatgagcaaaactactctggataaatctcttctagatataatatcagaccctgatgcaggaactccagaagataaaatgaggttgtttcttatctattatataagcacacagcaagcaccttctgaggctgatttggagcaatataaaaaagctttaactgatgcaggatgcaaccttaatcctttacaatatatcaaacagtggaaggcttttaccaagatggcctcagctccggccagctatggcagcactaccactaaaccaatgggtcttttatcacgagtcatgaatacaggatcacagtttgtgatggaaggagtgaagaacctggttttgaaacagcaaaatctacctgttactcgtattttggacaatcttatggagatgaagtcaaaccccgaaactgatgactatagatattttgatcccaaaatgctgcggggcaatgacagctcagttcccagaaataaaaatccattccaagaggccattgtttttgtggtgggaggaggcaactacattgaatatcagaatcttgttgactacataaaggggaaacaaggcaaacacattttatatggctgcagtgagctttttaatgctacacagttcataaaacagttgtcacaacttggacaaaagtaacacagaagaaccttactatgataatctacttggaatgtggataaatgtaaaaagaagaaaagttagaagagcaatatgtttccttctctgtaacagtgtcctaacagtgaaaatcagagttatttgttaatttttaaggaaattatatacttaatatgtattgattaaaagaaacatttcagaaata

SEQ ID NO: 431296 - DNA, 2187 bp, Homo sapiens
  misc_feature (2148)..(2148): n is a, c, g, or t
  misc_feature (2187)..(2187): n is a, c, g, or t
agcagcggtagtggctcgtgggagccaagatggcggcggcggcggcagcgacagcagcagcagcagccagtattcgggaaaggcagacagtggctttgaagcgtatgttgaatttcaatgtgcctcatattaaaaacagcacaggagaaccagtatggaaggtactcatttatgacagatttggccaagatataatctctcctctgctatctgtgaaggagctaagagacatgggaatcactctgcatctgcttttacactctgatcgagatcctattccagatgttcctgcagtatactttgtaatgccaactgaagaaaatattgacagaatgtgccaggatcttcgaaatcaactatatgaatcatattatttaaattttatttctgctatttcaagaagtaaactggaagatattgcaaatgcagcgttagcagctagtgcagtaacacaagtagccaaggtttttgaccaatatctcaattttattactttggaagatgatatgtttgtattatgtaatcaaaataaggagcttgtttcatatcgtgccattaacaggccagatatcacagacacggaaatggaaactgttatggacactatagttgacagcctcttctgcttttttgttactctgggtgctgttcctataatcagatgttcaagaggaacagcagcagaaatggtagcagtgaaactagacaagaaacttcgagaaaatctaagagatgcaagaaacagtctttttacaggtgatacacttggagctggccaattcagcttccagaggcccttattagtccttgttgacagaaacatagatttggcaactcctttacatcatacttggacatatcaagcattggtgcacgatgtactggatttccatttaaacagggttaatttggaagaatcttcaggagtggaaaactctccagctggtgctagaccaaagagaaaaaacaagaagtcttatgatttaactccggttgataaattttggcaaaaacataaaggaagtccattcccagaagttgcagaatcagttcagcaagaactagaatcttacagagcacaggaagatgaggtcaaacgacttaaaagcattatgggactagaaggggaagatgaaggagccataagtatgctttctgacaataccgctaagctaacatcagctgttagttctttgccagaactccttgagaaaaaaagacttattgatctccatacaaatgttgccactgctgttttagaacatataaaggcaagaaaattggatgtatattttgaatatgaagaaaaaataatgagcaaaactactctggataaatctcttctagatataatatcagaccctgatgcaggaactccagaagataaaatgaggttgtttcttatctattatataagcacacagcaagcaccttctgaggctgatttggagcaatataaaaaagctttaactgatgcaggatgcaaccttaatcctttacaatatatcaaacagtggaaggcttttaccaagatggcctcagctccggccagctatggcagcactaccactaaaccaatgggtcttttatcacgagtcatgaatacaggatcacagtttgtgatggaaggagtgaagaacctggttttgaaacagcaaaatctacctgttactcgtattttggacaatcttatggagatgaagtcaaaccccgaaactgatgactatagatattttgatcccaaaatgctgcggggcaatgacagctcagttcccagaaataaaaatccattccaagaggccattgtttttgtggtgggaggaggcaactacattgaatatcagaatcttgttgactacataaaggggaaacaaggcaaacacattttatatggctgcagtgagctttttaatgctacacagttcataaaacagttgtcacaacttggacaaaagtaacacagaagaaccttactatgataatctacttggaatgtggataaatgtaaaaagaagaaaagttagaagagcaatatgtttccttctctgtaacagtgtcctaacagtgaaaatcagagttatttgttaatttttaaggaaattatatacttaatatgtattgattaaaagaaacatttcagaaataacntggcctcgttggcctcagcggtggagctctgtgccggan

SEQ ID NO: 431297 - DNA, 1163 bp, Homo sapiens
agcagcggtagtggctcgtgggagccaagatggcggcggcggcggcagcgacagcagcagcagcagccagtattcgggaaaggcagacagtggctttgaagcgtatgttgaatttcaatgtgcctcatattaaaaacagcacaggagaaccagtatggaaggtactcatttatgacagatttggccaagatataatctctcctctgctatctgtgaaggagctaagagacatgggaatcactctgcatctgcttttacactctgatcgagatcctattccagatgttcctgcagtatactttgtaatgccaactgaagaaaatattgacagaatgtgccaggatcttcgaaatcaactatatgaatcatattatttaaattttatttctgctatttcaagaagtaaactggaagatattgcaaatgcagcgttagcagctagtgcagtaacacaagtagccaaggtttttgaccaatatctcaattttattactttggaagatgatatgtttgtattatgtaatcaaaataaggagcttgtttcatatcgtgccattaacaggccagatatcacagacacggaaatggaaactgttatggacactatagttgacagcctcttctgcttttttgttactctgggtgctgttcctataatcagatgttcaagaggaacagcagcagaaatggtagcagtgaaactagacaagaaacttcgagaaaatctaagagatgcaagaaacagtctttttacaggtgatacacttggagctggccaattcagcttccagaggcccttattagtccttgttgacagaaacatagatttggcaactcctttacatcatacttggacatatcaagcattggtgcacgatgtactggagaggtggatttgattgttcagctgcagagctgtggacttcagtcaaagggatggacattattttatctctgtttttttacttggcctttattttttcaaatcttaggttctctttttgtacctttcaccctctgctactgactcttattatttgaaacattaaatcggaagttatactaatagacatagggactttaattaaagtttacctttttttccagtcaagaataaaaaaaaaatggtttccaaataaatatgtattttttaaaaggttaaa

SEQ ID NO: 431298 - DNA, 141 bp, Homo sapiens
acaggaggaaaaaagaatataaagaagaaaggaaaaaaaggagtctgaaagttttcttcagaggcttcatcattctaaaacttataggagtgctttcctaaaattatgggaatatgaggacaagaaagaaggtaagcaagg

SEQ ID NO: 431299 - DNA, 2427 bp, Homo sapiens
  misc_feature (1332)..(1332): n is a, c, g, or t
cgcccaggcgcttccgcgaccacccggagtgattgcccggcagagcgcgatactcgtttgtagtttcataaacattgatgttgggtcaatcatgttctcaatgtatttaaccatgtgtttttaaattttttaatttagttatcaaattgagaatctgatggtatggcattaatcaccttgaggaagaacctttatcgtttatctgattttcagatgcatagagctctggctgctttaaaaaataaacctctaaatcatgttcacaaggtagtcaaggagcgtctgtgcccttggttgtgttcacgacaacctgagcctttcggggtcagattccatcatgcccattgtaaaaagtttcattcgaaaaatggaaatgaccttcatccactcggtggaccagtgttctctcaagtatctgactgcgacaggcttgaacaaaatgttaaaaatgaggagagtcagatgttttacaggagactgagcaacttgacttcatcagaagaagtgctaagttttataagcacgatggaaaccctgcctgacactatggcagcaggagctttacaacgaatttgtgaagtggaaaaaaaggatggtgatcaagggctgccaaaagaaatactggagaatagcatctttcaagctttatgctttcagtttgaaaaggagccctcacagctgtcaaacactagtttagtgactgctttgcaagctctgattctgttgcatgtggatcctcaaagtagcctgttgctgaacctggtggcagaatgccaaaatcgtctcagaaaaggtggcatggaagttcgcaatctttgtattcttggggaaagtctgattacactgcacagttcaggttgtgtgacactagaactcattataaatcaacttcaaggtgaaaaattggaaacatttaccccggaggatattgtggccctttatagaatcttgcaggcatgtactgaaaaagtggatgaacaccaaacatttttaaataagataaacaacttttccctatcaatagtttccaacctgagtcctaaattgattagccaaatgctcactgccctggtggttcttgatcaaagtcaagcatttcctctgattataaaattgggcaaatatgtcgtgaggcatgtcccacatttcactaacgaggagcttaggagagtcttggaggcgttcatatattttgggcaccatgacacattttttacaaaagccctagagcatcgtgtagctgcggtgtgcctcacgttggatcctgaagttgtctgcagggtcatggagtactgcagtagagaactgattctttcaaaacccatcctcaangcagtggcagaaacttttgtttgccaaacagaaaaattttcacctcgtcagatttctgcgttaatggaaccatttgggaaactcaattatttgccaccaaatgcctctgctttatttagaaagctggaaaacgtgctattcactcatttcaattattttccacccaaatcattattgaaacttcttcattcatgttcacttaatgaatgccatccagtcaactttctggcaaaaatattcaagcctcttttccttcaacggctgcaaggtaaagaatctcatttggacacattgagtcgggcacaactgacccaacttttcttagcctcagtcctggaatgccctttctataagggtccaaaactccttcctaaatatcaagtgaagtcatttcttaccccatgctgttccctggagacccctgtggattctcagctttatagatatgtgaagattgggctgactaaccttttaggagcaagattatattttgctccaaaagtgttgacaccctattgttatacaatagatgttgaaattaaattagatgaagaaggatttgtattgccatccacagctaatgaagatatccataaaaggatagcactgtgtattgatggtccaaaaaggttttgctccaatagcaaacacttactggggaaagaagctattaaacaaagacacctacagttactcggttatcaagttgttcagatcccctatcatgagattgggatgctaaaatcaagacgtgaattggtggaatatttacaaagaaaactgttttctcaaaacactgttcattggttgcaagaatgaatactgacttcagaactcaaacaatggaagaacttgcatttttatggaactcagtattaaaagaaaaatataatgtgaattagccactttgcagaatatgttctagactggtgatctgaaagcatctgtagttttccttatactatgtatacatttattgtggtaaaatttaaaattaattttaatttaatactagtgtcatagatactttttgtacatcaaacaattgatcatgtgctgtaaaggaattcaatgaataaatgttatttttaagta

SEQ ID NO: 431300 - DNA, 855 bp, Homo sapiens
ttttttttttttctacctaggtaaccttcaatttattctctgttgttatatcttatttttctttctcacatttgcacttatgattttttagggtccaaaactccttcctaaatatcaagtgaagtcatttcttaccccatgctgttccctggagacccctgtggattctcagctttatagatatgtgaagattgggctgactaaccttttaggagcaagattatattttgctccaaaagtgttgacaccctattgttatacaataggtaagtagtgtaaggagttttgttgttttaaacctaagcatcctgttcgattttggagatatatgggacttagaagcaatagaagttctctgggaaatgcaaaatgggaatgggtcccttccctgaagggcaagttgggggttagcagcagagccgttgagtcaagactgttctgggtttaagtctcaaatattagccacgtagtagcagaatatcctgggcagaatatttaacctttttctgcttgcttcttcctctgtaaaatgatagtaatattgacctcaaagacttacttaaggtctaaataaaatagtacctggaacgtaggaaatgctcactaattgttagctactactataacctaggcttgtactgtccaaatatagtagccactagaccatgtggctatttaaatttaaattattaaaagtttaagaaaattcaattcctcagtcacattgtaagtgctcagtagccacatgtggctcatggctgccaaattggacagcaccattataaagatttccacatcacagaaatttctcctggacagcactgacaagagactccaagtcctccgtccttacag

SEQ ID NO: 431301 - DNA, 2338 bp, Homo sapiens
  misc_feature (1243)..(1243): n is a, c, g, or t
cgcccaggcgcttccgcgaccacccggagtgattgcccggcagagcgcgttatcaaattgagaatctgatggtatggcattaatcaccttgaggaagaacctttatcgtttatctgattttcagatgcatagagctctggctgctttaaaaaataaacctctaaatcatgttcacaaggtagtcaaggagcgtctgtgcccttggttgtgttcacgacaacctgagcctttcggggtcagattccatcatgcccattgtaaaaagtttcattcgaaaaatggaaatgaccttcatccactcggtggaccagtgttctctcaagtatctgactgcgacaggcttgaacaaaatgttaaaaatgaggagagtcagatgttttacaggagactgagcaacttgacttcatcagaagaagtgctaagttttataagcacgatggaaaccctgcctgacactatggcagcaggagctttacaacgaatttgtgaagtggaaaaaaaggatggtgatcaagggctgccaaaagaaatactggagaatagcatctttcaagctttatgctttcagtttgaaaaggagccctcacagctgtcaaacactagtttagtgactgctttgcaagctctgattctgttgcatgtggatcctcaaagtagcctgttgctgaacctggtggcagaatgccaaaatcgtctcagaaaaggtggcatggaagttcgcaatctttgtattcttggggaaagtctgattacactgcacagttcaggttgtgtgacactagaactcattataaatcaacttcaaggtgaaaaattggaaacatttaccccggaggatattgtggccctttatagaatcttgcaggcatgtactgaaaaagtggatgaacaccaaacatttttaaataagataaacaacttttccctatcaatagtttccaacctgagtcctaaattgattagccaaatgctcactgccctggtggttcttgatcaaagtcaagcatttcctctgattataaaattgggcaaatatgtcgtgaggcatgtcccacatttcactaacgaggagcttaggagagtcttggaggcgttcatatattttgggcaccatgacacattttttacaaaagccctagagcatcgtgtagctgcggtgtgcctcacgttggatcctgaagttgtctgcagggtcatggagtactgcagtagagaactgattctttcaaaacccatcctcaangcagtggcagaaacttttgtttgccaaacagaaaaattttcacctcgtcagatttctgcgttaatggaaccatttgggaaactcaattatttgccaccaaatgcctctgctttatttagaaagctggaaaacgtgctattcactcatttcaattattttccacccaaatcattattgaaacttcttcattcatgttcacttaatgaatgccatccagtcaactttctggcaaaaatattcaagcctcttttccttcaacggctgcaaggtaaagaatctcatttggacacattgagtcgggcacaactgacccaacttttcttagcctcagtcctggaatgccctttctataagggtccaaaactccttcctaaatatcaagtgaagtcatttcttaccccatgctgttccctggagacccctgtggattctcagctttatagatatgtgaagattgggctgactaaccttttaggagcaagattatattttgctccaaaagtgttgacaccctattgttatacaatagatgttgaaattaaattagatgaagaaggatttgtattgccatccacagctaatgaagatatccataaaaggatagcactgtgtattgatggtccaaaaaggttttgctccaatagcaaacacttactggggaaagaagctattaaacaaagacacctacagttactcggttatcaagttgttcagatcccctatcatgagattgggatgctaaaatcaagacgtgaattggtggaatatttacaaagaaaactgttttctcaaaacactgttcattggttgcaagaatgaatactgacttcagaactcaaacaatggaagaacttgcatttttatggaactcagtattaaaagaaaaatataatgtgaattagccactttgcagaatatgttctagactggtgatctgaaagcatctgtagttttccttatactatgtatacatttattgtggtaaaatttaaaattaattttaatttaatactagtgtcatagatactttttgtacatcaaacaattgatcatgtgctgtaaaggaattcaatgaataaatgttatttttaagta

SEQ ID NO: 431302 - DNA, 876 bp, Homo sapiens
cgcccaggcgcttccgcgaccacccggagtgattgcccggcagagcgcggtaaagaatctcatttggacacattgagtcgggcacaactgacccaacttttcttagcctcagtcctggaatgccctttctataagggtccaaaactccttcctaaatatcaagtgaagtcatttcttaccccatgctgttccctggagacccctgtggattctcagctttatagatatgtgaagattgggctgactaaccttttaggagcaagattatattttgctccaaaagtgttgacaccctattgttatacaatagatgttgaaattaaattagatgaagaaggatttgtattgccatccacagctaatgaagatatccataaaaggatagcactgtgtattgatggtccaaaaaggttttgctccaatagcaaacacttactggggaaagaagctattaaacaaagacacctacagttactcggttatcaagttgttcagatcccctatcatgagattgggatgctaaaatcaagacgtgaattggtggaatatttacaaagaaaactgttttctcaaaacactgttcattggttgcaagaatgaatactgacttcagaactcaaacaatggaagaacttgcatttttatggaactcagtattaaaagaaaaatataatgtgaattagccactttgcagaatatgttctagactggtgatctgaaagcatctgtagttttccttatactatgtatacatttattgtggtaaaatttaaaattaattttaatttaatactagtgtcatagatactttttgtacatcaaacaattgatcatgtgctgtaaaggaattcaatgaataaatgttatttttaagta

SEQ ID NO: 431303 - DNA, 2459 bp, Homo sapiens
  misc_feature (1243)..(1243): n is a, c, g, or t
cgcccaggcgcttccgcgaccacccggagtgattgcccggcagagcgcgttatcaaattgagaatctgatggtatggcattaatcaccttgaggaagaacctttatcgtttatctgattttcagatgcatagagctctggctgctttaaaaaataaacctctaaatcatgttcacaaggtagtcaaggagcgtctgtgcccttggttgtgttcacgacaacctgagcctttcggggtcagattccatcatgcccattgtaaaaagtttcattcgaaaaatggaaatgaccttcatccactcggtggaccagtgttctctcaagtatctgactgcgacaggcttgaacaaaatgttaaaaatgaggagagtcagatgttttacaggagactgagcaacttgacttcatcagaagaagtgctaagttttataagcacgatggaaaccctgcctgacactatggcagcaggagctttacaacgaatttgtgaagtggaaaaaaaggatggtgatcaagggctgccaaaagaaatactggagaatagcatctttcaagctttatgctttcagtttgaaaaggagccctcacagctgtcaaacactagtttagtgactgctttgcaagctctgattctgttgcatgtggatcctcaaagtagcctgttgctgaacctggtggcagaatgccaaaatcgtctcagaaaaggtggcatggaagttcgcaatctttgtattcttggggaaagtctgattacactgcacagttcaggttgtgtgacactagaactcattataaatcaacttcaaggtgaaaaattggaaacatttaccccggaggatattgtggccctttatagaatcttgcaggcatgtactgaaaaagtggatgaacaccaaacatttttaaataagataaacaacttttccctatcaatagtttccaacctgagtcctaaattgattagccaaatgctcactgccctggtggttcttgatcaaagtcaagcatttcctctgattataaaattgggcaaatatgtcgtgaggcatgtcccacatttcactaacgaggagcttaggagagtcttggaggcgttcatatattttgggcaccatgacacattttttacaaaagccctagagcatcgtgtagctgcggtgtgcctcacgttggatcctgaagttgtctgcagggtcatggagtactgcagtagagaactgattctttcaaaacccatcctcaangcagtggcagaaacttttgtttgccaaacagaaaaattttcacctcgtcagatttctgcgttaatggaaccatttgggaaactcaattatttgccaccaaatgcctctgctttatttagaaagctggaaaacgtgctattcactcatttcaattattttccacccaaatcattattgaaacttcttcattcatgttcacttaatgaatgccatccagtcaactttctggcaaaaatattcaagcctcttttccttcaacggctgcaaggtaaagaatctcatttggacacattgagtcgggcacaactgacccaacttttcttagcctcagtcctggaatgccctttctataagggtccaaaactccttcctaaatatcaagtgaagtcatttcttaccccatgctgttccctggagacccctgtggattctcagctttatagatatgtgaagattgggctgactaaccttttaggagcaagattatattttgctccaaaagtgttgacaccctattgttatacaatagccttcagtccaattgatcaatgcaaggtggaaggaatcaaagcaaagcaaaggaatgaatacaggaagatagtgtttgtgagggtatcacacgaggaatttttcctttcttctctcaccagatgttgaaattaaattagatgaagaaggatttgtattgccatccacagctaatgaagatatccataaaaggatagcactgtgtattgatggtccaaaaaggttttgctccaatagcaaacacttactggggaaagaagctattaaacaaagacacctacagttactcggttatcaagttgttcagatcccctatcatgagattgggatgctaaaatcaagacgtgaattggtggaatatttacaaagaaaactgttttctcaaaacactgttcattggttgcaagaatgaatactgacttcagaactcaaacaatggaagaacttgcatttttatggaactcagtattaaaagaaaaatataatgtgaattagccactttgcagaatatgttctagactggtgatctgaaagcatctgtagttttccttatactatgtatacatttattgtggtaaaatttaaaattaattttaatttaatactagtgtcatagatactttttgtacatcaaacaattgatcatgtgctgtaaaggaattcaatgaataaatgttatttttaagta

SEQ ID NO: 431304 - DNA, 2389 bp, Homo sapiens
  misc_feature (1243)..(1243): n is a, c, g, or t
  misc_feature (2346)..(2346): n is a, c, g, or t
cgcccaggcgcttccgcgaccacccggagtgattgcccggcagagcgcgttatcaaattgagaatctgatggtatggcattaatcaccttgaggaagaacctttatcgtttatctgattttcagatgcatagagctctggctgctttaaaaaataaacctctaaatcatgttcacaaggtagtcaaggagcgtctgtgcccttggttgtgttcacgacaacctgagcctttcggggtcagattccatcatgcccattgtaaaaagtttcattcgaaaaatggaaatgaccttcatccactcggtggaccagtgttctctcaagtatctgactgcgacaggcttgaacaaaatgttaaaaatgaggagagtcagatgttttacaggagactgagcaacttgacttcatcagaagaagtgctaagttttataagcacgatggaaaccctgcctgacactatggcagcaggagctttacaacgaatttgtgaagtggaaaaaaaggatggtgatcaagggctgccaaaagaaatactggagaatagcatctttcaagctttatgctttcagtttgaaaaggagccctcacagctgtcaaacactagtttagtgactgctttgcaagctctgattctgttgcatgtggatcctcaaagtagcctgttgctgaacctggtggcagaatgccaaaatcgtctcagaaaaggtggcatggaagttcgcaatctttgtattcttggggaaagtctgattacactgcacagttcaggttgtgtgacactagaactcattataaatcaacttcaaggtgaaaaattggaaacatttaccccggaggatattgtggccctttatagaatcttgcaggcatgtactgaaaaagtggatgaacaccaaacatttttaaataagataaacaacttttccctatcaatagtttccaacctgagtcctaaattgattagccaaatgctcactgccctggtggttcttgatcaaagtcaagcatttcctctgattataaaattgggcaaatatgtcgtgaggcatgtcccacatttcactaacgaggagcttaggagagtcttggaggcgttcatatattttgggcaccatgacacattttttacaaaagccctagagcatcgtgtagctgcggtgtgcctcacgttggatcctgaagttgtctgcagggtcatggagtactgcagtagagaactgattctttcaaaacccatcctcaangcagtggcagaaacttttgtttgccaaacagaaaaattttcacctcgtcagatttctgcgttaatggaaccatttgggaaactcaattatttgccaccaaatgcctctgctttatttagaaagctggaaaacgtgctattcactcatttcaattattttccacccaaatcattattgaaacttcttcattcatgttcacttaatgaatgccatccagtcaactttctggcaaaaatattcaagcctcttttccttcaacggctgcaaggtaaagaatctcatttggacacattgagtcgggcacaactgacccaacttttcttagcctcagtcctggaatgccctttctataagggtccaaaactccttcctaaatatcaagtgaagtcatttcttaccccatgctgttccctggagacccctgtggattctcagctttatagatatgtgaagattgggctgactaaccttttaggagcaagattatattttgctccaaaagtgttgacaccctattgttatacaatagatgttgaaattaaattagatgaagaaggatttgtattgccatccacagctaatgaagatatccataaaaggatagcactgtgtattgatggtccaaaaaggttttgctccaatagcaaacacttactggggaaagaagctattaaacaaagacacctacagttactcggttatcaagttgttcagatcccctatcatgagattgggatgctaaaatcaagacgtgaattggtggaatatttacaaagaaaactgttttctcaaaacactgttcattggttgcaagaatgaatactgacttcagaactcaaacaatggaagaacttgcatttttatggaactcagtattaaaagaaaaatataatgtgaattagccactttgcagaatatgttctagactggtgatctgaaagcatctgtagttttccttatactatgtatacatttattgtggtaaaatttaaaattaattttaatttaatactagtgtcatagatactttttgtacatcaaacaattgatcatgtgctgtaaaggaattcaatgaataaatgttatttttaagtaaacaaaanaagaaaagaagaagaaaatgtgtcgggggagacacgcgtaaga

SEQ ID NO: 431305 - DNA, 1062 bp, Homo sapiens
acatattttatctcttttaattgtattctgtagctaggagcttgggttcttggaagtcaatttcattggtggcaagaggagggcataattaattctaacaagttcatttcatagtgtcatttaaaaatagaatacttctgtctggagtgtgtaaattgatgttgaatgttcatgatgttctctcatacatacctcaattcagacgtaactatgactgggatgctttctgtttcaggtaaagaatctcatttggacacattgagtcgggcacaactgacccaacttttcttagcctcagtcctggaatgccctttctataagggtccaaaactccttcctaaatatcaagtgaagtcatttcttaccccatgctgttccctggagacccctgtggattctcagctttatagatatgtgaagattgggctgactaaccttttaggagcaagattatattttgctccaaaagtgttgacaccctattgttatacaatagatgttgaaattaaattagatgaagaaggatttgtattgccatccacagctaatgaagatatccataaaaggatagcactgtgtattgatggtccaaaaaggttttgctccaatagcaaacacttactggggaaagaagctattaaacaaagacacctacagttactcggttatcaagttgttcagatcccctatcatgagattgggatgctaaaatcaagacgtgaattggtggaatatttacaaagaaaactgttttctcaaaacactgttcattggttgcaagaatgaatactgacttcagaactcaaacaatggaagaacttgcatttttatggaactcagtattaaaagaaaaatataatgtgaattagccactttgcagaatatgttctagactggtgatctgaaagcatctgtagttttccttatactatgtatacatttattgtggtaaaatttaaaattaattttaatttaatactagtgtcatagatactttttgtacatcaaacaattgatcatgtgctgtaaaggaattcaatgaataaatgttatttttaagta

SEQ ID NO: 431306 - DNA, 953 bp, Homo sapiens
ttttttttttttctacctaggtaaccttcaatttattctctgttgttatatcttatttttctttctcacatttgcacttatgattttttagggtccaaaactccttcctaaatatcaagtgaagtcatttcttaccccatgctgttccctggagacccctgtggattctcagctttatagatatgtgaagattgggctgactaaccttttaggagcaagattatattttgctccaaaagtgttgacaccctattgttatacaatagccttcagtccaattgatcaatgcaaggtggaaggaatcaaagcaaagcaaaggaatgaatacaggaagatagtgtttgtgagggtatcacacgaggaatttttcctttcttctctcaccagatgttgaaattaaattagatgaagaaggatttgtattgccatccacagctaatgaagatatccataaaaggatagcactgtgtattgatggtccaaaaaggttttgctccaatagcaaacacttactggggaaagaagctattaaacaaagacacctacagttactcggttatcaagttgttcagatcccctatcatgagattgggatgctaaaatcaagacgtgaattggtggaatatttacaaagaaaactgttttctcaaaacactgttcattggttgcaagaatgaatactgacttcagaactcaaacaatggaagaacttgcatttttatggaactcagtattaaaagaaaaatataatgtgaattagccactttgcagaatatgttctagactggtgatctgaaagcatctgtagttttccttatactatgtatacatttattgtggtaaaatttaaaattaattttaatttaatactagtgtcatagatactttttgtacatcaaacaattgatcatgtgctgtaaaggaattcaatgaataaatgttatttttaagta

SEQ ID NO: 431307 - DNA, 997 bp, Homo sapiens
cgcccaggcgcttccgcgaccacccggagtgattgcccggcagagcgcggtaaagaatctcatttggacacattgagtcgggcacaactgacccaacttttcttagcctcagtcctggaatgccctttctataagggtccaaaactccttcctaaatatcaagtgaagtcatttcttaccccatgctgttccctggagacccctgtggattctcagctttatagatatgtgaagattgggctgactaaccttttaggagcaagattatattttgctccaaaagtgttgacaccctattgttatacaatagccttcagtccaattgatcaatgcaaggtggaaggaatcaaagcaaagcaaaggaatgaatacaggaagatagtgtttgtgagggtatcacacgaggaatttttcctttcttctctcaccagatgttgaaattaaattagatgaagaaggatttgtattgccatccacagctaatgaagatatccataaaaggatagcactgtgtattgatggtccaaaaaggttttgctccaatagcaaacacttactggggaaagaagctattaaacaaagacacctacagttactcggttatcaagttgttcagatcccctatcatgagattgggatgctaaaatcaagacgtgaattggtggaatatttacaaagaaaactgttttctcaaaacactgttcattggttgcaagaatgaatactgacttcagaactcaaacaatggaagaacttgcatttttatggaactcagtattaaaagaaaaatataatgtgaattagccactttgcagaatatgttctagactggtgatctgaaagcatctgtagttttccttatactatgtatacatttattgtggtaaaatttaaaattaattttaatttaatactagtgtcatagatactttttgtacatcaaacaattgatcatgtgctgtaaaggaattcaatgaataaatgttatttttaagta

SEQ ID NO: 431308 - DNA, 2361 bp, Homo sapiens
  misc_feature (1243)..(1243): n is a, c, g, or t
cgcccaggcgcttccgcgaccacccggagtgattgcccggcagagcgcgttatcaaattgagaatctgatggtatggcattaatcaccttgaggaagaacctttatcgtttatctgattttcagatgcatagagctctggctgctttaaaaaataaacctctaaatcatgttcacaaggtagtcaaggagcgtctgtgcccttggttgtgttcacgacaacctgagcctttcggggtcagattccatcatgcccattgtaaaaagtttcattcgaaaaatggaaatgaccttcatccactcggtggaccagtgttctctcaagtatctgactgcgacaggcttgaacaaaatgttaaaaatgaggagagtcagatgttttacaggagactgagcaacttgacttcatcagaagaagtgctaagttttataagcacgatggaaaccctgcctgacactatggcagcaggagctttacaacgaatttgtgaagtggaaaaaaaggatggtgatcaagggctgccaaaagaaatactggagaatagcatctttcaagctttatgctttcagtttgaaaaggagccctcacagctgtcaaacactagtttagtgactgctttgcaagctctgattctgttgcatgtggatcctcaaagtagcctgttgctgaacctggtggcagaatgccaaaatcgtctcagaaaaggtggcatggaagttcgcaatctttgtattcttggggaaagtctgattacactgcacagttcaggttgtgtgacactagaactcattataaatcaacttcaaggtgaaaaattggaaacatttaccccggaggatattgtggccctttatagaatcttgcaggcatgtactgaaaaagtggatgaacaccaaacatttttaaataagataaacaacttttccctatcaatagtttccaacctgagtcctaaattgattagccaaatgctcactgccctggtggttcttgatcaaagtcaagcatttcctctgattataaaattgggcaaatatgtcgtgaggcatgtcccacatttcactaacgaggagcttaggagagtcttggaggcgttcatatattttgggcaccatgacacattttttacaaaagccctagagcatcgtgtagctgcggtgtgcctcacgttggatcctgaagttgtctgcagggtcatggagtactgcagtagagaactgattctttcaaaacccatcctcaangcagtggcagaaacttttgtttgccaaacagaaaaattttcacctcgtcagatttctgcgttaatggaaccatttgggaaactcaattatttgccaccaaatgcctctgctttatttagaaagctggaaaacgtgctattcactcatttcaattattttccacccaaatcattattgaaacttcttcattcatgttcacttaatgaatgccatccagtcaactttctggcaaaaatattcaagcctcttttccttcaacggctgcaaggtaaagaatctcatttggacacattgagtcgggcacaactgacccaacttttcttagcctcagtcctggaatgccctttctataagggtccaaaactccttcctaaatatcaagtgaagtcatttcttaccccatgctgttccctggagacccctgtggattctcagctttatagatatgtgaagattgggctgactaaccttttaggagcaagattatattttgctccaaaagtgttgacaccctattgttatacaataggtaagtagtgtaaggagttttgttgttttaaacctaagcatcctgttcgattttggagatatatgggacttagaagcaatagaagttctctgggaaatgcaaaatgggaatgggtcccttccctgaagggcaagttgggggttagcagcagagccgttgagtcaagactgttctgggtttaagtctcaaatattagccacgtagtagcagaatatcctgggcagaatatttaacctttttctgcttgcttcttcctctgtaaaatgatagtaatattgacctcaaagacttacttaaggtctaaataaaatagtacctggaacgtaggaaatgctcactaattgttagctactactataacctaggcttgtactgtccaaatatagtagccactagaccatgtggctatttaaatttaaattattaaaagtttaagaaaattcaattcctcagtcacattgtaagtgctcagtagccacatgtggctcatggctgccaaattggacagcaccattataaagatttccacatcacagaaatttctcctggacagcactgacaagagactccaagtcctccgtccttacag

SEQ ID NO: 431309 - DNA, 3201 bp, Homo sapiens
ctccttaccatggtgacggccgcagagccgccaggagcagccgctggagtgcgaaaacgctctcaattttcgggtctcaaagacccacaagcccacaccacgcaggccgggacaggaaagagtcaccctttaaaacggccgagtgaagagcaagaaccacgcagcggttccgagcctctgttttccgcttttagctaggaggacggaagttgctggcaggcggcatttggccggtacaccgccggaagtgtggaggtgtggctgcccgaggcggtagagcggagaaagcctattttcttttcgtttagatacattgccttttgcctaggctggcgtcgagacttgaggccgttgcagactttggcgcggctcgcgcctcctgcttcaagagcccagcggtgagagctggcctgcggcacgcggcctaatgccagacagtaacagtttggaggatcaagatgttgaccaacttgaggatatttgcaatgagtcatcagacaatacccagtgtgtatattaataatatatgctgctataaaataagagcaagtttaaaaagattaaagccacatgtgccgcttggaagaaattgcagttctctaccaggcttaataggaaatgatatcaaatcccttcattccatcatcaatcctcccatagctaaaatccgtaatattggaattatggctcatattgatgcaggcaaaactaccaccacagaaagaatattgtactattccggatatacaagatcactgggagatgttgatgatggagacacagtgacagatttcatggcccaagagcgagaaagaggcattactattcaatcagctgctgttacatttgattggaaaggttatagagtcaatctaattgatacaccaggtcatgtggactttaccttggaggttgagcggtgcctaagagtgttggatggtgcagtggctgtatttgatgcctctgctggtgtagaggcccagactctcacagtatggaggcaagctgataaacacaatatacctcgaatctgttttttaaacaagatggacaaaactggagcaagctttaagtatgcagttgaaagcatcagagagaagttaaaggcaaagcctttgcttttacagttaccaattggtgaagccaaaactttcaaaggagtggtggatgtagtaatgaaagaaaaacttctttggaattgcaattcaaatgatggaaaagactttgagagaaagcccctcttggaaatgaatgatcctgaattgctgaaggaaacaactgaagcaaggaatgccttaattgaacaagttgcagatttggatgatgaatttgctgacttggttttagaagaatttagtgagaattttgatttgttaccagctgaaaagctacagactgcaatacatagagtgacactagctcagacagcagtgcctgtgctttgtggaagtgccctgaaaaacaaagggatacagcccttgttagatgctgttactatgtacttaccttcacctgaagagcgtaactatgaatttctgcagtggtataaggatgacttatgtgcattggcatttaaagttctccatgacaagcagcgaggaccactggtttttatgcgcatttactcaggcactataaaaccccagttggccattcataatattaatggaaactgcacggagagaataagtcgtctgcttttgccgtttgctgaccaacatgtagaaatcccttcattgactgctggtaacattgctttgactgttgggcttaaacatactgccactggagacaccattgtctcatccaagtccagtgcattagctgcagctcgtagagccgaacgggagggagaaaagaagcacagacaaaacaatgaagcagagagacttttattggctggagtggagattccagaacctgttttcttctgtaccatagaacccccatcactgtctaagcagccagatttggaacatgcgttgaaatgtcttcagcgtgaagatcccagtttgaaagtgaggctagatcctgactctggacaaactgttctgtgtggtatgggggagttacatatagagattattcatgatcgaatcaagagggaatatggactggagacctatctcgggcctctccaggtggcatatcgagagaccatcctaaactcagttcgtgccacagataccttagatagaactttaggagacaaaaggcatcttgtgactgtagaagtggaagcaaggccaattgaaacatcatctgttatgcctgtgattgagtttgagtatgctgaaagtatcaatgaaggccttttgaaggtctcccaagaggccattgaaaatggaattcacagcgcatgtctccaaggaccattgcttggatccccaattcaggatgtagcaattactttacattccctgacaattcatcctggcacctccacaactatgatttctgcctgtgtctcaagatgcgtgcaaaaggctctgaagaaagctgataagcaagttttggagcctctgatgaatcttgaggttacagtagctagagattatctcagccctgtcctggcagatctggcacaaagaagaggaaacattcaggaaattcagactcgccaggacaacaaagttgttattggatttgttcccttagcagaaattatgggttattcaactgtgcttcgaacgctaacatcaggctcagctacttttgccttagaactatctacttatcaagccatgaatcctcaagatcaaaatacactgctcaaccggagaagtggtttgacctaaatgttttagtttttggagagaaattcaggagcacctagctacttcattttcagtaagaacaatttttattgctttatttattggacgaataaagtactgtttcagtacattcagagaactagataaaagatataacttaagctttgatagtggcactggagccacccgttttaatttatataatgagaaatgtgctttgatgtttaaagccactgtacctgaatcatgctgttcatctatgaagttattactataagtagccttcagaagagtggtatcacaaagttgtgtttcttttgtgtccttaagcttgtctcacaagaaagatgccaggcctctaaatgtaataagatagagggtcaaaggttcaatcaataaaaatattttattcaaaaaaacagtc

SEQ ID NO: 431310 - DNA, 2095 bp, Homo sapiens
ctccttaccatggtgacggccgcagagccgccaggagcagccgctggagtgcgaaaacgctctcaattttcgggtctcaaagacccacaagcccacaccacgcaggccgggacaggaaagagtcaccctttaaaacggccgagtgaagagcaagaaccacgcagcggttccgagcctctgttttccgcttttagctaggaggacggaagttgctggcaggcggcatttggccggtacaccgccggaagtgtggaggtgtggctgcccgaggcggtagagcggagaaagcctattttcttttcgtttagatacattgccttttgcctaggctggcgtcgagacttgaggccgttgcagactttggcgcggctcgcgcctcctgcttcaagagcccagcggtgagagctggcctgcggcacgcggcctaatgccagacagtaacagtttggaggatcaagatgttgaccaacttgaggatatttgcaatgagtcatcagacaatacccagtgtgtatattaataatatatgctgctataaaataagagcaagtttaaaaagattaaagccacatgtgccgcttggaagaaattgcagttctctaccaggcttaataggaaatgatatcaaatcccttcattccatcatcaatcctcccatagctaaaatccgtaatattggaattatggctcatattgatgcaggcaaaactaccaccacagaaagaatattgtactattccggatatacaagatcactgggagatgttgatgatggagacacagtgacagatttcatggcccaagagcgagaaagaggcattactattcaatcagctgctgttacatttgattggaaaggttatagagtcaatctaattgatacaccaggtcatgtggactttaccttggaggttgagcggtgcctaagagtgttggatggtgcagtggctgtatttgatgcctctgctggtgtagaggcccagactctcacagtatggaggcaagctgataaacacaatatacctcgaatctgttttttaaacaagatggacaaaactggagcaagctttaagtatgcagttgaaagcatcagagagaagttaaaggcaaagcctttgcttttacagttaccaattggtgaagccaaaactttcaaaggagtggtggatgtagtaatgaaagaaaaacttctttggaattgcaattcaaatgatggaaaagactttgagagaaagcccctcttggaaatgaatgatcctgaattgctgaaggaaacaactgaagcaaggaatgccttaattgaacaagttgcagatttggatgatgaatttgctgacttggttttagaagaatttagtgagaattttgatttgttaccagctgaaaagctacagactgcaatacatagagtgacactagctcagacagcagtgcctgtgctttgtggaagtgccctgaaaaacaaagggatacagcccttgttagatgctgttactatgtacttaccttcacctgaagagcgtaactatgaatttctgcagtggtataaggatgacttatgtgcattggcatttaaagttctccatgacaagcagcgaggaccactggtttttatgcgcatttactcaggcactataaaaccccagttggccattcataatattaatggaaactgcacggagagaataagtcgtctgcttttgccgtttgctgaccaacatgtagaaatcccttcattgactgctggtaacattgctttgactgttgggcttaaacatactgccactggagacaccattgtctcatccaagtccagtgcattagctgcagctcgtagagccgaacgggagggagaaaagaagcacagacaaaacaatgaagcagagagacttttattggctggagtggagattccagaacctgttttcttctgtaccatagaacccccatcactgtctaagcagccaggtataaatggtcttagtgtgtcaactaattagtgcgctgataatttatataaaatagttgcaatataccctcaagagatttcttatgtgattgaggtaaattttatctgaatatattggtaaacatt

SEQ ID NO: 431311 - DNA, 3177 bp, Homo sapiens
tattcatctgtttttctttttcgttggtgtaaagccaacaccctgtctaaaaaacataaatttctttaatcattttgcctcttttctctgtgcttcaattaataaaaaatggaaagaatctaaaaaaaaaaaaaaaaaaaaaaaagcctattttcttttcgtttagatacattgccttttgcctaggctggcgtcgagacttgaggccgttgcagactttggcgcggctcgcgcctcctgcttcaagagcccagcggtgagagctggcctgcggcacgcggcctaatgccagtcacaactgtggagagactatgaggccctgaactttggcgttaccaatgaaaagggaatggattcaaggccaggcatggtggctcacgcctgtaatcccagcactttgggaggccgagacagtaacagtttggaggatcaagatgttgaccaacttgaggatatttgcaatgagtcatcagacaatacccagtgtgtatattaataatatatgctgctataaaataagagcaagtttaaaaagattaaagccacatgtgccgcttggaagaaattgcagttctctaccaggcttaataggaaatgatatcaaatcccttcattccatcatcaatcctcccatagctaaaatccgtaatattggaattatggctcatattgatgcaggcaaaactaccaccacagaaagaatattgtactattccggatatacaagatcactgggagatgttgatgatggagacacagtgacagatttcatggcccaagagcgagaaagaggcattactattcaatcagctgctgttacatttgattggaaaggttatagagtcaatctaattgatacaccaggtcatgtggactttaccttggaggttgagcggtgcctaagagtgttggatggtgcagtggctgtatttgatgcctctgctggtgtagaggcccagactctcacagtatggaggcaagctgataaacacaatatacctcgaatctgttttttaaacaagatggacaaaactggagcaagctttaagtatgcagttgaaagcatcagagagaagttaaaggcaaagcctttgcttttacagttaccaattggtgaagccaaaactttcaaaggagtggtggatgtagtaatgaaagaaaaacttctttggaattgcaattcaaatgatggaaaagactttgagagaaagcccctcttggaaatgaatgatcctgaattgctgaaggaaacaactgaagcaaggaatgccttaattgaacaagttgcagatttggatgatgaatttgctgacttggttttagaagaatttagtgagaattttgatttgttaccagctgaaaagctacagactgcaatacatagagtgacactagctcagacagcagtgcctgtgctttgtggaagtgccctgaaaaacaaagggatacagcccttgttagatgctgttactatgtacttaccttcacctgaagagcgtaactatgaatttctgcagtggtataaggatgacttatgtgcattggcatttaaagttctccatgacaagcagcgaggaccactggtttttatgcgcatttactcaggcactataaaaccccagttggccattcataatattaatggaaactgcacggagagaataagtcgtctgcttttgccgtttgctgaccaacatgtagaaatcccttcattgactgctggtaacattgctttgactgttgggcttaaacatactgccactggagacaccattgtctcatccaagtccagtgcattagctgcagctcgtagagccgaacgggagggagaaaagaagcacagacaaaacaatgaagcagagagacttttattggctggagtggagattccagaacctgttttcttctgtaccatagaacccccatcactgtctaagcagccagatttggaacatgcgttgaaatgtcttcagcgtgaagatcccagtttgaaagtgaggctagatcctgactctggacaaactgttctgtgtggtatgggggagttacatatagagattattcatgatcgaatcaagagggaatatggactggagacctatctcgggcctctccaggtggcatatcgagagaccatcctaaactcagttcgtgccacagataccttagatagaactttaggagacaaaaggcatcttgtgactgtagaagtggaagcaaggccaattgaaacatcatctgttatgcctgtgattgagtttgagtatgctgaaagtatcaatgaaggccttttgaaggtctcccaagaggccattgaaaatggaattcacagcgcatgtctccaaggaccattgcttggatccccaattcaggatgtagcaattactttacattccctgacaattcatcctggcacctccacaactatgatttctgcctgtgtctcaagatgcgtgcaaaaggctctgaagaaagctgataagcaagttttggagcctctgatgaatcttgaggttacagtagctagagattatctcagccctgtcctggcagatctggcacaaagaagaggaaacattcaggaaattcagactcgccaggacaacaaagttgttattggatttgttcccttagcagaaattatgggttattcaactgtgcttcgaacgctaacatcaggctcagctacttttgccttagaactatctacttatcaagccatgaatcctcaagatcaaaatacactgctcaaccggagaagtggtttgacctaaatgttttagtttttggagagaaattcaggagcacctagctacttcattttcagtaagaacaatttttattgctttatttattggacgaataaagtactgtttcagtacattcagagaactagataaaagatataacttaagctttgatagtggcactggagccacccgttttaatttatataatgagaaatgtgctttgatgtttaaagccactgtacctgaatcatgctgttcatctatgaagttattactataagtagccttcagaagagtggtatcacaaagttgtgtttcttttgtgtccttaagcttgtctcacaagaaagatgccaggcctctaaatgtaataagatagagggtcaaaggttcaatcaataaaaatattttattcaaaaaaacagtc

SEQ ID NO: 431312 - DNA, 3060 bp, Homo sapiens
ctccttaccatggtgacggccgcagagccgccaggagcagccgctggagtgcgaaaacgctctcaattttcgggtctcaaagacccacaagcccacaccacgcaggccgggacaggaaagagtcaccctttaaaacggccgagtgaagagcaagaaccacgcagcggttccgagcctctgttttccgcttttagctaggaggacggaagttgctggcaggcggcatttggccggtacaccgccggaagtgtggaggtgtggctgcccgaggcggtagagcggagaaagcctattttcttttcgtttagatacattgccttttgcctaggctggcgtcgagacttgaggccgttgcagactttggcgcggctcgcgcctcctgcttcaagagcccagcggtgagagctggcctgcggcacgcggcctaatgccagacagtaacagtttggaggatcaagatgttgaccaacttgaggatatttgcaatgagtcatcagacaatacccagtgtgtatattaataatatatgctgctataaaataagagcaagtttaaaaagattaaagccacatgtgccgcttggaagaaattgcagttctctaccaggcttaataggaaatgatatcaaatcccttcattccatcatcaatcctcccatagctaaaatccgtaatattggaattatggctcatattgatgcaggcaaaactaccaccacagaaagaatattgtactattccggatatacaagatcactgggagatgttgatgatggagacacagtgacagatttcatggcccaagagcgagaaagaggcattactattcaatcagctgctgttacatttgattggaaaggttatagagtcaatctaattgatacaccaggtcatgtggactttaccttggaggttgagcggtgcctaagagtgttggatggtgcagtggctgtatttgatgcctctgctggtgtagaggcccagactctcacagtatggaggcaagctgataaacacaatatacctcgaatctgttttttaaacaagatggacaaaactggagcaagctttaagtatgcagttgaaagcatcagagagaagttaaaggcaaagcctttgcttttacagttaccaattggtgaagccaaaactttcaaaggagtggtggatgtagtaatgaaagaaaaacttctttggaattgcaattcaaatgatggaaaagactttgagagaaagcccctcttggaaatgaatgatcctgaattgctgaaggaaacaactgaagcaaggaatgccttaattgaacaagttgcagatttggatgatgaatttgctgacttggttttagaagaatttagtgagaattttgatttgttaccagctgaaaagctacagactgcaatacatagagtgacactagctcagacagcagtgcctgtgctttgtggaagtgccctgaaaaacaaagggatacagcccttgttagatgctgttactatgtacttaccttcacctgaagagcgtaactatgaatttctggagagaataagtcgtctgcttttgccgtttgctgaccaacatgtagaaatcccttcattgactgctggtaacattgctttgactgttgggcttaaacatactgccactggagacaccattgtctcatccaagtccagtgcattagctgcagctcgtagagccgaacgggagggagaaaagaagcacagacaaaacaatgaagcagagagacttttattggctggagtggagattccagaacctgttttcttctgtaccatagaacccccatcactgtctaagcagccagatttggaacatgcgttgaaatgtcttcagcgtgaagatcccagtttgaaagtgaggctagatcctgactctggacaaactgttctgtgtggtatgggggagttacatatagagattattcatgatcgaatcaagagggaatatggactggagacctatctcgggcctctccaggtggcatatcgagagaccatcctaaactcagttcgtgccacagataccttagatagaactttaggagacaaaaggcatcttgtgactgtagaagtggaagcaaggccaattgaaacatcatctgttatgcctgtgattgagtttgagtatgctgaaagtatcaatgaaggccttttgaaggtctcccaagaggccattgaaaatggaattcacagcgcatgtctccaaggaccattgcttggatccccaattcaggatgtagcaattactttacattccctgacaattcatcctggcacctccacaactatgatttctgcctgtgtctcaagatgcgtgcaaaaggctctgaagaaagctgataagcaagttttggagcctctgatgaatcttgaggttacagtagctagagattatctcagccctgtcctggcagatctggcacaaagaagaggaaacattcaggaaattcagactcgccaggacaacaaagttgttattggatttgttcccttagcagaaattatgggttattcaactgtgcttcgaacgctaacatcaggctcagctacttttgccttagaactatctacttatcaagccatgaatcctcaagatcaaaatacactgctcaaccggagaagtggtttgacctaaatgttttagtttttggagagaaattcaggagcacctagctacttcattttcagtaagaacaatttttattgctttatttattggacgaataaagtactgtttcagtacattcagagaactagataaaagatataacttaagctttgatagtggcactggagccacccgttttaatttatataatgagaaatgtgctttgatgtttaaagccactgtacctgaatcatgctgttcatctatgaagttattactataagtagccttcagaagagtggtatcacaaagttgtgtttcttttgtgtccttaagcttgtctcacaagaaagatgccaggcctctaaatgtaataagatagagggtcaaaggttcaatcaataaaaatattttattcaaaaaaacagtc

SEQ ID NO: 431313 - DNA, 3159 bp, Homo sapiens
ctccttaccatggtgacggccgcagagccgccaggagcagccgctggagtgcgaaaacgctctcaattttcgggtctcaaagacccacaagcccacaccacgcaggccgggacaggaaagagtcaccctttaaaacggccgagtgaagagcaagaaccacgcagcggttccgagcctctgttttccgcttttagctaggaggacggaagttgctggcaggcggcatttggccggtacaccgccggaagtgtggaggtgtggctgcccgaggcggtagagcggagaaagcctattttcttttcgtttagatacattgccttttgcctaggctggcgtcgagacttgaggccgttgcagactttggcgcggctcgcgcctcctgcttcaagagcccagcggtgagagctggcctgcggcacgcggcctaatgccagacagtaacagtttggaggatcaagatgttgaccaacttgaggatatttgcaatgagtcatcagacaatacccagtgtgtatattaataatatatgctgctataaaataagagcaagtttaaaaagattaaagccacatgtgccgcttggaagaaattgcagttctctaccaggcttaataggaaatgatatcaaatcccttcattccatcatcaatcctcccatagctaaaatccgtaatattggaattatggctcatattgatgcaggcaaaactaccaccacagaaagaatattgtactattccggatatacaagatcactgggagatgttgatgatggagacacagtgacagatttcatggcccaagagcgagaaagaggcattactattcaatcagctgctgttacatttgattggaaaggttatagagtcaatctaattgatacaccaggtcatgtggactttaccttggaggttgagcggtgcctaagagtgttggatggtgcagtggctgtatttgatgcctctgctggtgtagaggcccagactctcacagtatggaggcaagctgataaacacaatatacctcgaatctgttttttaaacaagatggacaaaactggagcaagctttaagtatgcagttgaaagcatcagagagaagttaaaggcaaagcctttgcttttacagttaccaattggtgaagccaaaactttcaaaggagtggtggatgtagtaatgaaagaaaaacttctttggaattgcaattcaaatgatggaaaagactttgagagaaagcccctcttggaaatgaatgatcctgaattgctgaaggaaacaactgaagcaaggaatgccttaattgaacaagttgcagatttggatgatgaatttgctgacttggttttagaagaatttagtgagaattttgatttgttaccagctgaaaagctacagactgcaatacatagagtgacactagctcagacagcagtgcctgtgctttgtggaagtgccctgaaaaacaaagggatacagcccttgttagatgctgttactatgtacttaccttcacctgaagagcgtaactatgaatttctgcagtggtataaggatgacttatgtgcattggcatttaaagttctccatgacaagcagcgaggaccactggtttttatgcgcatttactcaggcactatggagagaataagtcgtctgcttttgccgtttgctgaccaacatgtagaaatcccttcattgactgctggtaacattgctttgactgttgggcttaaacatactgccactggagacaccattgtctcatccaagtccagtgcattagctgcagctcgtagagccgaacgggagggagaaaagaagcacagacaaaacaatgaagcagagagacttttattggctggagtggagattccagaacctgttttcttctgtaccatagaacccccatcactgtctaagcagccagatttggaacatgcgttgaaatgtcttcagcgtgaagatcccagtttgaaagtgaggctagatcctgactctggacaaactgttctgtgtggtatgggggagttacatatagagattattcatgatcgaatcaagagggaatatggactggagacctatctcgggcctctccaggtggcatatcgagagaccatcctaaactcagttcgtgccacagataccttagatagaactttaggagacaaaaggcatcttgtgactgtagaagtggaagcaaggccaattgaaacatcatctgttatgcctgtgattgagtttgagtatgctgaaagtatcaatgaaggccttttgaaggtctcccaagaggccattgaaaatggaattcacagcgcatgtctccaaggaccattgcttggatccccaattcaggatgtagcaattactttacattccctgacaattcatcctggcacctccacaactatgatttctgcctgtgtctcaagatgcgtgcaaaaggctctgaagaaagctgataagcaagttttggagcctctgatgaatcttgaggttacagtagctagagattatctcagccctgtcctggcagatctggcacaaagaagaggaaacattcaggaaattcagactcgccaggacaacaaagttgttattggatttgttcccttagcagaaattatgggttattcaactgtgcttcgaacgctaacatcaggctcagctacttttgccttagaactatctacttatcaagccatgaatcctcaagatcaaaatacactgctcaaccggagaagtggtttgacctaaatgttttagtttttggagagaaattcaggagcacctagctacttcattttcagtaagaacaatttttattgctttatttattggacgaataaagtactgtttcagtacattcagagaactagataaaagatataacttaagctttgatagtggcactggagccacccgttttaatttatataatgagaaatgtgctttgatgtttaaagccactgtacctgaatcatgctgttcatctatgaagttattactataagtagccttcagaagagtggtatcacaaagttgtgtttcttttgtgtccttaagcttgtctcacaagaaagatgccaggcctctaaatgtaataagatagagggtcaaaggttcaatcaataaaaatattttattcaaaaaaacagtc

SEQ ID NO: 431314 - DNA, 3059 bp, Homo sapiens
tattcatctgtttttctttttcgttggtgtaaagccaacaccctgtctaaaaaacataaatttctttaatcattttgcctcttttctctgtgcttcaattaataaaaaatggaaagaatctaaaaaaaaaaaaaaaaaaaaaaaagcctattttcttttcgtttagatacattgccttttgcctaggctggcgtcgagacttgaggccgttgcagactttggcgcggctcgcgcctcctgcttcaagagcccagcggtgagagctggcctgcggcacgcggcctaatgccagacagtaacagtttggaggatcaagatgttgaccaacttgaggatatttgcaatgagtcatcagacaatacccagtgtgtatattaataatatatgctgctataaaataagagcaagtttaaaaagattaaagccacatgtgccgcttggaagaaattgcagttctctaccaggcttaataggaaatgatatcaaatcccttcattccatcatcaatcctcccatagctaaaatccgtaatattggaattatggctcatattgatgcaggcaaaactaccaccacagaaagaatattgtactattccggatatacaagatcactgggagatgttgatgatggagacacagtgacagatttcatggcccaagagcgagaaagaggcattactattcaatcagctgctgttacatttgattggaaaggttatagagtcaatctaattgatacaccaggtcatgtggactttaccttggaggttgagcggtgcctaagagtgttggatggtgcagtggctgtatttgatgcctctgctggtgtagaggcccagactctcacagtatggaggcaagctgataaacacaatatacctcgaatctgttttttaaacaagatggacaaaactggagcaagctttaagtatgcagttgaaagcatcagagagaagttaaaggcaaagcctttgcttttacagttaccaattggtgaagccaaaactttcaaaggagtggtggatgtagtaatgaaagaaaaacttctttggaattgcaattcaaatgatggaaaagactttgagagaaagcccctcttggaaatgaatgatcctgaattgctgaaggaaacaactgaagcaaggaatgccttaattgaacaagttgcagatttggatgatgaatttgctgacttggttttagaagaatttagtgagaattttgatttgttaccagctgaaaagctacagactgcaatacatagagtgacactagctcagacagcagtgcctgtgctttgtggaagtgccctgaaaaacaaagggatacagcccttgttagatgctgttactatgtacttaccttcacctgaagagcgtaactatgaatttctgcagtggtataaggatgacttatgtgcattggcatttaaagttctccatgacaagcagcgaggaccactggtttttatgcgcatttactcaggcactataaaaccccagttggccattcataatattaatggaaactgcacggagagaataagtcgtctgcttttgccgtttgctgaccaacatgtagaaatcccttcattgactgctggtaacattgctttgactgttgggcttaaacatactgccactggagacaccattgtctcatccaagtccagtgcattagctgcagctcgtagagccgaacgggagggagaaaagaagcacagacaaaacaatgaagcagagagacttttattggctggagtggagattccagaacctgttttcttctgtaccatagaacccccatcactgtctaagcagccagatttggaacatgcgttgaaatgtcttcagcgtgaagatcccagtttgaaagtgaggctagatcctgactctggacaaactgttctgtgtggtatgggggagttacatatagagattattcatgatcgaatcaagagggaatatggactggagacctatctcgggcctctccaggtggcatatcgagagaccatcctaaactcagttcgtgccacagataccttagatagaactttaggagacaaaaggcatcttgtgactgtagaagtggaagcaaggccaattgaaacatcatctgttatgcctgtgattgagtttgagtatgctgaaagtatcaatgaaggccttttgaaggtctcccaagaggccattgaaaatggaattcacagcgcatgtctccaaggaccattgcttggatccccaattcaggatgtagcaattactttacattccctgacaattcatcctggcacctccacaactatgatttctgcctgtgtctcaagatgcgtgcaaaaggctctgaagaaagctgataagcaagttttggagcctctgatgaatcttgaggttacagtagctagagattatctcagccctgtcctggcagatctggcacaaagaagaggaaacattcaggaaattcagactcgccaggacaacaaagttgttattggatttgttcccttagcagaaattatgggttattcaactgtgcttcgaacgctaacatcaggctcagctacttttgccttagaactatctacttatcaagccatgaatcctcaagatcaaaatacactgctcaaccggagaagtggtttgacctaaatgttttagtttttggagagaaattcaggagcacctagctacttcattttcagtaagaacaatttttattgctttatttattggacgaataaagtactgtttcagtacattcagagaactagataaaagatataacttaagctttgatagtggcactggagccacccgttttaatttatataatgagaaatgtgctttgatgtttaaagccactgtacctgaatcatgctgttcatctatgaagttattactataagtagccttcagaagagtggtatcacaaagttgtgtttcttttgtgtccttaagcttgtctcacaagaaagatgccaggcctctaaatgtaataagatagagggtcaaaggttcaatcaataaaaatattttattcaaaaaaacagtc

SEQ ID NO: 431315 - DNA, 3375 bp, Homo sapiens
ctccttaccatggtgacggccgcagagccgccaggagcagccgctggagtgcgaaaacgctctcaattttcgggtctcaaagacccacaagcccacaccacgcaggccgggacaggaaagagtcaccctttaaaacggccgagtgaagagcaagaaccacgcagcggttccgagcctctgttttccgcttttagctaggaggacggaagttgctggcaggcggcatttggccggtacaccgccggaagtgtggaggtgtggctgcccgaggcggtagagcggagaaagcctattttcttttcgtttagatacattgccttttgcctaggctggcgtcgagacttgaggccgttgcagactttggcgcggctcgcgcctcctgcttcaagagcccagcggtgagagctggcctgcggcacgcggcctaatgccagacagtaacagtttggaggatcaagatgttgaccaacttgaggatatttgcaatgagtcatcagacaatacccagtgtgtatattaataatatatgctgctataaaataagagcaagtttaaaaagattaaagccacatgtgccgcttggaagaaattgcagttctctaccaggcttaataggaaatgatatcaaatcccttcattccatcatcaatcctcccatagctaaaatccgtaatattggaattatggctcatattgatgcaggcaaaactaccaccacagaaagaatattgtactattccggatatacaagatcactgggagatgttgatgatggagacacagtgacagatttcatggcccaagagcgagaaagaggcattactattcaatcagctgctgttacatttgattggaaaggttatagagtcaatctaattgatacaccaggtcatgtggactttaccttggaggttgagcggtgcctaagagtgttggatggtgcagtggctgtatttgatgcctctgctggtgtagaggcccagactctcacagtatggaggcaagctgataaacacaatatacctcgaatctgttttttaaacaagatggacaaaactggagcaagctttaagtatgcagttgaaagcatcagagagaagttaaaggcaaagcctttgcttttacagttaccaattggtgaagccaaaactttcaaaggagtggtggatgtagtaatgaaagaaaaacttctttggaattgcaattcaaatgatggaaaagactttgagagaaagcccctcttggaaatgaatgatcctgaattgctgaaggaaacaactgaagcaaggaatgccttaattgaacaagttgcagatttggatgatgaatttgctgacttggttttagaagaatttagtgagaattttgatttgttaccagctgaaaagctacagactgcaatacatagagtgacactagctcagacagcagtgcctgtgctttgtggaagtgccctgaaaaacaaagggatacagcccttgttagatgctgttactatgtacttaccttcacctgaagagcgtaactatgaatttctgcagtggtataaggatgacttatgtgcattggcatttaaagttctccatgacaagcagcgaggaccactggtttttatgcgcatttactcaggcactataaaaccccagttggccattcataatattaatggaaactgcacggagagaataagtcgtctgcttttgccgtttgctgaccaacatgtagaaatcccttcattgactgctggtaacattgctttgactgttgggcttaaacatactgccactggagacaccattgtctcatccaagtccagtgcattagctgcagctcgtagagccgaacgggagggagaaaagaagcacagacaaaacaatgaagcagagagacttttattggctggagtggagattccagaacctgttttcttctgtaccatagaacccccatcactgtctaagcagccagatttggaacatgcgttgaaatgtcttcagcgtgaagatcccagtttgaaagtgaggctagatcctgactctggacaagcaccacccagaagctgtccacatcaattatattcatcttccattggccagaaatttggctttgcggttgggaagtgttggtatttagctaagtgttggcatcattagtcttagccagatgctacttgcccagcagataattcaactatcaaagaagaaggagagaatggccagactgttctgtgtggtatgggggagttacatatagagattattcatgatcgaatcaagagggaatatggactggagacctatctcgggcctctccaggtggcatatcgagagaccatcctaaactcagttcgtgccacagataccttagatagaactttaggagacaaaaggcatcttgtgactgtagaagtggaagcaaggccaattgaaacatcatctgttatgcctgtgattgagtttgagtatgctgaaagtatcaatgaaggccttttgaaggtctcccaagaggccattgaaaatggaattcacagcgcatgtctccaaggaccattgcttggatccccaattcaggatgtagcaattactttacattccctgacaattcatcctggcacctccacaactatgatttctgcctgtgtctcaagatgcgtgcaaaaggctctgaagaaagctgataagcaagttttggagcctctgatgaatcttgaggttacagtagctagagattatctcagccctgtcctggcagatctggcacaaagaagaggaaacattcaggaaattcagactcgccaggacaacaaagttgttattggatttgttcccttagcagaaattatgggttattcaactgtgcttcgaacgctaacatcaggctcagctacttttgccttagaactatctacttatcaagccatgaatcctcaagatcaaaatacactgctcaaccggagaagtggtttgacctaaatgttttagtttttggagagaaattcaggagcacctagctacttcattttcagtaagaacaatttttattgctttatttattggacgaataaagtactgtttcagtacattcagagaactagataaaagatataacttaagctttgatagtggcactggagccacccgttttaatttatataatgagaaatgtgctttgatgtttaaagccactgtacctgaatcatgctgttcatctatgaagttattactataagtagccttcagaagagtggtatcacaaagttgtgtttcttttgtgtccttaagcttgtctcacaagaaagatgccaggcctctaaatgtaataagatagagggtcaaaggttcaatcaataaaaatattttattcaaaaaaacagtc

SEQ ID NO: 431316 - DNA, 2133 bp, Homo sapiens
tcaggatctggctttctgtgaatttaggaaactcctaatagtatctttagttttccatttcttttcctttcaaagaaaaacatttttctttatctctttagaagaagtgaagagttgcttggcctaggtaaggtagctgtcttgaaatatttgaatattgtctgtttatggtgtttggacaaattaatagttaatgaaagtaaatgcaagttatagaactctaaaacctttctttataggttgcagatttggatgatgaatttgctgacttggttttagaagaatttagtgagaattttgatttgttaccagctgaaaagctacagactgcaatacatagagtgacactagctcagacagcagtgcctgtgctttgtggaagtgccctgaaaaacaaagggatacagcccttgttagatgctgttactatgtacttaccttcacctgaagagcgtaactatgaatttctgcagtggtataaggatgacttatgtgcattggcatttaaagttctccatgacaagcagcgaggaccactggtttttatgcgcatttactcaggcactataaaaccccagttggccattcataatattaatggaaactgcacggagagaataagtcgtctgcttttgccgtttgctgaccaacatgtagaaatcccttcattgactgctggtaacattgctttgactgttgggcttaaacatactgccactggagacaccattgtctcatccaagtccagtgcattagctgcagctcgtagagccgaacgggagggagaaaagaagcacagacaaaacaatgaagcagagagacttttattggctggagtggagattccagaacctgttttcttctgtaccatagaacccccatcactgtctaagcagccagatttggaacatgcgttgaaatgtcttcagcgtgaagatcccagtttgaaagtgaggctagatcctgactctggacaaactgttctgtgtggtatgggggagttacatatagagattattcatgatcgaatcaagagggaatatggactggagacctatctcgggcctctccaggtggcatatcgagagaccatcctaaactcagttcgtgccacagataccttagatagaactttaggagacaaaaggcatcttgtgactgtagaagtggaagcaaggccaattgaaacatcatctgttatgcctgtgattgagtttgagtatgctgaaagtatcaatgaaggccttttgaaggtctcccaagaggccattgaaaatggaattcacagcgcatgtctccaaggaccattgcttggatccccaattcaggatgtagcaattactttacattccctgacaattcatcctggcacctccacaactatgatttctgcctgtgtctcaagatgcgtgcaaaaggctctgaagaaagctgataagcaagttttggagcctctgatgaatcttgaggttacagtagctagagattatctcagccctgtcctggcagatctggcacaaagaagaggaaacattcaggaaattcagactcgccaggacaacaaagttgttattggatttgttcccttagcagaaattatgggttattcaactgtgcttcgaacgctaacatcaggctcagctacttttgccttagaactatctacttatcaagccatgaatcctcaagatcaaaatacactgctcaaccggagaagtggtttgacctaaatgttttagtttttggagagaaattcaggagcacctagctacttcattttcagtaagaacaatttttattgctttatttattggacgaataaagtactgtttcagtacattcagagaactagataaaagatataacttaagctttgatagtggcactggagccacccgttttaatttatataatgagaaatgtgctttgatgtttaaagccactgtacctgaatcatgctgttcatctatgaagttattactataagtagccttcagaagagtggtatcacaaagttgtgtttcttttgtgtccttaagcttgtctcacaagaaagatgccaggcctctaaatgtaataagatagagggtcaaaggttcaatcaataaaaatattttattcaaaaaaacagtc

SEQ ID NO: 431317 - DNA, 1992 bp, Homo sapiens
tcaggatctggctttctgtgaatttaggaaactcctaatagtatctttagttttccatttcttttcctttcaaagaaaaacatttttctttatctctttagaagaagtgaagagttgcttggcctaggtaaggtagctgtcttgaaatatttgaatattgtctgtttatggtgtttggacaaattaatagttaatgaaagtaaatgcaagttatagaactctaaaacctttctttataggttgcagatttggatgatgaatttgctgacttggttttagaagaatttagtgagaattttgatttgttaccagctgaaaagctacagactgcaatacatagagtgacactagctcagacagcagtgcctgtgctttgtggaagtgccctgaaaaacaaagggatacagcccttgttagatgctgttactatgtacttaccttcacctgaagagcgtaactatgaatttctggagagaataagtcgtctgcttttgccgtttgctgaccaacatgtagaaatcccttcattgactgctggtaacattgctttgactgttgggcttaaacatactgccactggagacaccattgtctcatccaagtccagtgcattagctgcagctcgtagagccgaacgggagggagaaaagaagcacagacaaaacaatgaagcagagagacttttattggctggagtggagattccagaacctgttttcttctgtaccatagaacccccatcactgtctaagcagccagatttggaacatgcgttgaaatgtcttcagcgtgaagatcccagtttgaaagtgaggctagatcctgactctggacaaactgttctgtgtggtatgggggagttacatatagagattattcatgatcgaatcaagagggaatatggactggagacctatctcgggcctctccaggtggcatatcgagagaccatcctaaactcagttcgtgccacagataccttagatagaactttaggagacaaaaggcatcttgtgactgtagaagtggaagcaaggccaattgaaacatcatctgttatgcctgtgattgagtttgagtatgctgaaagtatcaatgaaggccttttgaaggtctcccaagaggccattgaaaatggaattcacagcgcatgtctccaaggaccattgcttggatccccaattcaggatgtagcaattactttacattccctgacaattcatcctggcacctccacaactatgatttctgcctgtgtctcaagatgcgtgcaaaaggctctgaagaaagctgataagcaagttttggagcctctgatgaatcttgaggttacagtagctagagattatctcagccctgtcctggcagatctggcacaaagaagaggaaacattcaggaaattcagactcgccaggacaacaaagttgttattggatttgttcccttagcagaaattatgggttattcaactgtgcttcgaacgctaacatcaggctcagctacttttgccttagaactatctacttatcaagccatgaatcctcaagatcaaaatacactgctcaaccggagaagtggtttgacctaaatgttttagtttttggagagaaattcaggagcacctagctacttcattttcagtaagaacaatttttattgctttatttattggacgaataaagtactgtttcagtacattcagagaactagataaaagatataacttaagctttgatagtggcactggagccacccgttttaatttatataatgagaaatgtgctttgatgtttaaagccactgtacctgaatcatgctgttcatctatgaagttattactataagtagccttcagaagagtggtatcacaaagttgtgtttcttttgtgtccttaagcttgtctcacaagaaagatgccaggcctctaaatgtaataagatagagggtcaaaggttcaatcaataaaaatattttattcaaaaaaacagtc

SEQ ID NO: 431318 - DNA, 1631 bp, Homo sapiens
acaacagtattttggatagaattcttatgcaagttaaattagctttacttatgcaaagttattaatgagctttttgaattttatttctcttttaagttctgatgaaaagaaagggccacaaaaaagttttcttatattgtggttcttggtgtaagatgagcgcttgctaaatgccactttcgttccaagtcatcttgtttgcttgcagactgccactggagacaccattgtctcatccaagtccagtgcattagctgcagctcgtagagccgaacgggagggagaaaagaagcacagacaaaacaatgaagcagagagacttttattggctggagtggagattccagaacctgttttcttctgtaccatagaacccccatcactgtctaagcagccagatttggaacatgcgttgaaatgtcttcagcgtgaagatcccagtttgaaagtgaggctagatcctgactctggacaaactgttctgtgtggtatgggggagttacatatagagattattcatgatcgaatcaagagggaatatggactggagacctatctcgggcctctccaggtggcatatcgagagaccatcctaaactcagttcgtgccacagataccttagatagaactttaggagacaaaaggcatcttgtgactgtagaagtggaagcaaggccaattgaaacatcatctgttatgcctgtgattgagtttgagtatgctgaaagtatcaatgaaggccttttgaaggtctcccaagaggccattgaaaatggaattcacagcgcatgtctccaaggaccattgcttggatccccaattcaggatgtagcaattactttacattccctgacaattcatcctggcacctccacaactatgatttctgcctgtgtctcaagatgcgtgcaaaaggctctgaagaaagctgataagcaagttttggagcctctgatgaatcttgaggttacagtagctagagattatctcagccctgtcctggcagatctggcacaaagaagaggaaacattcaggaaattcagactcgccaggacaacaaagttgttattggatttgttcccttagcagaaattatgggttattcaactgtgcttcgaacgctaacatcaggctcagctacttttgccttagaactatctacttatcaagccatgaatcctcaagatcaaaatacactgctcaaccggagaagtggtttgacctaaatgttttagtttttggagagaaattcaggagcacctagctacttcattttcagtaagaacaatttttattgctttatttattggacgaataaagtactgtttcagtacattcagagaactagataaaagatataacttaagctttgatagtggcactggagccacccgttttaatttatataatgagaaatgtgctttgatgtttaaagccactgtacctgaatcatgctgttcatctatgaagttattactataagtagccttcagaagagtggtatcacaaagttgtgtttcttttgtgtccttaagcttgtctcacaagaaagatgccaggcctctaaatgtaataagatagagggtcaaaggttcaatcaataaaaatattttattcaaaaaaacagtc

SEQ ID NO: 431319 - DNA, 2280 bp, Homo sapiens
ctccttaccatggtgacggccgcagagccgccaggagcagccgctggagtgcgaaaacgctctcaattttcgggtctcaaagacccacaagcccacaccacgcaggccgggacaggaaagagtcaccctttaaaacggccgagtgaagagcaagaaccacgcagcggttccgagcctctgttttccgcttttagctaggaggacggaagttgctggcaggcggcatttggccggtacaccgccggaagtgtggaggtgtggctgcccgaggcggtagagcggagaaagcctattttcttttcgtttagatacattgccttttgcctaggctggcgtcgagacttgaggccgttgcagactttggcgcggctcgcgcctcctgcttcaagagcccagcggtgagagctggcctgcggcacgcggcctaatgccagacagtaacagtttggaggatcaagatgttgaccaacttgaggatatttgcaatgagtcatcagacaatacccagtgtgtatattaataatatatgctgctataaaataagagcaagtttaaaaagattaaagccacatgtgccgcttggaagaaattgcagttctctaccaggcttaataggaaatgatatcaaatcccttcattccatcatcaatcctcccatagctaaaatccgtaatattggaattatggctcatattgatgcaggcaaaactaccaccacagaaagaatattgtactattccggatatacaagatcactgggagatgttgatgatggagacacagtgacagatttcatggcccaagagcgagaaagaggcattactattcaatcagctgctgttacatttgattggaaaggttatagagtcaatctaattgatacaccaggtcatgtggactttaccttggaggttgagcggtgcctaagagtgttggatggtgcagtggctgtatttgatgcctctgctggtgtagaggcccagactctcacagtatggaggcaagctgataaacacaatatacctcgaatctgttttttaaacaagatggacaaaactggagcaagctttaagtatgcagttgaaagcatcagagagaagttaaaggcaaagcctttgcttttacagttaccaattggtgaagccaaaactttcaaaggagtggtggatgtagtaatgaaagaaaaacttctttggaattgcaattcaaatgatggaaaagactttgagagaaagcccctcttggaaatgaatgatcctgaattgctgaaggaaacaactgaagcaaggaatgccttaattgaacaagttgcagatttggatgatgaatttgctgacttggttttagaagaatttagtgagaattttgatttgttaccagctgaaaagctacagactgcaatacatagagtgacactagctcagacagcagtgcctgtgctttgtggaagtgccctgaaaaacaaagggatacagcccttgttagatgctgttactatgtacttaccttcacctgaagagcgtaactatgaatttctggagagaataagtcgtctgcttttgccgtttgctgaccaacatgtagaaatcccttcattgactgctggtaacattgctttgactgttgggcttaaacatactgccactggagacaccattgtctcatccaagtccagtgcattagctgcagctcgtagagccgaacgggagggagaaaagaagcacagacaaaacaatgaagcagagagacttttattggctggagtggagattccagaacctgttttcttctgtaccatagaacccccatcactgtctaagcagccaggtataaatggtcttagtgtgtcaactaattagtgcgctgataatttatataaaatagttgcaatataccctcaagagatttcttatgtgattgaggtaaattttatctgaatatattggtaaacatttcttgtggttggtcttgttttttaagatgttttgatttttacaaatgccttcatttttttcctcttcttatttcttggccattcttctcatattatattcttccttactcttgtagtgctatctatgggattctaagtaattggccttagaactgcccttctagtatattagattagacagtaactgattcataaccaattcagtttgtcatcatcatgtataaaaatgctgttttaccttgttttctacctcaacctctagaactcaatgaagatatttatatactgtggataatcttgtttgaccttttgttagtaactttgtt

SEQ ID NO: 431320 - DNA, 1692 bp, Homo sapiens
ctccttaccatggtgacggccgcagagccgccaggagcagccgctggagtgcgaaaacgctctcaattttcgggtctcaaagacccacaagcccacaccacgcaggccgggacaggaaagagtcaccctttaaaacggccgagtgaagagcaagaaccacgcagcggttccgagcctctgttttccgcttttagctaggaggacggaagttgctggcaggcggcatttggccggtacaccgccggaagtgtggaggtgtggctgcccgaggcggtagagcggagaaagcctattttcttttcgtttagatacattgccttttgcctaggctggcgtcgagacttgaggccgttgcagactttggcgcggctcgcgcctcctgcttcaagagcccagcggtgagagctggcctgcggcacgcggcctaatgccagacagtaacagtttggaggatcaagatgttgaccaacttgaggatatttgcaatgagtcatcagacaatacccagtgtgtatattaataatatatgctgctataaaataagagcaagtttaaaaagattaaagccacatgtgccgcttggaagaaattgcagttctctaccaggcttaataggaaatgatatcaaatcccttcattccatcatcaatcctcccatagctaaaatccgtaatattggaattatggctcatattgatgcaggcaaaactaccaccacagaaagaatattgtactattccggatatacaagatcactgggagatgttgatgatggagacacagtgacagatttcatggcccaagagcgagaaagaggcattactattcaatcagctgctgttacatttgattggaaaggttatagagtcaatctaattgatacaccaggtcatgtggactttaccttggaggttgagcggtgcctaagagtgttggatggtgcagtggctgtatttgatgcctctgctggtgtagaggcccagactctcacagtatggaggcaagctgataaacacaatatacctcgaatctgttttttaaacaagatggacaaaactggagcaagctttaagtatgcagttgaaagcatcagagagaagttaaaggcaaagcctttgcttttacagttaccaattggtgaagccaaaactttcaaaggagtggtggatgtagtaatgaaagaaaaacttctttggaattgcaattcaaatgatggaaaagactttgagagaaagcccctcttggaaatgaatgatcctgaattgctgaaggaaacaactgaagcaaggaatgccttaattgaacaagtaaagtataatgaatgataaaatgaacaccaatgtgtgcaccacttatcttaaaatatagtcatactttagcatctctcggggattggttgcaggacctcctgtggataccaaaatctgcagatgctcaagtccctgatataaaatgatgtagtatttgcatataacctattgatgtcttcctctatactttaaatcatttctaaattacttataatacctaatacaatgtaaatgctatgtgccattttttgttcatctctctctcccactaatcatctacctgtcccccaaattattatttcaatatttctctttcatttgcttttcgttgagatggagtcttgctctgcggcctaggtgacagagccagactccgtatcaa

SEQ ID NO: 431321 - DNA, 1325 bp, Homo sapiens
ctccttaccatggtgacggccgcagagccgccaggagcagccgctggagtgcgaaaacgctctcaattttcgggtctcaaagacccacaagcccacaccacgcaggccgggacaggaaagagtcaccctttaaaacggccgagtgaagagcaagaaccacgcagcggttccgagcctctgttttccgcttttagctaggaggacggaagttgctggcaggcggcatttggccggtacaccgccggaagtgtggaggtgtggctgcccgaggcggtagagcggagaaagcctattttcttttcgtttagataccttagatagaactttaggagacaaaaggcatcttgtgactgtagaagtggaagcaaggccaattgaaacatcatctgttatgcctgtgattgagtttgagtatgctgaaagtatcaatgaaggccttttgaaggtctcccaagaggccattgaaaatggaattcacagcgcatgtctccaaggaccattgcttggatccccaattcaggatgtagcaattactttacattccctgacaattcatcctggcacctccacaactatgatttctgcctgtgtctcaagatgcgtgcaaaaggctctgaagaaagctgataagcaagttttggagcctctgatgaatcttgaggttacagtagctagagattatctcagccctgtcctggcagatctggcacaaagaagaggaaacattcaggaaattcagactcgccaggacaacaaagttgttattggatttgttcccttagcagaaattatgggttattcaactgtgcttcgaacgctaacatcaggctcagctacttttgccttagaactatctacttatcaagccatgaatcctcaagatcaaaatacactgctcaaccggagaagtggtttgacctaaatgttttagtttttggagagaaattcaggagcacctagctacttcattttcagtaagaacaatttttattgctttatttattggacgaataaagtactgtttcagtacattcagagaactagataaaagatataacttaagctttgatagtggcactggagccacccgttttaatttatataatgagaaatgtgctttgatgtttaaagccactgtacctgaatcatgctgttcatctatgaagttattactataagtagccttcagaagagtggtatcacaaagttgtgtttcttttgtgtccttaagcttgtctcacaagaaagatgccaggcctctaaatgtaataagatagagggtcaaaggttcaatcaataaaaatattttattcaaaaaaacagtc

SEQ ID NO: 431322 - DNA, 1228 bp, Homo sapiens
  misc_feature (1074)..(1074): n is a, c, g, or t
  misc_feature (1105)..(1105): n is a, c, g, or t
  misc_feature (1174)..(1174): n is a, c, g, or t
  misc_feature (1177)..(1177): n is a, c, g, or t
ctccttaccatggtgacggccgcagagccgccaggagcagccgctggagtgcgaaaacgctctcaattttcgggtctcaaagacccacaagcccacaccacgcaggccgggacaggaaagagtcaccctttaaaacggccgagtgaagagcaagaaccacgcagcggttccgagcctctgttttccgcttttagctaggaggacggaagttgctggcaggcggcatttggccggtacaccgccggaagtgtggaggtgtggctgcccgaggcggtagagcggagaaagcctattttcttttcgtttagatacattgccttttgcctaggctggcgtcgagacttgaggccgttgcagactttggcgcggctcgcgcctcctgcttcaagagcccagcggtgagagctggcctgcggcacgcggcctaatgccagacagtaacagtttggaggatcaagatgttgaccaacttgaggatatttgcaatgagtcatcagacaatacccagtgtgtatattaataatatatgctgctataaaataagagcaagtttaaaaagattaaagccacatgtgccgcttggaagaaattgcagttctctaccaggcttaataggaaatgatatcaaatcccttcattccatcatcaatcctcccatagctaaaatccgtaatattggaattatggctcatattgatgcaggcaaaactaccaccacagaaagaatattgtactattccggatatacaagatcactgggagatgttgatgatggagacacagtgacagatttcatggcccaagagcgagaaagaggcattactattcaatcagctgctgttacatttgattggaaaggttatagagtcaatctaattgatacaccaggtcatgtggactttaccttggaggttgagcggtgcctaagagtgttggatggtgcagtggctgtatttgatgcctctgctggtgtagaggcccagactctcacagtatggaggcaagctgataaacacaatatacctcgaatctgttttttaaacaagatggacaaaactggagcaaggctttaanttttccgttgaaaacctccgaaaaaaatttnaaggccaacccttgcttttccctttcccattggtgaaacccaacttccaaggattggggattttttatnaanaaaactcctttgaattccatccataaggaaaaattgaaaaaccccctgaat

SEQ ID NO: 431323 - DNA, 1241 bp, Homo sapiens
ctccttaccatggtgacggccgcagagccgccaggagcagccgctggagtgcgaaaacgctctcaattttcgggtctcaaagacccacaagcccacaccacgcaggccgggacaggaaagagtcaccctttaaaacggccgagtgaagagcaagaaccacgcagcggttccgagcctctgttttccgcttttagctaggaggacggaagttgctggcaggcggcatttggccggtacaccgccggaagtgtggaggtgtggctgcccgaggcggtagagcggagaaagcctattttcttttcgtttagatacattgccttttgcctaggctggcgtcgagacttgaggccgttgcagactttggcgcggctcgcgcctcctgcttcaagagcccagcggtgagagctggcctgcggcacgcggcctaatgccagacagtaacagtttggaggatcaagatgttgaccaacttgaggatatttgcaatgagtcatcagacaatacccagtgtgtatattaataatatatgctgctataaaataagagcaagtttaaaaagattaaagccacatgtgccgcttggaagaaattgcagttctctaccaggcttaataggaaatgatatcaaatcccttcattccatcatcaatcctcccatagctaaaatccgtaatattggaattatggctcatattgatgcaggcaaaactaccaccacagaaagaatattgtactattccggatatacaagatcactgggagatgttgatgatggagacacagtgacagatttcatggcccaagagcgagaaagaggcattactattcaatcagctgctgttacatttgattggaaaggttatagagtcaatctaattgatacaccaggtcatgtggactttaccttggaggttgagcggtgcctaagagtgttggatggtgcagtggctgtatttgatgcctctgctggtgtagaggcccagactctcacagtatggaggcaagctgataaacacaatatacctcgaatctgttttttaaacaagatggacaaaactggagcaagctgttcatctatgaagttattactataagtagccttcagaagagtggtatcacaaagttgtgtttcttttgtgtccttaagcttgtctcacaagaaagatgccaggcctctaaatgtaataagatagagggtcaaaggttcaatcaataaaaatattttattcaaaaaaacagtc

SEQ ID NO: 431324 - DNA, 851 bp, Homo sapiens
acaacagtattttggatagaattcttatgcaagttaaattagctttacttatgcaaagttattaatgagctttttgaattttatttctcttttaagttctgatgaaaagaaagggccacaaaaaagttttcttatattgtggttcttggtgtaagatgagcgcttgctaaatgccactttcgttccaagtcatcttgtttgcttgcagactgccactggagacaccattgtctcatccaagtccagtgcattagctgcagctcgtagagccgaacgggagggagaaaagaagcacagacaaaacaatgaagcagagagacttttattggctggagtggagattccagaacctgttttcttctgtaccatagaacccccatcactgtctaagcagccaggtataaatggtcttagtgtgtcaactaattagtgcgctgataatttatataaaatagttgcaatataccctcaagagatttcttatgtgattgaggtaaattttatctgaatatattggtaaacatttcttgtggttggtcttgttttttaagatgttttgatttttacaaatgccttcatttttttcctcttcttatttcttggccattcttctcatattatattcttccttactcttgtagtgctatctatgggattctaagtaattggccttagaactgcccttctagtatattagattagacagtaactgattcataaccaattcagtttgtcatcatcatgtataaaaatgctgttttaccttgttttctacctcaacctctagaactcaatgaagatatttatatactgtggataatcttgtttgaccttttgttagtaactttgtt

SEQ ID NO: 431325 - DNA, 309 bp, Homo sapiens
attaattaaaaataagtatgtattaacatcatacttttatatagtattctgcaataaatataatttacccttaatcttttatttcattcctctggtaaccagactgttctgtgtggtatgggggagttacatatagagattattcatgatcgaatcaagagggaatatggactggagacctatctcgggcctctccaggtggcatatcgagagaccatcctaaactcagttcgtgccacaggtaaaaagtaaaacatttaggatttgctttttctctctttctgtctttctttctctatttagttgctg

SEQ ID NO: 431326 - DNA, 410 bp, Homo sapiens
acagcacgcgctaacaagatcacagttcgcttccactcagatcagtcctacaccgacaccggcttcttagctgaatacctctcctacgactccagtgaccgtgagtgaacattgttgggaggagggctggcgggggcctgcaccgcatgttctgtccaccctgcatctcgttagcatcgtgctttgctgattctatactgcggagagaggtcccagttcgtcgtcaccagcaacagcaacaagatcacagttcgcttccactcagatcagtcctacaccgacaccggcttcttagctgaatacctctcctacgactccagtgaccgtgagtgaacattgttgggaggagggctggcgggggcctgcaccgcatgttctgtctaccctgcatctcgttagcatcgtgcttt

SEQ ID NO: 431327 - DNA, 380 bp, Homo sapiens
tgtttgtgcatgcgcgtaatgaagatagcaacaccttaagcccagtggtgcttaaggcacgtgagggggtgggtatgaagggaagcaggccgttagttggcaaatgctagattgaaagaatccactgtacagcatatgctgaacatttgtcgtctttggagaggaaagaaaacgaacaggacttacagctccaatgccctcacagaaccccgcgggcatttgcggcgccttccctccgcctctctgcttcttgttccctcacccctgcttgccacggcgtctgttccctctcaactcgcctggcagatctcagcatgcccctgcttcctctaggtggctgctattgccagagcccactgagtagacgcggattacccgtt

SEQ ID NO: 431328 - DNA, 3531 bp, Homo sapiens
gggccggaggggtggtgaacgccgtcgtggtgatggtgagggccttagcgaccaccacccgagtgaggccccctcaccttcaggcccagagccgaggggaggagcctcccccagggccggcgggggcgggcaggtgagccgggcaggtgcgcaggcgagcgcggcgggctgggcgggccgaggccacaccctgaaactacctgcgtgggccgggccggagtgtgagagcggagctgcagccggagaaagaggaagagggagagagagcgcgccagggcgagggcaccgccgccggtcgggcgcgctgggcctgcccggaatcccgccgcctgcgccccgcgccccgcgccctgcgggccatgggagccggccgccggcagggacgacgcctgtgagacccgcgagcggcctcggggaccatggggagcgatcgggcccgcaagggcggagggggcccgaaggacttcggcgcgggactcaagtacaactcccggcacgagaaagtgaatggcttggaggaaggcgtggagttcctgccagtcaacaacgtcaagaaggtggaaaagcatggcccggggcgctgggtggtgctggcagccgtgctgatcggcctcctcttggtcttgctggggatcggcttcctggtgtggcatttgcagtaccgggacgtgcgtgtccagaaggtcttcaatggctacatgaggatcacaaatgagaattttgtggatgcctacgagaactccaactccactgagtttgtaagcctggccagcaaggtgaaggacgcgctgaagctgctgtacagcggagtcccattcctgggcccctaccacaaggagtcggctgtgacggccttcagcgagggcagcgtcatcgcctactactggtctgagttcagcatcccgcagcacctggtggaggaggccgagcgcgtcatggccgaggagcgcgtagtcatgctgcccccgcgggcgcgctccctgaagtcctttgtggtcacctcagtggtggctttccccacggactccaaaacagtacagaggacccaggacaacagctgcagctttggcctgcacgcccgcggtgtggagctgatgcgcttcaccacgcccggcttccctgacagcccctaccccgctcatgcccgctgccagtgggccctgcggggggacgccgactcagtgctgagcctcaccttccgcagctttgaccttgcgtcctgcgacgagcgcggcagcgacctggtgacggtgtacaacaccctgagccccatggagccccacgccctggtgcagttgtgtggcacctaccctccctcctacaacctgaccttccactcctcccagaacgtcctgctcatcacactgataaccaacactgagcggcggcatcccggctttgaggccaccttcttccagctgcctaggatgagcagctgtggaggccgcttacgtaaagcccaggggacattcaacagcccctactacccaggccactacccacccaacattgactgcacatggaacattgaggtgcccaacaaccagcatgtgaaggtgcgcttcaaattcttctacctgctggagcccggcgtgcctgcgggcacctgccccaaggactacgtggagatcaatggggagaaatactgcggagagaggtcccagttcgtcgtcaccagcaacagcaacaagatcacagttcgcttccactcagatcagtcctacaccgacaccggcttcttagctgaatacctctcctacgactccagtgacccatgcccggggcagttcacgtgccgcacggggcggtgtatccggaaggagctgcgctgtgatggctgggccgactgcaccgaccacagcgatgagctcaactgcagttgcgacgccggccaccagttcacgtgcaagaacaagttctgcaagcccctcttctgggtctgcgacagtgtgaacgactgcggagacaacagcgacgagcaggggtgcagttgtccggcccagaccttcaggtgttccaatgggaagtgcctctcgaaaagccagcagtgcaatgggaaggacgactgtggggacgggtccgacgaggcctcctgccccaaggtgaacgtcgtcacttgtaccaaacacacctaccgctgcctcaatgggctctgcttgagcaagggcaaccctgagtgtgacgggaaggaggactgtagcgacggctcagatgagaaggactgcgactgtgggctgcggtcattcacgagacaggctcgtgttgttgggggcacggatgcggatgagggcgagtggccctggcaggtaagcctgcatgctctgggccagggccacatctgcggtgcttccctcatctctcccaactggctggtctctgccgcacactgctacatcgatgacagaggattcaggtactcagaccccacgcagtggacggccttcctgggcttgcacgaccagagccagcgcagcgcccctggggtgcaggagcgcaggctcaagcgcatcatctcccaccccttcttcaatgacttcaccttcgactatgacatcgcgctgctggagctggagaaaccggcagagtacagctccatggtgcggcccatctgcctgccggacgcctcccatgtcttccctgccggcaaggccatctgggtcacgggctggggacacacccagtatggaggcactggcgcgctgatcctgcaaaagggtgagatccgcgtcatcaaccagaccacctgcgagaacctcctgccgcagcagatcacgccgcgcatgatgtgcgtgggcttcctcagcggcggcgtggactcctgccagggtgattccgggggacccctgtccagcgtggaggcggatgggcggatcttccaggccggtgtggtgagctggggagacggctgcgctcagaggaacaagccaggcgtgtacacaaggctccctctgtttcgggactggatcaaagagaacactggggtataggggccggggccacccaaatgtgtacacctgcggggccacccatcgtccaccccagtgtgcacgcctgcaggctggagactggaccgctgactgcaccagcgcccccagaacatacactgtgaactcaatctccagggctccaaatctgcctagaaaacctctcgcttcctcagcctccaaagtggagctgggaggtagaaggggaggacactggtggttctactgacccaactgggggcaaaggtttgaagacacagcctcccccgccagccccaagctgggccgaggcgcgtttgtgtatatctgcctcccctgtctgtaaggagcagcgggaacggagcttcggggcctcctcagtgaaggtggtggggctgccggatctgggctgtggggcccttgggccacgctcttgaggaagcccaggctcggaggaccctggaaaacagacgggtctgagactgaaattgttttaccagctcccagggtggacttcagtgtgtgtatttgtgtaaatgagtaaaacattttatttctttttaggtaa

SEQ ID NO: 431329 - DNA, 3394 bp, Homo sapiens
gggccggaggggtggtgaacgccgtcgtggtgatggtgagggccttagcgaccaccacccgagtgaggccccctcaccttcaggcccagagccgaggggaggagcctcccccagggccggcgggggcgggcaggtgagccgggcaggtgcgcaggcgagcgcggcgggctgggcgggccgaggccacaccctgaaactacctgcgtgggccgggccggagtgtgagagcggagctgcagccggagaaagaggaagagggagagagagcgcgccagggcgagggcaccgccgccggtcgggcgcgctgggcctgcccggaatcccgccgcctgcgccccgcgccccgcgccctgcgggccatgggagccggccgccggcagggacgacgcctgtgagacccgcgagcggcctcggggaccatggggagcgatcgggcccgcaagggcggagggggcccgaaggacttcggcgcgggactcaagtacaactcccggcacgagaaagtgaatggcttggaggaaggcgtggagttcctgccagtcaacaacgtcaagaaggtggaaaagcatggcccggggcgctgggtggtgctggcagccgtgctgatcggcctcctcttggtcttgctggggatcggcttcctggtgtggcatttgcagtaccgggacgtgcgtgtccagaaggtcttcaatggctacatgaggatcacaaatgagaattttgtggatgcctacgagaactccaactccactgagtttgtaagcctggccagcaaggtgaaggacgcgctgaagctgctgtacagcggagtcccattcctgggcccctaccacaaggagtcggctgtgacggccttcagcgagggcagcgtcatcgcctactactggtctgagttcagcatcccgcagcacctggtggaggaggccgagcgcgtcatggccgaggagcgcgtagtcatgctgcccccgcgggcgcgctccctgaagtcctttgtggtcacctcagtggtggctttccccacggactccaaaacagtacagaggacccaggacaacagctgcagctttggcctgcacgcccgcggtgtggagctgatgcgcttcaccacgcccggcttccctgacagcccctaccccgctcatgcccgctgccagtgggccctgcggggggacgccgactcagtgctgagcctcaccttccgcagctttgaccttgcgtcctgcgacgagcgcggcagcgacctggtgacggtgtacaacaccctgagccccatggagccccacgccctggtgcagttgtgtggcacctaccctccctcctacaacctgaccttccactcctcccagaacgtcctgctcatcacactgataaccaacactgagcggcggcatcccggctttgaggccaccttcttccagctgcctaggatgagcagctgtggaggccgcttacgtaaagcccaggggacattcaacagcccctactacccaggccactacccacccaacattgactgcacatggaacattgaggtgcccaacaaccagcatgtgaaggtgcgcttcaaattcttctacctgctggagcccggcgtgcctgcgggcacctgccccaaggactacgtggagatcaatggggagaaatactgcggagagaggtcccagttcgtcgtcaccagcaacagcaacaagatcacagttcgcttccactcagatcagtcctacaccgacaccggcttcttagctgaatacctctcctacgactccagtgacccatgcccggggcagttcacgtgccgcacggggcggtgtatccggaaggagctgcgctgtgatggctgggccgactgcaccgaccacagcgatgagctcaactgcagttgcgacgccggccaccagttcacgtgcaagaacaagttctgcaagcccctcttctgggtctgcgacagtgtgaacgactgcggagacaacagcgacgagcaggggtgcagttgtccggcccagaccttcaggtgttccaatgggaagtgcctctcgaaaagccagcagtgcaatgggaaggacgactgtggggacgggtccgacgaggcctcctgccccaaggtgaacgtcgtcacttgtaccaaacacacctaccgctgcctcaatgggctctgcttgagcaagggcaaccctgagtgtgacgggaaggaggactgtagcgacggctcagatgagaaggactgcgactgtgggctgcggtcattcacgagacaggctcgtgttgttgggggcacggatgcggatgagggcgagtggccctggcaggtaagcctgcatgctctgggccagggccacatctgcggtgcttccctcatctctcccaactggctggtctctgccgcacactgctacatcgatgacagaggattcaggtactcagaccccacgcagtggacggccttcctgggcttgcacgaccagagccagcgcagcgcccctggggtgcaggagcgcaggctcaagcgcatcatctcccaccccttcttcaatgacttcaccttcgactatgacatcgcgctgctggagctggagaaaccggcagagtacagctccatggtgcggcccatctgcctgccggacgcctcccatgtcttccctgccggcaaggccatctgggtcacgggctggggacacacccagtatggagggtgattccgggggacccctgtccagcgtggaggcggatgggcggatcttccaggccggtgtggtgagctggggagacggctgcgctcagaggaacaagccaggcgtgtacacaaggctccctctgtttcgggactggatcaaagagaacactggggtataggggccggggccacccaaatgtgtacacctgcggggccacccatcgtccaccccagtgtgcacgcctgcaggctggagactggaccgctgactgcaccagcgcccccagaacatacactgtgaactcaatctccagggctccaaatctgcctagaaaacctctcgcttcctcagcctccaaagtggagctgggaggtagaaggggaggacactggtggttctactgacccaactgggggcaaaggtttgaagacacagcctcccccgccagccccaagctgggccgaggcgcgtttgtgtatatctgcctcccctgtctgtaaggagcagcgggaacggagcttcggggcctcctcagtgaaggtggtggggctgccggatctgggctgtggggcccttgggccacgctcttgaggaagcccaggctcggaggaccctggaaaacagacgggtctgagactgaaattgttttaccagctcccagggtggacttcagtgtgtgtatttgtgtaaatgagtaaaacattttatttctttttaggtaa

SEQ ID NO: 431330 - DNA, 2057 bp, Homo sapiens
ctctccgctatttctccccattgatctccgcgtactcctggggcatgtgcccgcaggcacgccgggctccggcaggtagaacaatttgaagcgcaccttcacattctggttgttgggcacctcaatgttaccatgtgcattcaatgttcggtgggtactggcctgggtatactgcggagagaggtcccagttcgtcgtcaccagcaacagcaacaagatcacagttcgcttccactcagatcagtcctacaccgacaccggcttcttagctgaatacctctcctacgactccagtgacccatgcccggggcagttcacgtgccgcacggggcggtgtatccggaaggagctgcgctgtgatggctgggccgactgcaccgaccacagcgatgagctcaactgcagttgcgacgccggccaccagttcacgtgcaagaacaagttctgcaagcccctcttctgggtctgcgacagtgtgaacgactgcggagacaacagcgacgagcaggggtgcagttgtccggcccagaccttcaggtgttccaatgggaagtgcctctcgaaaagccagcagtgcaatgggaaggacgactgtggggacgggtccgacgaggcctcctgccccaaggtgaacgtcgtcacttgtaccaaacacacctaccgctgcctcaatgggctctgcttgagcaagggcaaccctgagtgtgacgggaaggaggactgtagcgacggctcagatgagaaggactgcgactgtgggctgcggtcattcacgagacaggctcgtgttgttgggggcacggatgcggatgagggcgagtggccctggcaggtaagcctgcatgctctgggccagggccacatctgcggtgcttccctcatctctcccaactggctggtctctgccgcacactgctacatcgatgacagaggattcaggtactcagaccccacgcagtggacggccttcctgggcttgcacgaccagagccagcgcagcgcccctggggtgcaggagcgcaggctcaagcgcatcatctcccaccccttcttcaatgacttcaccttcgactatgacatcgcgctgctggagctggagaaaccggcagagtacagctccatggtgcggcccatctgcctgccggacgcctcccatgtcttccctgccggcaaggccatctgggtcacgggctggggacacacccagtatggaggcactggcgcgctgatcctgcaaaagggtgagatccgcgtcatcaaccagaccacctgcgagaacctcctgccgcagcagatcacgccgcgcatgatgtgcgtgggcttcctcagcggcggcgtggactcctgccagggtgattccgggggacccctgtccagcgtggaggcggatgggcggatcttccaggccggtgtggtgagctggggagacggctgcgctcagaggaacaagccaggcgtgtacacaaggctccctctgtttcgggactggatcaaagagaacactggggtataggggccggggccacccaaatgtgtacacctgcggggccacccatcgtccaccccagtgtgcacgcctgcaggctggagactggaccgctgactgcaccagcgcccccagaacatacactgtgaactcaatctccagggctccaaatctgcctagaaaacctctcgcttcctcagcctccaaagtggagctgggaggtagaaggggaggacactggtggttctactgacccaactgggggcaaaggtttgaagacacagcctcccccgccagccccaagctgggccgaggcgcgtttgtgtatatctgcctcccctgtctgtaaggagcagcgggaacggagcttcggggcctcctcagtgaaggtggtggggctgccggatctgggctgtggggcccttgggccacgctcttgaggaagcccaggctcggaggaccctggaaaacagacgggtctgagactgaaattgttttaccagctcccagggtggacttcagtgtgtgtatttgtgtaaatgagtaaaacattttatttctttttaggtaa

SEQ ID NO: 431331 - DNA, 3583 bp, Homo sapiens
gggccggaggggtggtgaacgccgtcgtggtgatggtgagggccttagcgaccaccacccgagtgaggccccctcaccttcaggcccagagccgaggggaggagcctcccccagggccggcgggggcgggcaggtgagccgggcaggtgcgcaggcgagcgcggcgggctgggcgggccgaggccacaccctgaaactacctgcgtgggccgggccggagtgtgagagcggagctgcagccggagaaagaggaagagggagagagagcgcgccagggcgagggcaccgccgccggtcgggcgcgctgggcctgcccggaatcccgccgcctgcgccccgcgccccgcgccctgcgggccatgggagccggccgccggcagggacgacgcctgtgagacccgcgagcggcctcggggaccatggggagcgatcgggcccgcaagggcggagggggcccgaaggacttcggcgcgggactcaagtacaactcccggcacgagaaagtgaatggcttggaggaaggcgtggagttcctgccagtcaacaacgtcaagaaggtggaaaagcatggcccggggcgctgggtggtgctggcagccgtgctgatcggcctcctcttggtcttgctggggatcggcttcctggtgtggcatttgcagtaccgggacgtgcgtgtccagaaggtcttcaatggctacatgaggatcacaaatgagaattttgtggatgcctacgagaactccaactccactgagtttgtaagcctggccagcaaggtgaaggacgcgctgaagctgctgtacagcggagtcccattcctgggcccctaccacaaggagtcggctgtgacggccttcagcgagggcagcgtcatcgcctactactggtctgagttcagcatcccgcagcacctggtggaggaggccgagcgcgtcatggccgaggagcgcgtagtcatgctgcccccgcgggcgcgctccctgaagtcctttgtggtcacctcagtggtggctttccccacggactccaaaacagtacagaggacccaggacaacagctgcagctttggcctgcacgcccgcggtgtggagctgatgcgcttcaccacgcccggcttccctgacagcccctaccccgctcatgcccgctgccagtgggccctgcggggggacgccgactcagtgctgagcctcaccttccgcagctttgaccttgcgtcctgcgacgagcgcggcagcgacctggtgacggtgtacaacaccctgagccccatggagccccacgccctggtgcagttgtgtggcacctaccctccctcctacaacctgaccttccactcctcccagaacgtcctgctcatcacactgataaccaacactgagcggcggcatcccggctttgaggccaccttcttccagctgcctaggatgagcagctgtggaggccgcttacgtaaagcccaggggacattcaacagcccctactacccaggccactacccacccaacattgactgcacatggaacattgaggtgcccaacaaccagcatgtgaaggtgcgcttcaaattcttctacctgctggagcccggcgtgcctgcgggcacctgccccaaggactacgtggagatcaatggggagaaatactgcggagagaggtcccagttcgtcgtcaccagcaacagcaacaagatcacagttcgcttccactcagatcagtcctacaccgacaccggcttcttagctgaatacctctcctacgactccagtgacccatgcccggggcagttcacgtgccgcacggggcggtgtatccggaaggagctgcgctgtgatggctgggccgactgcaccgaccacagcgatgagctcaactgcagttgcgacgccggccaccagttcacgtgcaagaacaagttctgcaagcccctcttctgggtctgcgacagtgtgaacgactgcggagacaacagcgacgagcaggggtgcagttgtccggcccagaccttcaggtgttccaatgggaagtgcctctcgaaaagccagcagtgcaatgggaaggacgactgtggggacgggtccgacgaggcctcctgccccaaggtgaacgtcgtcacttgtaccaaacacacctaccgctgcctcaatgggctctgcttgagcaagggcaaccctgagtgtgacgggaaggaggactgtagcgacggctcagatgagaaggactgcgactgtgggctgcggtcattcacgagacaggctcgtgttgttgggggcacggatgcggatgagggcgagtggccctggcaggtaagcctgcatgctctgggccagggccacatctgcggtgcttccctcatctctcccaactggctggtctctgccgcacactgctacatcgatgacagaggattcaggtactcagaccccacgcagtggacggccttcctgggcttgcacgaccagagccagcgcagcgcccctggggtgcaggagcgcaggctcaagcgcatcatctcccaccccttcttcaatgacttcaccttcgactatgacatcgcgctgctggagctggagaaaccggcagagtacagctccatggtgcggcccatctgcctgccggacgcctcccatgtcttccctgccggcaaggccatctgggtcacgggctggggacacacccagtatggaggcactggcgcgctgatcctgcaaaagggtgagatccgcgtcatcaaccagaccacctgcgagaacctcctgccgcagcagatcacgccgcgcatgatgtgcgtgggcttcctcagcggcggcgtggactcctgccagggtgattccgggggacccctgtccagcgtggaggcggatgggcggatcttccaggccggtgtggtgagctggggagacggctgcgctcagaggaacaagccaggcgtgtacacaaggctccctctgtttcgggactggatcaaagagaacactggggtataggggccggggccacccaaatgtgtacacctgcggggccacccatcgtccaccccagtgtgcacgcctgcaggctggagactggaccgctgactgcaccagcgcccccagaacatacactgtgaactcaatctccagggctccaaatctgcctagaaaacctctcgcttcctcagcctccaaagtggagctgggaggtagaaggggaggacactggtggttctactgacccaactgggggcaaaggtttgaagacacagcctcccccgccagccccaagctgggccgaggcgcgtttgtgtatatctgcctcccctgtctgtaaggagcagcgggaacggagcttcggggcctcctcagtgaaggtggtggggctgccggatctgggctgtggggcccttgggccacgctcttgaggaagcccaggctcggaggaccctggaaaacagacgggtctgagactgaaattgttttaccagctcccagggtggacttcagtgtgtgtatttgtgtaaatgagtaaaacattttatttctttttaggtaatatttttttttgttttttttttttttatatattattatttttttacacatta

SEQ ID NO: 431332 - DNA, 711 bp, Homo sapiens
  misc_feature (3)..(3): n is a, c, g, or t
  misc_feature (6)..(6): n is a, c, g, or t
  misc_feature (28)..(28): n is a, c, g, or t
  misc_feature (50)..(50): n is a, c, g, or t
gtngtngggcttcctcagcggcggcgangaacctcctgccgcagcagaantacgccgcgcatgatgtgcgtgactggggagacggctgcgctcagaggaacaagccaggcgtgtacacaaggctccctctgtttcgggactggatcaaagagaacactggggtataggggccggggccacccaaatgtgtacacctgcggggccacccatcgtccaccccagtgtgcacgcctgcaggctggagactggaccgctgactgcaccagcgcccccagaacatacactgtgaactcaatctccagggctccaaatctgcctagaaaacctctcgcttcctcagcctccaaagtggagctgggaggtagaaggggaggacactggtggttctactgacccaactgggggcaaaggtttgaagacacagcctcccccgccagccccaagctgggccgaggcgcgtttgtgtatatctgcctcccctgtctgtaaggagcagcgggaacggagcttcggggcctcctcagtgaaggtggtggggctgccggatctgggctgtggggcccttgggccacgctcttgaggaagcccaggctcggaggaccctggaaaacagacgggtctgagactgaaattgttttaccagctcccagggtggacttcagtgtgtgtatttgtgtaaatgagtaaaacattttatttctttttaggtaa

SEQ ID NO: 431333 - DNA, 2222 bp, Homo sapiens
  misc_feature (1889)..(1889): n is a, c, g, or t
  misc_feature (1897)..(1897): n is a, c, g, or t
gggccggaggggtggtgaacgccgtcgtggtgatggtgagggccttagcgaccaccacccgagtgaggccccctcaccttcaggcccagagccgaggggaggagcctcccccagggccggcgggggcgggcaggtgagccgggcaggtgcgcaggcgagcgcggcgggctgggcgggccgaggccacaccctgaaactacctgcgtgggccgggccggagtgtgagagcggagctgcagccggagaaagaggaagagggagagagagcgcgccagggcgagggcaccgccgccggtcgggcgcgctgggcctgcccggaatcccgccgcctgcgccccgcgccccgcgccctgcgggccatgggagccggccgccggcagggacgacgcctgtgagacccgcgagcggcctcggggaccatggggagcgatcgggcccgcaagggcggagggggcccgaaggacttcggcgcgggactcaagtacaactcccggcacgagaaagtgaatggcttggaggaaggcgtggagttcctgccagtcaacaacgtcaagaaggtggaaaagcatggcccggggcgctgggtggtgctggcagccgtgctgatcggcctcctcttggtcttgctggggatcggcttcctggtgtggcatttgcagtaccgggacgtgcgtgtccagaaggtcttcaatggctacatgaggatcacaaatgagaattttgtggatgcctacgagaactccaactccactgagtttgtaagcctggccagcaaggtgaaggacgcgctgaagctgctgtacagcggagtcccattcctgggcccctaccacaaggagtcggctgtgacggccttcagcgagggcagcgtcatcgcctactactggtctgagttcagcatcccgcagcacctggtggaggaggccgagcgcgtcatggccgaggagcgcgtagtcatgctgcccccgcgggcgcgctccctgaagtcctttgtggtcacctcagtggtggctttccccacggactccaaaacagtacagaggacccaggacaacagctgcagctttggcctgcacgcccgcggtgtggagctgatgcgcttcaccacgcccggcttccctgacagcccctaccccgctcatgcccgctgccagtgggccctgcggggggacgccgactcagtgctgagcctcaccttccgcagctttgaccttgcgtcctgcgacgagcgcggcagcgacctggtgacggtgtacaacaccctgagccccatggagccccacgccctggtgcagttgtgtggcacctaccctccctcctacaacctgaccttccactcctcccagaacgtcctgctcatcacactgataaccaacactgagcggcggcatcccggctttgaggccaccttcttccagctgcctaggatgagcagctgtggaggccgcttacgtaaagcccaggggacattcaacagcccctactacccaggccactacccacccaacattgactgcacatggaacattgaggtgcccaacaaccagcatgtgaaggtgcgcttcaaattcttctacctgctggagcccggcgtgcctgcgggcacctgccccaaggactacgtggagatcaatggggagaaatactgcggagagaggtcccagttcgtcgtcaccagcaacagcaacaagatcacagttcgcttccactcctcccagaacgtcctgctcatcacactgataaccaacagctgcagctttggcctgcacgcccgcggtgtggagctgatgcgcttcaccacgcccggcttccctgacagcccctaccccgctcatgcccgctgccagtgggccctgcggggggacgccgactcagtgctgagcctcacnttccgcanctttgaccttgcgtcctgcgacgagcgcggcagcgacctggtgacggtgtacaacaccctgagccccatggagccccatgccctggtgcagttgtgtggcacctaccctccctcctacaacctgaccttccactcctcccagaacgtcctgctcgtcacactgataaccaacactggcgaggctaggacactggcgaggctaggacactggcgaggctaggacactggcgaggctaggacactggcgaggctaggacactggcgaggctaggacactggcgaggctaggacactggcgagggctaggacactggcgaggctagga

SEQ ID NO: 431334 - DNA, 372 bp, Homo sapiens
cccactgagtagacgcggattacccgtttgtcagccccgggcatctgggctgttccagagttttctagtccaatgacccgtggggagcgtctcgaatgacgctgccctcgaagcagcccggctctcagccccgtcctgccctctccccaggcactggcgcgctgatcctgcaaaagggtgagatccgcgtcatcaaccagaccacctgcgagaacctcctgccgcagcagatcacgccgcgcatgatgtgcgtgggcttcctcagcggcggcgtggactcctgccaggtggcccccggggcaggagggcggcaggtgggccccgggagaggcgggactggggactcacggcagggcttgtctccgcccaggg

SEQ ID NO: 431335 - DNA, 197 bp, Homo sapiens
ggtgcttccctcatctctcccaactggctggtctctgccgcacactgctacatcgatgacagaggattcaggtgggtctctgggtgggcagcagggagcctccttgctggccctttgcatctgggagtaatgccaggataggttggcaccgaggcagggcactggaggggtggccacatgtgttagtccattcttga

SEQ ID NO: 431336 - DNA, 593 bp, Homo sapiens
gtcacttgtaccaaacacacctaccgctgcctcaatgggctctgcttgagcaagggcaaccctgagtgtgacgggaaggaggactgtagcgacggctcagatgagaaggactgcggtgagcagggcatccgagtacggttgtgcaggttgttcactgtgtgaagtgcccaccagagggtgcacctggaggtgcaatcccgccagcacctcacttagcagctctgtgcttgggtgagagggtgtgtctcctggaggaaaggatagccttgccagttggcatgaaggcaccaccccacgggctggctctggtcttggagaaaggcccgtacggccagcatctcagcgcctctgtagcatggcggggtcgtggctgcagtgcgttgctggcccctgctgtgtagacacagctgtggagcagtagcctggagaagagcggcccagctcacccaagcccaaggcagggtgtcacccctgcctgcccatactttaatctgcagcctctgtgtttcagaagcgttggctggccacaggttagatttgagcacagctccagcgttctgtgacctcacatcagcggttcattcgtccctctc

SEQ ID NO: 431337 - DNA, 2289 bp, Homo sapiens
ttcagctcggacccacaccacctgagtccatggagccccacgccctggtgcagttgtgtggcacctaccctccctcctacaacctgaccttccactcctcccagaacgtcctgctcatcacactgataaccaacactgagcggcggcatcccggctttgaggccaccttcttccagctgcctaggatgagcagctgtggaggccgcttacgtaaagcccaggggacattcaacagcccctactacccaggccactacccacccaacattgactgcacatggaacattgaggtgcccaacaaccagcatgtgaaggtgcgcttcaaattcttctacctgctggagcccggcgtgcctgcgggcacctgccccaaggactacgtggagatcaatggggagaaatactgcggagagaggtcccagttcgtcgtcaccagcaacagcaacaagatcacagttcgcttccactcagatcagtcctacaccgacaccggcttcttagctgaatacctctcctacgactccagtgacccatgcccggggcagttcacgtgccgcacggggcggtgtatccggaaggagctgcgctgtgatggctgggccgactgcaccgaccacagcgatgagctcaactgcagttgcgacgccggccaccagttcacgtgcaagaacaagttctgcaagcccctcttctgggtctgcgacagtgtgaacgactgcggagacaacagcgacgagcaggggtgcagttgtccggcccagaccttcaggtgttccaatgggaagtgcctctcgaaaagccagcagtgcaatgggaaggacgactgtggggacgggtccgacgaggcctcctgccccaaggtgaacgtcgtcacttgtaccaaacacacctaccgctgcctcaatgggctctgcttgagcaagggcaaccctgagtgtgacgggaaggaggactgtagcgacggctcagatgagaaggactgcgactgtgggctgcggtcattcacgagacaggctcgtgttgttgggggcacggatgcggatgagggcgagtggccctggcaggtaagcctgcatgctctgggccagggccacatctgcggtgcttccctcatctctcccaactggctggtctctgccgcacactgctacatcgatgacagaggattcaggtactcagaccccacgcagtggacggccttcctgggcttgcacgaccagagccagcgcagcgcccctggggtgcaggagcgcaggctcaagcgcatcatctcccaccccttcttcaatgacttcaccttcgactatgacatcgcgctgctggagctggagaaaccggcagagtacagctccatggtgcggcccatctgcctgccggacgcctcccatgtcttccctgccggcaaggccatctgggtcacgggctggggacacacccagtatggaggcactggcgcgctgatcctgcaaaagggtgagatccgcgtcatcaaccagaccacctgcgagaacctcctgccgcagcagatcacgccgcgcatgatgtgcgtgggcttcctcagcggcggcgtggactcctgccagggtgattccgggggacccctgtccagcgtggaggcggatgggcggatcttccaggccggtgtggtgagctggggagacggctgcgctcagaggaacaagccaggcgtgtacacaaggctccctctgtttcgggactggatcaaagagaacactggggtataggggccggggccacccaaatgtgtacacctgcggggccacccatcgtccaccccagtgtgcacgcctgcaggctggagactggaccgctgactgcaccagcgcccccagaacatacactgtgaactcaatctccagggctccaaatctgcctagaaaacctctcgcttcctcagcctccaaagtggagctgggaggtagaaggggaggacactggtggttctactgacccaactgggggcaaaggtttgaagacacagcctcccccgccagccccaagctgggccgaggcgcgtttgtgtatatctgcctcccctgtctgtaaggagcagcgggaacggagcttcggggcctcctcagtgaaggtggtggggctgccggatctgggctgtggggcccttgggccacgctcttgaggaagcccaggctcggaggaccctggaaaacagacgggtctgagactgaaattgttttaccagctcccagggtggacttcagtgtgtgtatttgtgtaaatgagtaaaacattttatttctttttaggtaa

SEQ ID NO: 431338 - DNA, 3471 bp, Homo sapiens
gggccggaggggtggtgaacgccgtcgtggtgatggtgagggccttagcgaccaccacccgagtgaggccccctcaccttcaggcccagagccgaggggaggagcctcccccagggccggcgggggcgggcaggtgagccgggcaggtgcgcaggcgagcgcggcgggctgggcgggccgaggccacaccctgaaactacctgcgtgggccgggccggagtgtgagagcggagctgcagccggagaaagaggaagagggagagagagcgcgccagggcgagggcaccgccgccggtcgggcgcgctgggcctgcccggaatcccgccgcctgcgccccgcgccccgcgccctgcgggccatgggagccggccgccggcagggacgacgcctgtgagacccgcgagcggcctcggggaccatggggagcgatcgggcccgcaagggcggagggggcccgaaggacttcggcgcgggactcaagtacaactcccggcacgagaaagtgaatggcttggaggaaggcgtggagttcctgccagtcaacaacgtcaagaaggtggaaaagcatggcccggggcgctgggtggtgctggcagccgtgctgatcggcctcctcttggtcttgctggggatcggcttcctggtgtggcatttgcagtaccgggacgtgcgtgtccagaaggtcttcaatggctacatgaggatcacaaatgagaattttgtggatgcctacgagaactccaactccactgagtttgtaagcctggccagcaaggtgaaggacgcgctgaagctgctgtacagcggagtcccattcctgggcccctaccacaaggagtcggctgtgacggccttcagcgagggcagcgtcatcgcctactactggtctgagttcagcatcccgcagcacctggtggaggaggccgagcgcgtcatggccgaggagcgcgtagtcatgctgcccccgcgggcgcgctccctgaagtcctttgtggtcacctcagtggtggctttccccacggactccaaaacagtacagaggacccaggacaacagctgcagctttggcctgcacgcccgcggtgtggagctgatgcgcttcaccacgcccggcttccctgacagcccctaccccgctcatgcccgctgccagtgggccctgcggggggacgccgactcagtgctgagcctcaccttccgcagctttgaccttgcgtcctgcgacgagcgcggcagcgacctggtgacggtgtacaacaccctgagccccatggagccccacgccctggtgcagttgtgtggcacctaccctccctcctacaacctgaccttccactcctcccagaacgtcctgctcatcacactgataaccaacactgagcggcggcatcccggctttgaggccaccttcttccagctgcctaggatgagcagctgtggaggccgcttacgtaaagcccaggggacattcaacagcccctactacccaggccactacccacccaacattgactgcacatggaacattgaggtgcccaacaaccagcatgtgaaggtgcgcttcaaattcttctacctgctggagcccggcgtgcctgcgggcacctgccccaaggactacgtggagatcaatggggagaaatactgcggagagaggtcccagttcgtcgtcaccagcaacagcaacaagatcacagttcgcttccactcagatcagtcctacaccgacaccggcttcttagctgaatacctctcctacgactccagtgacccatgcccggggcagttcacgtgccgcacggggcggtgtatccggaaggagctgcgctgtgatggctgggccgactgcaccgaccacagcgatgagctcaactgcagttgcgacgccggccaccagttcacgtgcaagaacaagttctgcaagcccctcttctgggtctgcgacagtgtgaacgactgcggagacaacagcgacgagcaggggtgcagttgtccggcccagaccttcaggtgttccaatgggaagtgcctctcgaaaagcctgaacgtcgtcacttgtaccaaacacacctaccgctgcctcaatgggctctgcttgagcaagggcaaccctgagtgtgacgggaaggaggactgtagcgacggctcagatgagaaggactgcgactgtgggctgcggtcattcacgagacaggctcgtgttgttgggggcacggatgcggatgagggcgagtggccctggcaggtaagcctgcatgctctgggccagggccacatctgcggtgcttccctcatctctcccaactggctggtctctgccgcacactgctacatcgatgacagaggattcaggtactcagaccccacgcagtggacggccttcctgggcttgcacgaccagagccagcgcagcgcccctggggtgcaggagcgcaggctcaagcgcatcatctcccaccccttcttcaatgacttcaccttcgactatgacatcgcgctgctggagctggagaaaccggcagagtacagctccatggtgcggcccatctgcctgccggacgcctcccatgtcttccctgccggcaaggccatctgggtcacgggctggggacacacccagtatggaggcactggcgcgctgatcctgcaaaagggtgagatccgcgtcatcaaccagaccacctgcgagaacctcctgccgcagcagatcacgccgcgcatgatgtgcgtgggcttcctcagcggcggcgtggactcctgccagggtgattccgggggacccctgtccagcgtggaggcggatgggcggatcttccaggccggtgtggtgagctggggagacggctgcgctcagaggaacaagccaggcgtgtacacaaggctccctctgtttcgggactggatcaaagagaacactggggtataggggccggggccacccaaatgtgtacacctgcggggccacccatcgtccaccccagtgtgcacgcctgcaggctggagactggaccgctgactgcaccagcgcccccagaacatacactgtgaactcaatctccagggctccaaatctgcctagaaaacctctcgcttcctcagcctccaaagtggagctgggaggtagaaggggaggacactggtggttctactgacccaactgggggcaaaggtttgaagacacagcctcccccgccagccccaagctgggccgaggcgcgtttgtgtatatctgcctcccctgtctgtaaggagcagcgggaacggagcttcggggcctcctcagtgaaggtggtggggctgccggatctgggctgtggggcccttgggccacgctcttgaggaagcccaggctcggaggaccctggaaaacagacgggtctgagactgaaattgttttaccagctcccagggtggacttcagtgtgtgtatttgtgtaaatgagtaaaacattttatttctttttaggtaa

SEQ ID NO: 431339 - DNA, 3766 bp, Homo sapiens
gggccggaggggtggtgaacgccgtcgtggtgatggtgagggccttagcgaccaccacccgagtgaggccccctcaccttcaggcccagagccgaggggaggagcctcccccagggccggcgggggcgggcaggtgagccgggcaggtgcgcaggcgagcgcggcgggctgggcgggccgaggccacaccctgaaactacctgcgtgggccgggccggagtgtgagagcggagctgcagccggagaaagaggaagagggagagagagcgcgccagggcgagggcaccgccgccggtcgggcgcgctgggcctgcccggaatcccgccgcctgcgccccgcgccccgcgccctgcgggccatgggagccggccgccggcagggacgacgcctgtgagacccgcgagcggcctcggggaccatggggagcgatcgggcccgcaagggcggagggggcccgaaggacttcggcgcgggactcaagtacaactcccggcacgagaaagtgaatggcttggaggaaggcgtggagttcctgccagtcaacaacgtcaagaaggtggaaaagcatggcccggggcgctgggtggtgctggcagccgtgctgatcggcctcctcttggtcttgctggggatcggcttcctggtgtggcatttgcagtaccgggacgtgcgtgtccagaaggtcttcaatggctacatgaggatcacaaatgagaattttgtggatgcctacgagaactccaactccactgagtttgtaagcctggccagcaaggtgaaggacgcgctgaagctgctgtacagcggagtcccattcctgggcccctaccacaaggagtcggctgtgacggccttcagcgagggcagcgtcatcgcctactactggtctgagttcagcatcccgcagcacctggtggaggaggccgagcgcgtcatggccgaggagcgcgtagtcatgctgcccccgcgggcgcgctccctgaagtcctttgtggtcacctcagtggtggctttccccacggactccaaaacagtacagaggacccaggacaacagctgcagctttggcctgcacgcccgcggtgtggagctgatgcgcttcaccacgcccggcttccctgacagcccctaccccgctcatgcccgctgccagtgggccctgcggggggacgccgactcagtgctgagcctcaccttccgcagctttgaccttgcgtcctgcgacgagcgcggcagcgacctggtgacggtgtacaacaccctgagccccatggagccccacgccctggtgcagttgtgtggcacctaccctccctcctacaacctgaccttccactcctcccagaacgtcctgctcatcacactgataaccaacactgagcggcggcatcccggctttgaggccaccttcttccagctgcctaggatgagcagctgtggaggccgcttacgtaaagcccaggggacattcaacagcccctactacccaggccactacccacccaacattgactgcacatggaacattgaggtgcccaacaaccagcatgtgaaggtgcgcttcaaattcttctacctgctggagcccggcgtgcctgcgggcacctgccccaaggactacgtggagatcaatggggagaaatactgcggagagaggtcccagttcgtcgtcaccagcaacagcaacaagatcacagttcgcttccactcagatcagtcctacaccgacaccggcttcttagctgaatacctctcctacgactccagtgacccatgcccggggcagttcacgtgccgcacggggcggtgtatccggaaggagctgcgctgtgatggctgggccgactgcaccgaccacagcgatgagctcaactgcagttgcgacgccggccaccagttcacgtgcaagaacaagttctgcaagcccctcttctgggtctgcgacagtgtgaacgactgcggagacaacagcgacgagcaggggtgcagttgtccggcccagaccttcaggtgttccaatgggaagtgcctctcgaaaagccagcagtgcaatgggaaggacgactgtggggacgggtccgacgaggcctcctgccccaaggtgaacgtcgtcacttgtaccaaacacacctaccgctgcctcaatgggctctgcttgagcaagggcaaccctgagtgtgacgggaaggaggactgtagcgacggctcagatgagaaggactgcgactgtgggctgcggtcattcacgagacaggctcgtgttgttgggggcacggatgcggatgagggcgagtggccctggcaggtaagcctgcatgctctgggccagggccacatctgcggtgcttccctcatctctcccaactggctggtctctgccgcacactgctacatcgatgacagaggattcaggtactcagaccccacgcagtggacggccttcctgggcttgcacgaccagagccagcgcagcgcccctggggtgcaggagcgcaggctcaagcgcatcatctcccaccccttcttcaatgacttcaccttcgactatgacatcgcgctgctggagctggagaaaccggcagagtacagctccatggtgcggcccatctgcctgccggacgcctcccatgtcttccctgccggcaaggccatctgggtcacgggctggggacacacccagtatggaggcactggcgcgctgatcctgcaaaagggtgagatccgcgtcatcaaccagaccacctgcgagaacctcctgccgcagcagatcacgccgcgcatgatgtgcgtgggcttcctcagcggcggcgtggactcctgccagggtgattccgggggacccctgtccagcgtggaggcggatgggcggatcttccaggccggtgtggtgagctggggagacggctgcgctcagaggaacaagccaggcgtgtacacaaggctccctctgtttcgggactggatcaaagagaacactggggtataggggccggggccacccaaatgtgtacacctgcggggccacccatcgtccaccccagtgtgcacgcctgcaggctggagactggaccgctgactgcaccagcgcccccagaacatacactgtgaactcaatctccagggctccaaatctgcctagaaaacctctcgcttcctcagcctccaaagtggagctgggaggtagaaggggaggacactggtggttctactgacccaactgggggcaaaggtttgaagacacagcctcccccgccagccccaagctgggccgaggcgcgtttgtgtatatctgcctcccctgtctgtaaggagcagcgggaacggagcttcggggcctcctcagtgaaggtggtggggctgccggatctgggctgtggggcccttgggccacgctcttgaggaagcccaggctcggaggaccctggaaaacagacgggtctgagactgaaattgttttaccagctcccagggtggacttcagtgtgtgtatttgtgtaaatgagtaaaacattttatttctttttaggtaaaaaaaaaaacaacaaaaaaaaaaaaaaaacaaactcaaaaaaacagcaacacgaaaacaaaaaacaacaaaacaagaagagaaaaaagaaagaaaaacaaaacagaagaaacaacacaacacaagaagagggcgagcgccacacaataaatccaccaccggaagagcaagccattaagaaacagcaccacacaacgttaataagaacgagccacacgcccacacacaagaagagg

SEQ ID NO: 431340 - DNA, 2480 bp, Homo sapiens
gggccggaggggtggtgaacgccgtcgtggtgatggtgagggccttagcgaccaccacccgagtgaggccccctcaccttcaggcccagagccgaggggaggagcctcccccagggccggcgggggcgggcaggtgagccgggcaggtgcgcaggcgagcgcggcgggctgggcgggccgaggccacaccctgaaactacctgcgtgggccgggccggagtgtgagagcggagctgcagccggagaaagaggaagagggagagagagcgcgccagggcgagggcaccgccgccggtcgggcgcgctgggcctgcccggaatcccgccgcctgcgccccgcgccccgcgccctgcgggccatgggagccggccgccggcagggacgacgcctgtgagacccgcgagcggcctcggggaccatggggagcgatcgggcccgcaagggcggagggggcccgaaggacttcggcgcgggactcaagtacaactcccggcacgagaaagtgaatggcttggaggaaggcgtggagttcctgccagtcaacaacgtcaagaaggtggaaaagcatggcccggggcgctgggtggtgctggcagccgtgctgatcggcctcctcttggtcttgctggggatcggcttcctggtgtggcatttgcagtaccgggacgtgcgtgtccagaaggtcttcaatggctacatgaggatcacaaatgagaattttgtggatgcctacgagaactccaactccactgagtttgtaagcctggccagcaaggtgaaggacgcgctgaagctgctgtacagcggagtcccattcctgggcccctaccacaaggagtcggctgtgacggccttcagcgagggcagcgtcatcgcctactactggtctgagttcagcatcccgcagcacctggtggaggaggccgagcgcgtcatggccgaggagcgcgtagtcatgctgcccccgcgggcgcgctccctgaagtcctttgtggtcacctcagtggtggctttccccacggactccaaaacagtacagaggacccaggacaacagctgcagctttggcctgcacgcccgcggtgtggagctgatgcgcttcaccacgcccggcttccctgacagcccctaccccgctcatgcccgctgccagtgggccctgcggggggacgccgactcagtgctgagcctcaccttccgcagctttgaccttgcgtcctgcgacgagcgcggcagcgacctggtgacggtgtacaacaccctgagccccatggagccccacgccctggtgcagttgtgtggcacctaccctccctcctacaacctgaccttccactcctcccagaacgtcctgctcatcacactgataaccaacactgagcggcggcatcccggctttgaggccaccttcttccagctgcctaggatgagcagctgtggaggccgcttacgtaaagcccaggggacattcaacagcccctactacccaggccactacccacccaacattgactgcacatggaacattgaggtgcccaacaaccagcatgtgaaggtgcgcttcaaattcttctacctgctggagcccggcgtgcctgcgggcacctgccccaaggactacgtggagatcaatggggagaaatactgcggagagaggtcccagttcgtcgtcaccagcaacagcaacaagatcacagttcgcttccactcagatcagtcctacaccgacaccggcttcttagctgaatacctctcctacgactccagtgacccatgcccggggcagttcacgtgccgcacggggcggtgtatccggaaggagctgcgctgtgatggctgggccgactgcaccgaccacagcgatgagctcaactgcagttgcgacgccggccaccagttcacgtgcaagaacaagttctgcaagcccctcttctgggtctgcgacagtgtgaacgactgcggagacaacagcgacgagcaggggtgcagttgtccggcccagaccttcaggtgttccaatgggaagtgcctctcgaaaagccagcagtgcaatgggaaggacgactgtggggacgggtccgacgaggcctcctgccccaaggtgaacgtcgtcacttgtaccaaacacacctaccgctgcctcaatgggctctgcttgagcaagggcaaccctgagtgtgacgggaaggaggactgtagcgacggctcagatgagaaggactgcgactgtgggctgcggtcattcacgagacaggctcgtgttgttgggggcacggatgcggatgagggcgagtggccctggcaggtaagcctgcatgctctgggccagggccacatctgcggtgcttccctcatctctcccaactggctggtctctgccgcacactgctggctgatgaattcgaattcatcagccagcagtggacctgcaaaatcctgacctggtgtcactcctgttgaagtgtggggctgatgtcaa

SEQ ID NO: 431341 - DNA, 1833 bp, Homo sapiens
gggccggaggggtggtgaacgccgtcgtggtgatggtgagggccttagcgaccaccacccgagtgaggccccctcaccttcaggcccagagccgaggggaggagcctcccccagggccggcgggggcgggcaggtgagccgggcaggtgcgcaggcgagcgcggcgggctgggcgggccgaggccacaccctgaaactacctgcgtgggccgggccggagtgtgagagcggagctgcagccggagaaagaggaagagggagagagagcgcgccagggcgagggcaccgccgccggtcgggcgcgctgggcctgcccggaatcccgccgcctgcgccccgcgccccgcgccctgcgggccatgggagccggccgccggcagggacgacgcctgtgagacccgcgagcggcctcggggaccatggggagcgatcgggcccgcaagggcggagggggcccgaaggacttcggcgcgggactcaagtacaactcccggcacgagaaagtgaatggcttggaggaaggcgtggagttcctgccagtcaacaacgtcaagaaggtggaaaagcatggcccggggcgctgggtggtgctggcagccgtgctgatcggcctcctcttggtcttgctggggatcggcttcctggtgtggcatttgcagtaccgggacgtgcgtgtccagaaggtcttcaatggctacatgaggatcacaaatgagaattttgtggatgcctacgagaactccaactccactgagtttgtaagcctggccagcaaggtgaaggacgcgctgaagctgctgtacagcggagtcccattcctgggcccctaccacaaggagtcggctgtgacggccttcagcgagggcagcgtcatcgcctactactggtctgagttcagcatcccgcagcacctggtggaggaggccgagcgcgtcatggccgaggagcgcgtagtcatgctgcccccgcgggcgcgctccctgaagtcctttgtggtcacctcagtggtggctttccccacggactccaaaacagtacagaggacccaggacaacagctgcagctttggcctgcacgcccgcggtgtggagctgatgcgcttcaccacgcccggcttccctgacagcccctaccccgctcatgcccgctgccagtgggccctgcggggggacgccgactcagtgctgagcctcaccttccgcagctttgaccttgcgtcctgcgacgagcgcggcagcgacctggtgacggtgtacaacaccctgagccccatggagccccacgccctggtgcagttgtgtggcacctaccctccctcctacaacctgaccttccactcctcccagaacgtcctgctcatcacactgataaccaacactgagcggcggcatcccggctttgaggccaccttcttccagctgcctaggatgagcagctgtggaggccgcttacgtaaagcccaggggacattcaacagcccctactacccaggccactacccacccaacattgactgcacatggaacattgaggtgcccaacaaccagcatgtgaaggtgcgcttcaaattcttctacctgctggagcccggcgtgcctgcgggcacctgccccaaggactacgtggagatcaatggggagaaatactgcggagagaggtcccagttcgtcgtcaccagcaacagcaacaagatcacagttcgcttccactcagatcagtcctacaccgacaccggcttcttagctgaatacctctcctacgactccagtgacccatgcctgggacagtgttgtgtgtggcgatccagtgctgctgtgacgggcgtagatcttc

SEQ ID NO: 431342 - DNA, 329 bp, Homo sapiens
actggtggttctactgacccaactgggggcaaaggtttgaagacacagcctcccccgccagccccaagctgggccgaggcgcgtttgtgtatatctgcctcccctgtctgtaaggagcagcgggaacggagcttcggggcctcctcagtgaaggtggtggggctgccggatctgggctgtggggcccttgggccacgctcttgaggaagcccaggctcggaggaccctggaaaacagacgggtctgagactgaaattgttttaccagctcccagggtggacttcagtgtgtgtatttgtgtaaatgagtaaaacattttatttcttttt

SEQ ID NO: 431343 - DNA, 1031 bp, Homo sapiens
agcggggggcggggcttcgggcgagagggagggcagcaggagaaaggataagaaagggagtgggactggcgcctacggtggccgaagtgggacgcgccgagccggaggctgcaggatgatgcggttcatgctattattcagccggcagggaaaactgcggctgcaaaaatggtacctggccacttcggacaaggaacggaagaagatggtgcgcgagctcatgcaggttgtcctggctcgaaagcccaagatgtgcagcttcctggagtggagggacctcaaagttgtctataagagatatgccagcctctacttctgctgcgccatcgagggccaagacaatgagctcatcacactggagctgatccaccgatacgtggagctcttagacaaatactttggcagtgtgtgcgagctggacatcatcttcaactttgagaaggcctacttcatcctggatgagtttttgatggggggggatgtccaggacacctccactttccccttttcccactgaaggttttagaagctaggaggcaggaaaatgtgacccagatgggggtgctatttggcttttattccctgcctttgcagaactgatgtcacctcagatgtccttccctccctaataactgtaaatatataaatatgtcaggttaaagggaaaaggtgttcagggcacttcttgtcctctctgtcccataacctacctccacctccaccctccccctagccagccaggcagcttctctgcctgggaggggagcctggacccccctctttctccttggctgcagtggggcctttatccagtgccagggaggaacaacatagttaatttttttctaaccttgccactttgagggaaggaagggttgggggaagggcaagctttatgggaccctggtcctggccctggcctttcactccagttctgggtgaggcaggagctgggaggggtggggagggggagggggaagtgtctgcctttatgtcctttcttctgaaataaaaggaaaagcatttctgga

SEQ ID NO: 431344 - DNA, 1182 bp, Homo sapiens
agcggggggcggggcttcgggcgagagggagggcagcaggagaaaggataagaaagggagtgggactggcgcctacggtggccgaagtgggacgcgccgagccggaggctgcaggatgatgcggttcatgctattattcagccggcagggaaaactgcggctgcaaaaatggtacctggccacttcggacaaggaacggaagaagatggtgcgcgagctcatgcaggttgtcctggctcgaaagcccaagatgtgcagcttcctggagtggagggacctcaaagttgtctataagagatatgccagcctctacttctgctgcgccatcgagggccaagacaatgagctcatcacactggagctgatccaccgatacgtggagctcttagacaaatactttggcagtgtgtgcgagctggacatcatcttcaactttgagaaggcctacttcatcctggatgagtttttgatggggggggatgtccaggacacctccaagaagagtgtgctgaaagccatcgagcaggctgacctactgcaagaggaggatgagtcgccacggagtgtgctggaggagatgggtttggcatagcccctgctgggccggggtgtggcgatggggtcctggcagcgtggcgggaacggctgcttctcctctgcccagggccctgttcttggtgggactcggctgcccctcctctgctgcctcacctttcggaatttcatttcctgtattttatctggccaccctaccttaaacggatttttatgcccaatgcgtctccaaacgggctgcccccaactccctgagctgcctttatggaaggaggagcaactcttcaggatgcgggtctgttgtgggtgatttcgtttgcccagtttagttttatttgaatcagttcacaagtacctgcgattagaaaaggcttaagatgggaggccaaggtggggaggtcgcttgagcccaggagttccagaccagctgagcaacctggcaaaacctcatccctacaaaaaatgcaaacattagctgggcataatggtgcacacttgtagtcccagctactcaggaggttggggtaggaggatcacttgagcccaggaagtcgaggttgcagtgagctgtgattgcaccactgcactccagcctgggcaacatagtgagaccctgtctcaaaaaaa

SEQ ID NO: 431345 - DNA, 389 bp, Homo sapiens
  misc_feature (19)..(19): n is a, c, g, or t
  misc_feature (21)..(21): n is a, c, g, or t
gaaaaaaaaaaaaaaagtntntccgcgaattcggcacgaggccgtaaccgcgccctttctacctctacctccacctccaccctccccctagccagccaggcagcttctctgcctgggaggggagcctggacccccctctttctccttggctgcagtggggcctttatccagtgccagggaggaacaacatagttaatttttttctaaccttgccactttgagggaaggaagggttgggggaagggcaagctttatgggaccctggtcctggccctggcctttcactccagttctgggtgaggcaggagctgggaggggtggggagggggagggggaagtgtctgcctttatgtcctttcttctgaaataaaaggaaaagcatttctgga

SEQ ID NO: 431346 - DNA, 1308 bp, Homo sapiens
agcggggggcggggcttcgggcgagagggagggcagcaggagaaaggataagaaagggagtgggactggcgcctacggtggccgaagtgggacgcgccgagccggaggctgcaggatgatgcggttcatgctattattcagccggcagggaaaactgcggctgcaaaaatggtacctggccacttcggacaaggaacggaagaagatggtgcgcgagctcatgcaggttgtcctggctcgaaagcccaagatgtgcagcttcctggagtggagggacctcaaagttgtctataagagatatgccagcctctacttctgctgcgccatcgagggccaagacaatgagctcatcacactggagctgatccaccgatacgtggagctcttagacaaatactttggcagtgtgtgcgagctggacatcatcttcaactttgagaaggcctacttcatcctggatgagtttttgatggggggggatgtccaggacacctccaagaagagtgtgctgaaagccatcgagcaggctgacctactgcaagaggaggatgagtcgccacggagtgtgctggaggagatgggtttggcatagcccctgctgggccggggtgtggcgatggggtcctggcagcgtggcgggaacggctgcttctcctctgcccagggccctgttcttggtgggactcggctgcccctcctctgctgcctcacctttcggagtgagctgtgggctcaggcccttcaaacattccctccctccaccccctacctccactttccccttttcccactgaaggttttagaagctaggaggcaggaaaatgtgacccagatgggggtgctatttggcttttattccctgcctttgcagaactgatgtcacctcagatgtccttccctccctaataactgtaaatatataaatatgtcaggttaaagggaaaaggtgttcagggcacttcttgtcctctctgtcccataacctacctccacctccaccctccccctagccagccaggcagcttctctgcctgggaggggagcctggacccccctctttctccttggctgcagtggggcctttatccagtgccagggaggaacaacatagttaatttttttctaaccttgccactttgagggaaggaagggttgggggaagggcaagctttatgggaccctggtcctggccctggcctttcactccagttctgggtgaggcaggagctgggaggggtggggagggggagggggaagtgtctgcctttatgtcctttcttctgaaataaaaggaaaagcatttctgga

SEQ ID NO: 431347 - DNA, 1464 bp, Homo sapiens
agcggggggcggggcttcgggcgagagggagggcagcaggagaaaggataagaaagggagtgggactggcgcctacggtggccgaagtgggacgcgccgagccggaggctgcaggatgatgcggttcatgctattattcagccggcagggaaaactgcggctgcaaaaatggtacctggccacttcggacaaggaacggaagaagatggtgcgcgagctcatgcaggttgtcctggctcgaaagcccaagatgtgcagcttcctggagtggagggacctcaaagttgtctataagagatatgccagcctctacttctgctgcgccatcgagggccaagacaatgagctcatcacactggagctgatccaccgatacgtggagctcttagacaaatactttggcagtgtgtgcgagctggacatcatcttcaactttgagaaggcctacttcatcctggatgagtttttgatggggggggatgtccaggacacctccaagaagagtgtgctgaaagccatcgagcaggctgacctactgcaagaggaggatgagtcgccacggagtgtgctggaggagatgggtttggcatagcccctgctgggccggggtgtggcgatggggtcctggcagcgtggcgggaacggctgcttctcctctgcccagggccctgttcttggtgggactcggctgcccctcctctgctgcctcacctttcggagtgagctgtgggctcaggcccttcaaacattccctccctccaccccctacctccactttccccttttcccactgaaggttttagaagctaggaggcaggaaaatgtgacccagatgggggtgctatttggcttttattccctgcctttgcagaactgatgtcacctcagatgtccttccctccctaataactgtaaatatataaatatgtcaggttaaagggaaaaggtgttcagggcacttcttgtcctctctgtcccataacctacctccacctccaccctccccctagccagccaggcagcttctctgcctgggaggggagcctggacccccctctttctccttggctgcagtggggcctttatccagtgccagggaggaacaacatagttaatttttttctaaccttgccactttgagggaaggaagggttgggggaagggcaagctttatgggaccctggtcctggccctggcctttcactccagttctgggtgaggcaggagctgggaggggtggggagggggagggggaagtgtctgcctttatgtcctttcttctgaaataaaaggaaaagcatttctggaaaaaaaaaaaaacaacaaaaaaaaaaaaaaaaaaaaaaacaaaaacaccaaacaacacaaacacacagaaacagagacaaaaccaccaggcaccgcgcccacacagacaacacgcgccgcacgacccacgccccccccgccagagggacccacacg

SEQ ID NO: 431348 - DNA, 1154 bp, Homo sapiens
agcggggggcggggcttcgggcgagagggagggcagcaggagaaaggataagaaagggagtgggactggcgcctacggtggccgaagtgggacgcgccgagccggaggctgcaggatgatgcggttcatgctattattcagccggcagggaaaactgcggctgcaaaaatggtacctggccacttcggacaaggaacggaagaagatggtgcgcgagctcatgcaggttgtcctggctcgaaagcccaagatgtgcagcttcctggagtggagggacctcaaagttgtctataagagatatgccagcctctacttctgctgcgccatcgagggccaagacaatgagctcatcacactggagctgatccaccgatacgtggagctcttagacaaatactttggcagtgtgtgcgagctggacatcatcttcaactttgagaaggcctacttcatcctggatgagtttttgatggggggggatgtccaggacacctccaagaagagtgtgctgaaagccatcgagcaggctgacctactgcaagaggaggatgagtcgccacggagtgtgctggaggagatgggtttggcatagcccctgctgggccggggtgtggcgatggggtcctggcagcgtggcgggaacggctgcttctcctctgcccagggccctgttcttggtgggactcggctgcccctcctctgctgcctcacctttcggagtgagctgtgggctcaggcccttcaaacattccctccctccaccccctacctccactttccccttttcccactgaaggttttagaagctaggaggcaggaaaatgtgacccagatgggggtgctatttggcttttattccctgcctttgcagaactgatgtcacctcagatgtccttccccctctttctccttggctgcagtggggcctttatccagtgccagggaggaacaacatagttaatttttttctaaccttgccactttgagggaaggaagggttgggggaagggcaagctttatgggaccctggtcctggccctggcctttcactccagttctgggtgaggcaggagctgggaggggtggggagggggagggggaagtgtctgcctttatgtcctttcttctgaaataaaaggaaaagcatttctgga

SEQ ID NO: 431349 - DNA, 1136 bp, Homo sapiens
agcggggggcggggcttcgggcgagagggagggcagcaggagaaaggataagaaagggagtgggactggcgcctacggtggccgaagtgggacgcgccgagccggaggctgcaggatgatgcggttcatgctattattcagccggcagggaaaactgcggctgcaaaaatggtacctggccacttcggacaaggaacggaagaagatggtgcgcgagctcatgcaggttgtcctggctcgaaagcccaagatgtgcagcttcctggagtggagggacctcaaagttgtctataagagatatgccagcctctacttctgctgcgccatcgagggccaagacaatgagctcatcacactggagctgatccaccgatacgtggagctcttagacaaatactttggcagtgtgtgcgagctggacatcatcttcaactttgagaaggcctacttcatcctggatgagtttttgatggggggggatgtccaggacacctccaagaagagtgtgctgaaagccatcgagcaggctgacctactgcaagaggaggatgagtcgccacggagtgtgctggaggagatgggtttggcatagcccctgctgggccggggtgtggcgatggggtcctggcagcgtggcgggaacggctgcttctcctctgcccagggccctgttcttggtgggactcggctgcccctcctctgctgcctcacctttcggagtgagctgtgggctcaggcccttcaaacattccctccctccaccccctacctccactttccccttttcccactgaaggttttagaagctaggaggcaggaaaatgtgacccagatgggggtgctatttggcttttattccctgcctttgcagaactgatgtcacctcagatgtccttccctccctaataactgtaaatatataaatatgtcaggttaaagggaaaaaaaaacagcaacaaaaaaacacagaaaaacacacaaaaaaaaaaaaacaacaaaaaaaaaaaaaaaaaaaaaaacaaaaacaccaaacaacacaaacacacagaaacagagacaaaaccaccaggcaccgcgcccacacagacaacacgcgccgcacgacccacgccccccccgccagagggacccacacg

SEQ ID NO: 431350 - DNA, 1250 bp, Homo sapiens
taggggtcagtacgaggcctggtggttggtgggacgcgccgagccggaggctgcaggatgatgcggttcatgctattattcagccggcagggaaaactgcggctgcaaaaatggtacctggccacttcggacaaggaacggaagaagatggtgcgcgagctcatgcaggttgtcctggctcgaaagcccaagatgtgcagcttcctggagtggagggacctcaaagttgtctataagagatatgccagcctctacttctgctgcgccatcgagggccaagacaatgagctcatcacactggagctgatccaccgatacgtggagctcttagacaaatactttggcagtgtgtgcgagctggacatcatcttcaactttgagaaggcctacttcatcctggatgagtttttgatggggggggatgtccaggacacctccaagaagagtgtgctgaaagccatcgagcaggctgacctactgcaagaggaggatgagtcgccacggagtgtgctggaggagatgggtttggcatagcccctgctgggccggggtgtggcgatggggtcctggcagcgtggcgggaacggctgcttctcctctgcccagggccctgttcttggtgggactcggctgcccctcctctgctgcctcacctttcggagtgagctgtgggctcaggcccttcaaacattccctccctccaccccctacctccactttccccttttcccactgaaggttttagaagctaggaggcaggaaaatgtgacccagatgggggtgctatttggcttttattccctgcctttgcagaactgatgtcacctcagatgtccttccctccctaataactgtaaatatataaatatgtcaggttaaagggaaaaggtgttcagggcacttcttgtcctctctgtcccataacctacctccacctccaccctccccctagccagccaggcagcttctctgcctgggaggggagcctggacccccctctttctccttggctgcagtggggcctttatccagtgccagggaggaacaacatagttaatttttttctaaccttgccactttgagggaaggaagggttgggggaagggcaagctttatgggaccctggtcctggccctggcctttcactccagttctgggtgaggcaggagctgggaggggtggggagggggagggggaagtgtctgcctttatgtcctttcttctgaaataaaaggaaaagcatttctgga

SEQ ID NO: 431351 - DNA, 999 bp, Homo sapiens
cagctcgcacacactgccaaagtatttgtctaagagctccacgtatcggtggatcagctccagtgtgatgagctcttagacaaatactttggcagctgtgtgcgagctggacatcatcttcaactttgagaaggcctacttcatcctggatgagtttttgatggggggggatgtccaggacacctccaagaagagtgtgctgaaagccatcgagcaggctgacctactgcaagaggaggatgagtcgccacggagtgtgctggaggagatgggtttggcatagcccctgctgggccggggtgtggcgatggggtcctggcagcgtggcgggaacggctgcttctcctctgcccagggccctgttcttggtgggactcggctgcccctcctctgctgcctcacctttcggagtgagctgtgggctcaggcccttcaaacattccctccctccaccccctacctccactttccccttttcccactgaaggttttagaagctaggaggcaggaaaatgtgacccagatgggggtgctatttggcttttattccctgcctttgcagaactgatgtcacctcagatgtccttccctccctaataactgtaaatatataaatatgtcaggttaaagggaaaaggtgttcagggcacttcttgtcctctctgtcccataacctacctccacctccaccctccccctagccagccaggcagcttctctgcctgggaggggagcctggacccccctctttctccttggctgcagtggggcctttatccagtgccagggaggaacaacatagttaatttttttctaaccttgccactttgagggaaggaagggttgggggaagggcaagctttatgggaccctggtcctggccctggcctttcactccagttctgggtgaggcaggagctgggaggggtggggagggggagggggaagtgtctgcctttatgtcctttcttctgaaataaaaggaaaagcatttctgga

SEQ ID NO: 431352 - DNA, 2154 bp, Homo sapiens
ggacctcccctttaacggcggcgctgggcgctccgctgcccccgcggcggctgctgcagcggctgctgctgctactgcggctcctgctgccgccgccgccgccgctcggcctcaggcagctgcatcctcggccgggccgggtccccgccccgcgccgcgcccggccccgccatggtgtcctggatcatctctcgcctggtggtgctcatctttggcaccctgtacccagcctattcttcctacaaggccgtgaagacaaaaaacgtgaaggaatatgtgaaatggatgatgtactggatcgtctttgccttcttcaccacggccgagacgctcacggatatagtgctctcctggttccccttctactttgaactgaagatcgccttcgtgatatggctgctgtccccttacaccaagggctccagcgtgctctaccgcaagttcgtgcacccaacgctgtccaacaaggagaaggagatcgacgagtacatcacgcaggcccgagacaagagctatgagaccatgatgagggtgggcaagaggggcctgaaccttgccgccaatgctgcagtcacagctgccgccaagggccagggggtgctgtcagagaagctccgcagcttcagcatgcaggacctgaccctgatccgggacgaggacgcactgcccctgcagaggcctgacggccgcctccgacccagccctggcagcctcctggacaccatcgaggacttaggagatgaccctgccctgagtctaaggtccagcacaaacccggcagattcccggacagaggcttctgaggatgacatgggagacaaagctcccaagagggccaaacccatcaaaaaagcgcccaaagctgagccactggcttccaagacactgaagacccggcccaagaagaagacctctggcgggggcgactcagcttgagcccctccacccccgcaggctgcagagcaaggatgaagcctcaggaggggcctcagacccagcccctgctccacactgtgccagtagcctaggtgtctcaggcccctgggccccgcagatggccatttccggtgcctgcccagtggccactcttctggaaggggcttggaaaagaggaaggaggcccagctgtgggggttgagggtagagggtggaccagaggctgaggactgagccacccaaggaggtggggactgctcggcctccaccgctgttccgctgcagccccgccctgccccacccacccagtgccttgctgaagcccatagcaatccgcttctcagaggtcctatcgtgtttccactgctcgccttggtttgggagcagggagggggaagtcctagcccagatggaccaaggacgggcctgaaggcacatgggggaaagggagcacacggggaggacgttggggaccctgggtggggcctccaggtgcagctgtggatggaagacagggattggcctgtgcttcagcgaccaggatggccaggccagagctgcagctgggggctcttttcctggtcattgggtggggctgagtgccacatgttcccacattaaaaaggggggtccagggctgtgtgagtgtgtctttctgggtctagggctcggggtagtttgggtcaaggactgtccctccagcagtcgcctcctcccaccctgagccccacagtcatctggccctttccctgctcaaccctccatcctaggctctgagcctcagaggacccagcccatgagagaacggggatctggggggcctctcacctgctcctatgaccttgctcccttttaggtcaccccattgccaccgtgcccctgggctggactcccgtgctcctcagggcccacccctgctctgtctggtacaggcccctgctgagtgggcccctctcctctgcccctggggtccatcccctcttgcccagggtccccatcctgtaccaagcagactgggccctaagacccctggcagaacccagcctctgctcacacccgccccagcttctgccacggcttcagtcagggccaggaggaacacgtgaaggagaaagagaaatgcaggagccgcggggctcccggttccttgggaagagggtgcccattggacctttggcactggatgagccaataaaccaaactctggcacctcattta

SEQ ID NO: 431353 - DNA, 2372 bp, Homo sapiens
ggacctcccctttaacggcggcgctgggcgctccgctgcccccgcggcggctgctgcagcggctgctgctgctactgcggctcctgctgccgccgccgccgccgctcggcctcaggcagctgcatcctcggccgggccgggtccccgccccgcgccgcgcccggccccgccatggtgtcctggatcatctctcgcctggtggtgctcatctttggcaccctgtacccagcctattcttcctacaaggccgtgaagacaaaaaacgtgaaggaatatgtgaaatggatgatgtactggatcgtctttgccttcttcaccacggccgagacgctcacggatatagtgctctcctggttccccttctactttgaactgaagatcgccttcgtgatatggctgctgtccccttacaccaagggctccagcgtgctctaccgcaagttcgtgcacccaacgctgtccaacaaggagaaggtttgcccccactctcagctcacctcccagcctgcccccagccaaggcagtccagagcctgcagcctcatacagactggccctccctgtggggcccagagcccaaagtgacctggcagggctgccgtggcctcccggagcaggaaggggcctctgtccaggggtgaacaagggtagggcaggacctcttctcttctcccttcccctccaatcccataggagatcgacgagtacatcacgcaggcccgagacaagagctatgagaccatgatgagggtgggcaagaggggcctgaaccttgccgccaatgctgcagtcacagctgccgccaagggccagggggtgctgtcagagaagctccgcagcttcagcatgcaggacctgaccctgatccgggacgaggacgcactgcccctgcagaggcctgacggccgcctccgacccagccctggcagcctcctggacaccatcgaggacttaggagatgaccctgccctgagtctaaggtccagcacaaacccggcagattcccggacagaggcttctgaggatgacatgggagacaaagctcccaagagggccaaacccatcaaaaaagcgcccaaagctgagccactggcttccaagacactgaagacccggcccaagaagaagacctctggcgggggcgactcagcttgagcccctccacccccgcaggctgcagagcaaggatgaagcctcaggaggggcctcagacccagcccctgctccacactgtgccagtagcctaggtgtctcaggcccctgggccccgcagatggccatttccggtgcctgcccagtggccactcttctggaaggggcttggaaaagaggaaggaggcccagctgtgggggttgagggtagagggtggaccagaggctgaggactgagccacccaaggaggtggggactgctcggcctccaccgctgttccgctgcagccccgccctgccccacccacccagtgccttgctgaagcccatagcaatccgcttctcagaggtcctatcgtgtttccactgctcgccttggtttgggagcagggagggggaagtcctagcccagatggaccaaggacgggcctgaaggcacatgggggaaagggagcacacggggaggacgttggggaccctgggtggggcctccaggtgcagctgtggatggaagacagggattggcctgtgcttcagcgaccaggatggccaggccagagctgcagctgggggctcttttcctggtcattgggtggggctgagtgccacatgttcccacattaaaaaggggggtccagggctgtgtgagtgtgtctttctgggtctagggctcggggtagtttgggtcaaggactgtccctccagcagtcgcctcctcccaccctgagccccacagtcatctggccctttccctgctcaaccctccatcctaggctctgagcctcagaggacccagcccatgagagaacggggatctggggggcctctcacctgctcctatgaccttgctcccttttaggtcaccccattgccaccgtgcccctgggctggactcccgtgctcctcagggcccacccctgctctgtctggtacaggcccctgctgagtgggcccctctcctctgcccctggggtccatcccctcttgcccagggtccccatcctgtaccaagcagactgggccctaagacccctggcagaacccagcctctgctcacacccgccccagcttctgccacggcttcagtcagggccaggaggaacacgtgaaggagaaagagaaatgcaggagccgcggggctcccggttccttgggaagagggtgcccattggacctttggcactggatgagccaataaaccaaactctggcacctcattta

SEQ ID NO: 431354 - DNA, 2092 bp, Homo sapiens
ggccggtgctgctggacacagggcacctcccaactccctgccctgtactctgcgcttgcccctgtcccaacaggttccccttctactttgaactgaagatcgccttcgtgatatggctgctgtccccttacaccaagggctccagcgtgctctaccgcaagttcgtgcacccaacgctgtccaacaaggagaaggtttgcccccactctcagctcacctcccagcctgcccccagccaaggcagtccagagcctgcagcctcatacagactggccctccctgtggggcccagagcccaaagtgacctggcagggctgccgtggcctcccggagcaggaaggggcctctgtccaggggtgaacaagggtagggcaggacctcttctcttctcccttcccctccaatcccataggagatcgacgagtacatcacgcaggcccgagacaagagctatgagaccatgatgagggtgggcaagaggggcctgaaccttgccgccaatgctgcagtcacagctgccgccaagggccagggggtgctgtcagagaagctccgcagcttcagcatgcaggacctgaccctgatccgggacgaggacgcactgcccctgcagaggcctgacggccgcctccgacccagccctggcagcctcctggacaccatcgaggacttaggagatgaccctgccctgagtctaaggtccagcacaaacccggcagattcccggacagaggcttctgaggatgacatgggagacaaagctcccaagagggccaaacccatcaaaaaagcgcccaaagctgagccactggcttccaagacactgaagacccggcccaagaagaagacctctggcgggggcgactcagcttgagcccctccacccccgcaggctgcagagcaaggatgaagcctcaggaggggcctcagacccagcccctgctccacactgtgccagtagcctaggtgtctcaggcccctgggccccgcagatggccatttccggtgcctgcccagtggccactcttctggaaggggcttggaaaagaggaaggaggcccagctgtgggggttgagggtagagggtggaccagaggctgaggactgagccacccaaggaggtggggactgctcggcctccaccgctgttccgctgcagccccgccctgccccacccacccagtgccttgctgaagcccatagcaatccgcttctcagaggtcctatcgtgtttccactgctcgccttggtttgggagcagggagggggaagtcctagcccagatggaccaaggacgggcctgaaggcacatgggggaaagggagcacacggggaggacgttggggaccctgggtggggcctccaggtgcagctgtggatggaagacagggattggcctgtgcttcagcgaccaggatggccaggccagagctgcagctgggggctcttttcctggtcattgggtggggctgagtgccacatgttcccacattaaaaaggggggtccagggctgtgtgagtgtgtctttctgggtctagggctcggggtagtttgggtcaaggactgtccctccagcagtcgcctcctcccaccctgagccccacagtcatctggccctttccctgctcaaccctccatcctaggctctgagcctcagaggacccagcccatgagagaacggggatctggggggcctctcacctgctcctatgaccttgctcccttttaggtcaccccattgccaccgtgcccctgggctggactcccgtgctcctcagggcccacccctgctctgtctggtacaggcccctgctgagtgggcccctctcctctgcccctggggtccatcccctcttgcccagggtccccatcctgtaccaagcagactgggccctaagacccctggcagaacccagcctctgctcacacccgccccagcttctgccacggcttcagtcagggccaggaggaacacgtgaaggagaaagagaaatgcaggagccgcggggctcccggttccttgggaagagggtgcccattggacctttggcactggatgagccaataaaccaaactctggcacctcattta

SEQ ID NO: 431355 - DNA, 2624 bp, Homo sapiens
ggacctcccctttaacggcggcgctgggcgctccgctgcccccgcggcggctgctgcagcggctgctgctgctactgcggctcctgctgccgccgccgccgccgctcggcctcaggcagctgcatcctcggccgggccgggtccccgccccgcgccgcgcccggccccgccatggtgtcctggatcatctctcgcctggtggtgctcatctttggcaccctgtacccagcctattcttcctacaaggccgtgaagacaaaaaacgtgaaggaatatgtgaaatggatgatgtactggatcgtctttgccttcttcaccacggccgagacgctcacggatatagtgctctcctggttccccttctactttgaactgaagatcgccttcgtgatatggctgctgtccccttacaccaagggctccagcgtgctctaccgcaagttcgtgcacccaacgctgtccaacaaggagaaggagatcgacgagtacatcacgcaggcccgagacaagagctatgagaccatgatgagggtgggcaagaggggcctgaaccttgccgccaatgctgcagtcacagctgccgccaagggccagggggtgctgtcagagaagctccgcagcttcagcatgcaggacctgaccctgatccgggacgaggacgcactgcccctgcagaggcctgacggccgcctccgacccagccctggcagcctcctggacaccatcgaggacttaggagatgaccctgccctgagtctaaggtccagcacaaacccggcagattcccggacagaggcttctgaggatgacatgggagacaaagctcccaagagggccaaacccatcaaaaaagcgcccaaagctgagccactggcttccaagacactgaagacccggcccaagaagaagacctctggcgggggcgactcagcttgagcccctccacccccgcaggctgcagagcaaggatgaagcctcaggaggggcctcagacccagcccctgctccacactgtgccagtagcctaggtgtctcaggcccctgggccccgcagatggccatttccggtgcctgcccagtggccactcttctggaaggggcttggaaaagaggaaggaggcccagctgtgggggttgagggtagagggtggaccagaggctgaggactgagccacccaaggaggtggggactgctcggcctccaccgctgttccgctgcagccccgccctgccccacccacccagtgccttgctgaagcccatagcaatccgcttctcagaggtcctatcgtgtttccactgctcgccttggtttgggagcagggagggggaagtcctagcccagatggaccaaggacgggcctgaaggcacatgggggaaagggagcacacggggaggacgttggggaccctgggtggggcctccaggtgcagctgtggatggaagacagggattggcctgtgcttcagcgaccaggatggccaggccagagctgcagctgggggctcttttcctggtcattgggtggggctgagtgccacatgttcccacattaaaaaggggggtccagggctgtgtgagtgtgtctttctgggtctagggctcggggtagtttgggtcaaggactgtccctccagcagtcgcctcctcccaccctgagccccacagtcatctggccctttccctgctcaaccctccatcctaggctctgagcctcagaggacccagcccatgagagaacggggatctggggggcctctcacctgctcctatgaccttgctcccttttaggtcaccccattgccaccgtgcccctgggctggactcccgtgctcctcagggcccacccctgctctgtctggtacaggcccctgctgagtgggcccctctcctctgcccctggggtccatcccctcttgcccagggtccccatcctgtaccaagcagactgggccctaagacccctggcagaacccagcctctgctcacacccgccccagcttctgccacggcttcagtcagggccaggaggaacacgtgaaggagaaagagaaatgcaggagccgcggggctcccggttccttgggaagagggtgcccattggacctttggcactggatgagccaataaaccaaactctggcacctcatttaaaacaaaaaaaaaaaaaaaaaaaaaaaaaaaaaaaaaaaaaaaaaaaaaaaaaaaaaaaagggggggccgccgcgaaaaaatattcccccgcggggggcgccccatttcggccccccccctttttttttaacagaggggggcccccatagtggcggcggcggattaactacgcacagcggcgcaggccgccggagttaaaccacaacggcctcgtacgtgggtcggagaacagtcctgcccgcagtgagacctttgtggggagaacggaccgcccctttgtctttgtcgggtgtggcgaccatctttgtgttgaccctactcccccagaagagtgttttaagcgcgccctaagcaggaagaataccaaaatacagcgtgtgatatctgtgtttaccccaccgctcgtttactgtcggccgctaaaaagttttggcacccgcggattgtttttacagagcattatccgggg

SEQ ID NO: 431356 - DNA, 2229 bp, Homo sapiens
ggacctcccctttaacggcggcgctgggcgctccgctgcccccgcggcggctgctgcagcggctgctgctgctactgcggctcctgctgccgccgccgccgccgctcggcctcaggcagctgcatcctcggccgggccgggtccccgccccgcgccgcgcccggccccgccatggtgtcctggatcatctctcgcctggtggtgggctgatgcggagctgggagggagaggccactgcccttggctgagaggcccagtaaccatgcctgcctccctaggctcatctttggcaccctgtacccagcctattcttcctacaaggccgtgaagacaaaaaacgtgaaggaatatgtgaaatggatgatgtactggatcgtctttgccttcttcaccacggccgagacgctcacggatatagtgctctcctggttccccttctactttgaactgaagatcgccttcgtgatatggctgctgtccccttacaccaagggctccagcgtgctctaccgcaagttcgtgcacccaacgctgtccaacaaggagaaggagatcgacgagtacatcacgcaggcccgagacaagagctatgagaccatgatgagggtgggcaagaggggcctgaaccttgccgccaatgctgcagtcacagctgccgccaagggccagggggtgctgtcagagaagctccgcagcttcagcatgcaggacctgaccctgatccgggacgaggacgcactgcccctgcagaggcctgacggccgcctccgacccagccctggcagcctcctggacaccatcgaggacttaggagatgaccctgccctgagtctaaggtccagcacaaacccggcagattcccggacagaggcttctgaggatgacatgggagacaaagctcccaagagggccaaacccatcaaaaaagcgcccaaagctgagccactggcttccaagacactgaagacccggcccaagaagaagacctctggcgggggcgactcagcttgagcccctccacccccgcaggctgcagagcaaggatgaagcctcaggaggggcctcagacccagcccctgctccacactgtgccagtagcctaggtgtctcaggcccctgggccccgcagatggccatttccggtgcctgcccagtggccactcttctggaaggggcttggaaaagaggaaggaggcccagctgtgggggttgagggtagagggtggaccagaggctgaggactgagccacccaaggaggtggggactgctcggcctccaccgctgttccgctgcagccccgccctgccccacccacccagtgccttgctgaagcccatagcaatccgcttctcagaggtcctatcgtgtttccactgctcgccttggtttgggagcagggagggggaagtcctagcccagatggaccaaggacgggcctgaaggcacatgggggaaagggagcacacggggaggacgttggggaccctgggtggggcctccaggtgcagctgtggatggaagacagggattggcctgtgcttcagcgaccaggatggccaggccagagctgcagctgggggctcttttcctggtcattgggtggggctgagtgccacatgttcccacattaaaaaggggggtccagggctgtgtgagtgtgtctttctgggtctagggctcggggtagtttgggtcaaggactgtccctccagcagtcgcctcctcccaccctgagccccacagtcatctggccctttccctgctcaaccctccatcctaggctctgagcctcagaggacccagcccatgagagaacggggatctggggggcctctcacctgctcctatgaccttgctcccttttaggtcaccccattgccaccgtgcccctgggctggactcccgtgctcctcagggcccacccctgctctgtctggtacaggcccctgctgagtgggcccctctcctctgcccctggggtccatcccctcttgcccagggtccccatcctgtaccaagcagactgggccctaagacccctggcagaacccagcctctgctcacacccgccccagcttctgccacggcttcagtcagggccaggaggaacacgtgaaggagaaagagaaatgcaggagccgcggggctcccggttccttgggaagagggtgcccattggacctttggcactggatgagccaataaaccaaactctggcacctcattta

SEQ ID NO: 431357 - DNA, 2074 bp, Homo sapiens
ggacctcccctttaacggcggcgctgggcgctccgctgcccccgcggcggctgctgcagcggctgctgctgctactgcggctcctgctgccgccgccgccgccgctcggcctcaggcagctgcatcctcggccgggccgggtccccgccccgcgccgcgcccggccccgccatggtgtcctggatcatctctcgcctggtggtgctcatctttggcaccctgtacccagcctattcttcctacaaggccgtgaagacaaaaaacgtgaaggaatatgtgaaatggatgatgtactggatcgtctttgccttcttcaccacggccgagacgctcacggatatagtgctctcctggttccccttctactttgaactgaagatcgccttcgtgatatggctgctgtccccttacaccaagggctccagcgtgctctaccgcaagttcgtgcacccaacgctgtccaacaaggagaaggagatcgacgagtacatcacgcaggcccgagacaagagctatgagaccatgatgagggtgggcaagaggggcctgaaccttgccgccaatgctgcagtcacagctgccgccaagggccagggggtgctgtcagagaagctccgcagcttcagcatgcaggacctgaccctgatccgggacgaggacgcactgcccctgcagaggcctgacggccgcctccgacccagccctggcagcctcctggacaccatcgaggacttaggagatgaccctgccctgagtctaaggtccagcacaaacccggcagattcccggacagaggcttctgaggatgacatgggagacaaagctcccaagagggccaaacccatcaaaaaagcgcccaaagctgagccactggcttccaagacactgaagacccggcccaagaagaagacctctggcgggggcgactcagcttgagcccctccacccccgcaggctgcagagcaaggatgaagcctcaggaggggcctcagacccagcccctgctccacactgtgccagtagcctaggtgtctcaggcccctgggccccgcagatggccatttccggtgcctgcccagtggccactcttctggaaggggcttggaaaagaggaaggaggcccagctgtgggggttgagggtagagggtggaccagaggctgaggactgagccacccaaggaggtggggactgctcggcctccaccgctgttccgctgcagccccgccctgccccacccacccagtgccttgctgaagcccatagcaatccgcttctcagaggtcctatcgtgtttccactgctcgccttggtttgggagcagggagggggaagtcctagcccagatggaccaaggacgggcctgaaggcacatgggggaaagggagcacacggggaggacgttggggaccctgggtggggcctccaggtgcagctgtggatggaagacagggattggcctgtgcttcagcgaccaggatggccaggccagagctgcagctgggggctcttttcctggtcattgggtggggctgagtgccacatgttcccacattaaaaaggggggtccagggctgtgtgagtgtgtctttctgggtctagggctcggggtagtttgggtcaaggactgtccctccagcagtcgcctcctcccaccctgagccccacagtcatctggccctttccctgctcaaccctccatcctaggctctgagcctcagaggacccagcccatgagagaacggggatctggggggcctctcacctgctcctatgaccttgctcccttttaggtcaccccattgccaccgtgcccctgggctggactcccgtgctcctcagggcccacccctgctctgtctggtacaggcccctgctgagtgggcccctctcaacccagcctctgctcacacccgccccagcttctgccacggcttcagtcagggccaggaggaacacgtgaaggagaaagagaaatgcaggagccgcggggctcccggttccttgggaagagggtgcccattggacctttggcactggatgagccaataaaccaaactctggcacctcattta

SEQ ID NO: 431358 - DNA, 2456 bp, Homo sapiens
ggacctcccctttaacggcggcgctgggcgctccgctgcccccgcggcggctgctgcagcggctgctgctgctactgcggctcctgctgccgccgccgccgccgctcggcctcaggcagctgcatcctcggccgggccgggtccccgccccgcgccgcgcccggccccgccatggtgtcctggatcatctctcgcctggtggtgctcatctttggcaccctgtacccagcctattcttcctacaaggccgtgaagacaaaaaacgtgaaggaatatgtgaaatggatgatgtactggatcgtctttgccttcttcaccacggccgagacgctcacggatatagtgctctcctggttccccttctactttgaactgaagatcgccttcgtgatatggctgctgtccccttacaccaagggctccagcgtgctctaccgcaagttcgtgcacccaacgctgtccaacaaggagaaggagatcgacgagtacatcacgcaggcccgagacaagagctatgagaccatgatgagggtgggcaagaggggcctgaaccttgccgccaatgctgcagtcacagctgccgccaaggtgagatgggggcaggctcagactcccagggcccctaccttgtacaaagggccctggccaggcccctttgcatccaccctgtactcggggctgtagagactctgggctcatgcagctggaggctccagtccaggctctactgctatctggccgagtcactttgattgtccggccatttccccatctgtccccagaggcaaagtgtggccctgccccagccctcagctctgtctgtgtgggactgggtgaggacagtgtggggagggcaccgagcctggggctgctgccagcaccatggtgacggccagggggtgctgtcagagaagctccgcagcttcagcatgcaggacctgaccctgatccgggacgaggacgcactgcccctgcagaggcctgacggccgcctccgacccagccctggcagcctcctggacaccatcgaggacttaggagatgaccctgccctgagtctaaggtccagcacaaacccggcagattcccggacagaggcttctgaggatgacatgggagacaaagctcccaagagggccaaacccatcaaaaaagcgcccaaagctgagccactggcttccaagacactgaagacccggcccaagaagaagacctctggcgggggcgactcagcttgagcccctccacccccgcaggctgcagagcaaggatgaagcctcaggaggggcctcagacccagcccctgctccacactgtgccagtagcctaggtgtctcaggcccctgggccccgcagatggccatttccggtgcctgcccagtggccactcttctggaaggggcttggaaaagaggaaggaggcccagctgtgggggttgagggtagagggtggaccagaggctgaggactgagccacccaaggaggtggggactgctcggcctccaccgctgttccgctgcagccccgccctgccccacccacccagtgccttgctgaagcccatagcaatccgcttctcagaggtcctatcgtgtttccactgctcgccttggtttgggagcagggagggggaagtcctagcccagatggaccaaggacgggcctgaaggcacatgggggaaagggagcacacggggaggacgttggggaccctgggtggggcctccaggtgcagctgtggatggaagacagggattggcctgtgcttcagcgaccaggatggccaggccagagctgcagctgggggctcttttcctggtcattgggtggggctgagtgccacatgttcccacattaaaaaggggggtccagggctgtgtgagtgtgtctttctgggtctagggctcggggtagtttgggtcaaggactgtccctccagcagtcgcctcctcccaccctgagccccacagtcatctggccctttccctgctcaaccctccatcctaggctctgagcctcagaggacccagcccatgagagaacggggatctggggggcctctcacctgctcctatgaccttgctcccttttaggtcaccccattgccaccgtgcccctgggctggactcccgtgctcctcagggcccacccctgctctgtctggtacaggcccctgctgagtgggcccctctcctctgcccctggggtccatcccctcttgcccagggtccccatcctgtaccaagcagactgggccctaagacccctggcagaacccagcctctgctcacacccgccccagcttctgccacggcttcagtcagggccaggaggaacacgtgaaggagaaagagaaatgcaggagccgcggggctcccggttccttgggaagagggtgcccattggacctttggcactggatgagccaataaaccaaactctggcacctcattta

SEQ ID NO: 431359 - DNA, 2040 bp, Homo sapiens
ggacctcccctttaacggcggcgctgggcgctccgctgcccccgcggcggctgctgcagcggctgctgctgctactgcggctcctgctgccgccgccgccgccgctcggcctcaggcagctgcatcctcggccgggccgggtccccgccccgcgccgcgcccggccccgccatggtgtcctggatcatctctcgcctggtggtgctcatctttggcaccctgtacccagcctattcttcctacaaggccgtgaagacaaaaaacgtgaaggaatatgtgaaatggatgatgtactggatcgtctttgccttcttcaccacggccgagacgctcacggatatagtgctctcctggttccccttctactttgaactgaagatcgccttcgtgatatggctgctgtccccttacaccaagggctccagcgtgctctaccgcaagttcgtgcacccaacgctgtccaacaaggagaagggccagggggtgctgtcagagaagctccgcagcttcagcatgcaggacctgaccctgatccgggacgaggacgcactgcccctgcagaggcctgacggccgcctccgacccagccctggcagcctcctggacaccatcgaggacttaggagatgaccctgccctgagtctaaggtccagcacaaacccggcagattcccggacagaggcttctgaggatgacatgggagacaaagctcccaagagggccaaacccatcaaaaaagcgcccaaagctgagccactggcttccaagacactgaagacccggcccaagaagaagacctctggcgggggcgactcagcttgagcccctccacccccgcaggctgcagagcaaggatgaagcctcaggaggggcctcagacccagcccctgctccacactgtgccagtagcctaggtgtctcaggcccctgggccccgcagatggccatttccggtgcctgcccagtggccactcttctggaaggggcttggaaaagaggaaggaggcccagctgtgggggttgagggtagagggtggaccagaggctgaggactgagccacccaaggaggtggggactgctcggcctccaccgctgttccgctgcagccccgccctgccccacccacccagtgccttgctgaagcccatagcaatccgcttctcagaggtcctatcgtgtttccactgctcgccttggtttgggagcagggagggggaagtcctagcccagatggaccaaggacgggcctgaaggcacatgggggaaagggagcacacggggaggacgttggggaccctgggtggggcctccaggtgcagctgtggatggaagacagggattggcctgtgcttcagcgaccaggatggccaggccagagctgcagctgggggctcttttcctggtcattgggtggggctgagtgccacatgttcccacattaaaaaggggggtccagggctgtgtgagtgtgtctttctgggtctagggctcggggtagtttgggtcaaggactgtccctccagcagtcgcctcctcccaccctgagccccacagtcatctggccctttccctgctcaaccctccatcctaggctctgagcctcagaggacccagcccatgagagaacggggatctggggggcctctcacctgctcctatgaccttgctcccttttaggtcaccccattgccaccgtgcccctgggctggactcccgtgctcctcagggcccacccctgctctgtctggtacaggcccctgctgagtgggcccctctcctctgcccctggggtccatcccctcttgcccagggtccccatcctgtaccaagcagactgggccctaagacccctggcagaacccagcctctgctcacacccgccccagcttctgccacggcttcagtcagggccaggaggaacacgtgaaggagaaagagaaatgcaggagccgcggggctcccggttccttgggaagagggtgcccattggacctttggcactggatgagccaataaaccaaactctggcacctcattta

SEQ ID NO: 431360 - DNA, 1157 bp, Homo sapiens
ggacctcccctttaacggcggcgctgggcgctccgctgcccccgcggcggctgctgcagcggctgctgctgctactgcggctcctgctgccgccgccgccgccgctcggcctcaggcagctgcatcctcggccgggccgggtccccgccccgcgccgcgcccggccccgccatggtgtcctggatcatctctcgcctggtggtgctcatctttggcaccctgtacccagcctattcttcctacaaggccgtgaagacaaaaaacgtgaaggaatatgtgaaatggatgatgtactggatcgtctttgccttcttcaccacggccgagacgctcacggatatagtgctctcctggttccccttctactttgaactgaagatcgccttcgtgatatggctgctgtccccttacaccaagggctccagcgtgctctaccgcaagttcgtgcacccaacgctgtccaacaaggagaaggagatcgacgagtacatcacgcaggcccgagacaagagctatgagaccatgatgagggtgggcaagaggggcctgaaccttgccgccaatgctgcagtcacagctgccgccaagggccagggggtgctgtcagagaagctccgcagcttcagcatgcaggacctgaccctgatccgggacgaggacgcactgcccctgcagaggcctgacggccgcctccgacccagccctggcagcctcctggacaccatcgaggacttaggagatgaccctgccctgagtctaaggtccagcacaaacccggcagattcccggacagaggcttctgaggatgacatgggagacaaagctcccaagagggccaaacccatcaaaaaagcgcccaaagctgagccactggcttccaagacactgaagacccggcccaagaagaagacctctggcgggggcgactcagcttgagcccctccacccccgcaggctgcagagcaaggatgaagcaacccagcctctgctcacacccgccccagcttctgccacggcttcagtcagggccaggaggaacacgtgaaggagaaagagaaatgcaggagccgcggggctcccggttccttgggaagagggtgcccattggacctttggcactggatgagccaataaaccaaactctggcacctcattta

SEQ ID NO: 431361 - DNA, 1188 bp, Homo sapiens
ggacctcccctttaacggcggcgctgggcgctccgctgcccccgcggcggctgctgcagcggctgctgctgctactgcggctcctgctgccgccgccgccgccgctcggcctcaggcagctgcatcctcggccgggccgggtccccgccccgcgccgcgcccggccccgccatggtgtcctggatcatctctcgcctggtggtgctcatctttggcaccctgtacccagcctattcttcctacaaggccgtgaagacaaaaaacgtgaaggaatatgtgaaatggatgatgtactggatcgtctttgccttcttcaccacggccgagacgctcacggatatagtgctctcctggttccccttctactttgaactgaagatcgccttcgtgatatggctgctgtccccttacaccaagggctccagcgtgctctaccgcaagttcgtgcacccaacgctgtccaacaaggagaaggagatcgacgagtacatcacgcaggcccgagacaagagctatgagaccatgatgagggtgggcaagaggggcctgaaccttgccgccaatgctgcagtcacagctgccgccaagggccagggggtgctgtcagagaagctccgcagcttcagcatgcaggacctgaccctgatccgggacgaggacgcactgcccctgcagaggcctgacggccgcctccgacccagccctggcagcctcctggacaccatcgaggacttaggagatgaccctgccctgagtctaaggtccagcacaaacccggcagattcccggacagaggcttctgaggatgacatgggagacaaagctcccaagagggccaaacccatcaaaaaagcgcccaaagctgagccactggcttccaagacactgaagacccggcccaagaagaagacctctggcgggggcgactcagcttgagcccctccacccccgcaggctgcagagcaaggatgaagcctcaggaggggcctcagacccagcccctgctccacactgtgccagtagcctaggtgtctcaggcccctgggccccgcagatggccatttccggtgcctgcccagtggccactcttctggaaggggcttggaaaagaggaaggaggcccagctgtgggcaatgaccccagatattgccccgagggctcactacgctatccaaagctcctgccta

SEQ ID NO: 431362 - DNA, 1349 bp, Homo sapiens
ggacctcccctttaacggcggcgctgggcgctccgctgcccccgcggcggctgctgcagcggctgctgctgctactgcggctcctgctgccgccgccgccgccgctcggcctcaggcagctgcatcctcggccgggccgggtccccgccccgcgccgcgcccggccccgccatggtgtcctggatcatctctcgcctggtggtgctcatctttggcaccctgtacccagcctattcttcctacaaggccgtgaagacaaaaaacgtgaaggaatatgtgaaatggatgatgtactggatcgtctttgccttcttcaccacggccgagacgctcacggatatagtgctctcctggttccccttctactttgaactgaagatcgccttcgtgatatggctgctgtccccttacaccaagggctccagcgtgctctaccgcaagttcgtgcacccaacgctgtccaacaaggagaaggagatcgacgagtacatcacgcaggcccgagacaagagctatgagaccatgatgagggtgggcaagaggggcctgaaccttgccgccaatgctgcagtcacagctgccgccaaggtgagatgggggcaggctcagactcccagggcccctaccttgtacaaagggccctggccaggcccctttgcatccaccctgtactcggggctgtagagactctgggctcatgcagctggaggctccagtccaggctctactgctatctggccgagtcactttgattgtccggccatttccccatctgtccccagaggcaaagtgtggccctgccccagccctcagctctgtctgtgtgggactgggtgaggacagtgtggggagggcaccgagcctggggctgctgccagcaccatggtgacggccagggggtgctgtcagagaagctccgcagcttcagcatgcaggacctgaccctgatccgggacgaggacgcactgcccctgcagaggcctgacggccgcctccgacccagccctggcagcctctggactcccgtgctcctcagggcccacccctgctctgtctggtacaggcccctgctgagtgggcccctctcctctgcccctggggtccatcccctcttgcccagggtccccatcctgtaccaagcagactgggccctaagacccctggcagaacccagcctctgctcacacccgccccagcttctgccacggcttcagtcagggccaggaggaacacgtgaaggagaaagagaaatgcaggagccgcggggctcccggttccttgggaagagggtgcccattggacctttggcactggatgagccaataaaccaaactctggcacctcattta

SEQ ID NO: 431363 - DNA, 634 bp, Homo sapiens
  misc_feature (1)..(1): n is a, c, g, or t
ngttggccaggctggtctcaaactaccgacctcaggtgatctgcccgcctcagcctcccaaagtgctgggattaaaggtgtgagccaccatgcccggccgtatcttcccgacaatcttgtgaaatagatactactattaaaagtagctgtatcagataatttctagatgtaagagggttcgccaactatagctagcaagtcaaatcctgctgtttttattttgagaaggggactctgtcccccaagctggagtccagtggcctgaacacggcttctctgtagccttgacttcctaggctcaagcaatcctcctgccccagcctcctacgtagctgggatcacaagatgcgcaccactacgcctggctgtttttgattttttgtagaggtggggatctcacttttttgcccaggctggtctcagactcctgggctcaagtgatcctcctgcctcggcctccacaagtgctgagattactggtgtgagccagcatgcccggcctgccacctgattttgtaccataagcctaaaaatgtttgttgtttgttttttcaatttttagtggtcgaaaaatcaaaataaaatgttttgtaaaataattttataaaatccatttgataaattaataatttgt

SEQ ID NO: 431364 - DNA, 3684 bp, Homo sapiens
cgcggagcgccctgccccggcagggggatgtggcgatgggtgagggtcatggggtgtgagcatccctgagccatcgatccgggagggccgcgggttcccttgctttgccgccgggagcggcgcacgcagccccgcactcgcctacccggccccgggcggcggcgcggcccatgcggctgggggcggaggctgggagcgggtggcgggcgcggcggcccgggcccgggcggtgattggccgcctgctggccgcgactgaggcccgggaggcgggcggggagcgcaggcggagctcgctgccgccgagctgagaagatgctgctgtccctggtgctccacacgtactccatgcgctacctgctgcccagcgtcgtgctcctgggcacggcgcccacctacgtgttggcctggggggtctggcggctgctctccgccttcctgcccgcccgcttctaccaagcgctggacgaccggctctactgcgtctaccagagcatggtgctcttcttcttcgagaattacaccggggtccagatattgctatatggagatttgccaaaaaataaagaaaatataatatatttagcaaatcatcaaagcacagttgactggattgttgctgacatcttggccatcaggcagaatgcgctaggacatgtgcgctacgtgctgaaagaagggttaaaatggctgccattgtatgggtgttactttgctcagcatggaggaatctatgtaaagcgcagtgccaaatttaacgagaaagagatgcgaaacaagttgcagagctacgtggacgcaggaactccaatgtatcttgtgatttttccagaaggtacaaggtataatccagagcaaacaaaagtcctttcagctagtcaggcatttgctgcccaacgtggccttgcagtattaaaacatgtgctaacaccacgaataaaggcaactcacgttgcttttgattgcatgaagaattatttagatgcaatttatgatgttacggtggtttatgaagggaaagacgatggagggcagcgaagagagtcaccgaccatgacggaatttctctgcaaagaatgtccaaaaattcatattcacattgatcgtatcgacaaaaaagatgtcccagaagaacaagaacatatgagaagatggctgcatgaacgtttcgaaatcaaagataagatgcttatagaattttatgagtcaccagatccagaaagaagaaaaagatttcctgggaaaagtgttaattccaaattaagtatcaagaagactttaccatcaatgttgatcttaagtggtttgactgcaggcatgcttatgaccgatgctggaaggaagctgtatgtgaacacctggatatatggaaccctacttggctgcctgtgggttactattaaagcatagacaagtagctgtctccagacagtgggatgtgctacattgtctatttttggcggctgcacatgacatcaaattgtttcctgaatttattaaggagtgtaaataaagccttgttgattgaagattggataatagaatttgtgacgaaagctgatatgcaatggtcttgggcaaacatacctggttgtacaactttagcatcggggctgctggaagggtaaaagctaaatggagtttctcctgctctgtccatttcctatgaactaatgacaacttgagaaggctgggaggattgtgtattttgcaagtcagatggctgcatttttgagcattaatttgcagcgtatttcactttttctgttattttcaatttattacaacttgacagctccaagctcttattactaaagtatttagtatcttgcagctagttaatatttcatcttttgcttatttctacaagtcagtgaaataaattgtatttaggaagtgtcaggatgttcaaaggaaagggtaaaaagtgttcatggggaaaaagctctgtttagcacatgattttattgtattgcgttattagctgattttactcattttatatttgcaaaataaatttctaatatttattgaaattgcttaatttgcacaccctgtacacacagaaaatggtataaaatatgagaacgaagtttaaaattgtgactctgattcattatagcagaactttaaatttcccagctttttgaagatttaagctacgctattagtacttccctttgtctgtgccataagtgcttgaaaacgttaaggttttctgttttgttttgtttttttaatatcaaaagagtcggtgtgaaccttggttggaccccaagttcacaagatttttaaggtgatgagagcctgcagacattctgcctagatttactagcgtgtgccttttgcctgcttctctttgatttcacagaatattcattcagaagtcgcgtttctgtagtgtggtggattcccactgggctctggtccttcccttggatcccgtcagtggtgctgctcagcggcttgcacgtagacttgctaggaagaaatgcagagccagcctgtgctgcccactttcagagttgaactctttaagcccttgtgagtgggcttcaccagctactgcagaggcattttgcatttgtctgtgtcaagaagttcaccttctcaagccagtgaaatacagacttaattcgtcatgactgaacgaatttgtttatttcccattaggtttagtggagctacacattaatatgtatcgccttagagcaagagctgtgttccaggaaccagatcacgatttttagccatggaacaatatatcccatgggagaagacctttcagtgtgaactgttctatttttgtgttataatttaaacttcgatttcctcatagtcctttaagttgacatttctgcttactgctactggatttttgctgcagaaatatatcagtggcccacattaaacataccagttggatcatgataagcaaaatgaaagaaataatgattaagggaaaattaagtgactgtgttacactgcttctcccatgccagagaataaactctttcaagcatcatctttgaagagtcgtgtggtgtgaattggtttgtgtacattagaatgtatgcacacatccatggacactcaggatatagttggcctaataatcggggcatgggtaaaacttatgaaaatttcctcatgctgaattgtaattttctcttacctgtaaagtaaaatttagatcaattccatgtctttgttaagtacagggatttaatatattttgaatataatgggtatgttctaaatttgaactttgagaggcaatactgttggaattatgtggattctaactcattttaacaaggtagcctgacctgcataagatcacttgaatgttaggtttcatagaactatactaatcttctcacaaaaggtctataaaatacagtcgttgaaaaaaattttgtatcaaaatgtttggaaaattagaagcttctccttaacctgtattgatactgacttgaattattttctaaaattaagagccgtatacctacctgtaagtcttttcacatatcatttaaacttttgtttgtattattactgatttacagcttagttattaatttttctttataagaatgccgtcgatgtgcatgcttttatgtttttcagaaaagggtgtgtttggatgaaagtaaaaaaaaaaataaaatctttcactgtctct

SEQ ID NO: 431365 - DNA, 1357 bp, Homo sapiens
tcctaatcataggacttttttttttttttttttttttttttttttggagacggagtctcgctgtcgcccaggctggagtgcagtggcgcaatctcggttcactgcaggctccgccccctggggttcacgccattctctactcgggagggtgaggtgggaggatcgcttcagcccaggaggttgagattgcagtgagccatggacataccactgcactacagcctaggtaacagcacgagaccccaactcttagaaaatgaaaaggaaatatagaaatataaaatttgcttattatagacacacagtaactcccagatatgtaccacaaaaaatgtgaaaagagagagaaatgtctaccaaagcagtattttgtgtgtataattgcaagcgcatagtaaaataattttaaccttaatttgtttttagtagtgtttagattgaagattgagtgaaatattttcttggcagatattccgtatctggtggaaagctacaatgcaatgtcgttgtagttttgcatggcttgctttataaacaagattttttctccctccttttgggccagttttcattacgagtaactcacactttttgattaaagaacttgaaattacgttatcacttagtataattgacattatatagagactatgtaacatgcaatcattagaatcaaaattagtactttggtcaaaatatttacaacattcacatacttgtcaaatattcatgtaattaactgaatttaaaaccttcaactattatgaagtgctcgtctgtacaatcgctaatttactcagtttagagtagctacaactcttcgatactatcatcaatatttgacatcttttccaatttgtgtatgaaaagtaaatctattcctgtagcaactggggagtcatatatgaggtcaaagacatataccttgttattataatatgtatactataataatagctggttatcctgagcaggggaaaaggttatttttaggaaaaccacttcaaatagaaagctgaagtacttctaatatactgagggaagtataatatgtggaacaaactctcaacaaaatgtttattgatgttgatgaaacagatcagtttttccatccggattattattggttcatgattttatatgtgaatatgtaagatatgttctgcaattttataaatgttcatgtctttttttaaaaaaggtgctattgaaattctgtgtctccagcaggcaagaatacttgactaactctttttgtctctttatggtattttcagaataaagtctgacttgtgtttttgagattattggtgcctcattaattcagcaataaaggaaaatatgcatctcaaaaatt

SEQ ID NO: 431366 - DNA, 1170 bp, Homo sapiens
cgcggagcgccctgccccggcagggggatgtggcgatgggtgagggtcatggggtgtgagcatccctgagccatcgatccgggagggccgcgggttcccttgctttgccgccgggagcggcgcacgcagccccgcactcgcctacccggccccgggcggcggcgcggcccatgcggctgggggcggaggctgggagcgggtggcgggcgcggcggcccgggcccgggcggtgattggccgcctgctggccgcgactgaggcccgggaggcgggcggggagcgcaggcggagctcgctgccgccgagctgagaagatgctgctgtccctggtgctccacacgtactccatgcgctacctgctgcccagcgtcgtgctcctgggcacggcgcccacctacgtgttggcctggggggtctggcggctgctctccgccttcctgcccgcccgcttctaccaagcgctggacgaccggctctactgcgtctaccagagcatggtgctcttcttcttcgagaattacaccggggtccaggtgagccgcctcccgctcccgggtctcggcgtccacccgagctcccgggggcgcggacctctccgctcccccacagctggcgagggtcacccggccggcccggcggacccagcacggagagcacgtgccgcctccccgccttcctctccgcatgcttcctgccgttctgccgagatcgctctctaggaagctgtggctgcgtcgtcctgaggctacgagtgggacccgccgcccctttccccgcccctcgcctgggtctgatgctgcttagcaaagtgggtgcagatgcacgttttaaataatagggcacgcgtttagcagtttctggcctttggtccaaagaggtggtcatgttggaacagatcggagacgtctacactccgaagtgcgcttttacagtgacctcttgaaacagaagtacaattcggtcttgtgttctttcccctggacaagtgaaagctgggcgaagaaatgaatacatttgttaaccgtagaagcctaactagatacaattcttgccaactttaactgggcttgaatgtgtgggtgatctgttgtctgattactttctttctgttactgtttctctgtagagattggattcgtagattaaacttgagaaacaaaccataaaagt

SEQ ID NO: 431367 - DNA, 3936 bp, Homo sapiens
cgcggagcgccctgccccggcagggggatgtggcgatgggtgagggtcatggggtgtgagcatccctgagccatcgatccgggagggccgcgggttcccttgctttgccgccgggagcggcgcacgcagccccgcactcgcctacccggccccgggcggcggcgcggcccatgcggctgggggcggaggctgggagcgggtggcgggcgcggcggcccgggcccgggcggtgattggccgcctgctggccgcgactgaggcccgggaggcgggcggggagcgcaggcggagctcgctgccgccgagctgagaagatgctgctgtccctggtgctccacacgtactccatgcgctacctgctgcccagcgtcgtgctcctgggcacggcgcccacctacgtgttggcctggggggtctggcggctgctctccgccttcctgcccgcccgcttctaccaagcgctggacgaccggctctactgcgtctaccagagcatggtgctcttcttcttcgagaattacaccggggtccagatattgctatatggagatttgccaaaaaataaagaaaatataatatatttagcaaatcatcaaagcacagttgactggattgttgctgacatcttggccatcaggcagaatgcgctaggacatgtgcgctacgtgctgaaagaagggttaaaatggctgccattgtatgggtgttactttgctcagcatggaggaatctatgtaaagcgcagtgccaaatttaacgagaaagagatgcgaaacaagttgcagagctacgtggacgcaggaactccaatgtatcttgtgatttttccagaaggtacaaggtataatccagagcaaacaaaagtcctttcagctagtcaggcatttgctgcccaacgtggccttgcagtattaaaacatgtgctaacaccacgaataaaggcaactcacgttgcttttgattgcatgaagaattatttagatgcaatttatgatgttacggtggtttatgaagggaaagacgatggagggcagcgaagagagtcaccgaccatgacggaatttctctgcaaagaatgtccaaaaattcatattcacattgatcgtatcgacaaaaaagatgtcccagaagaacaagaacatatgagaagatggctgcatgaacgtttcgaaatcaaagataagatgcttatagaattttatgagtcaccagatccagaaagaagaaaaagatttcctgggaaaagtgttaattccaaattaagtatcaagaagactttaccatcaatgttgatcttaagtggtttgactgcaggcatgcttatgaccgatgctggaaggaagctgtatgtgaacacctggatatatggaaccctacttggctgcctgtgggttactattaaagcatagacaagtagctgtctccagacagtgggatgtgctacattgtctatttttggcggctgcacatgacatcaaattgtttcctgaatttattaaggagtgtaaataaagccttgttgattgaagattggataatagaatttgtgacgaaagctgatatgcaatggtcttgggcaaacatacctggttgtacaactttagcatcggggctgctggaagggtaaaagctaaatggagtttctcctgctctgtccatttcctatgaactaatgacaacttgagaaggctgggaggattgtgtattttgcaagtcagatggctgcatttttgagcattaatttgcagcgtatttcactttttctgttattttcaatttattacaacttgacagctccaagctcttattactaaagtatttagtatcttgcagctagttaatatttcatcttttgcttatttctacaagtcagtgaaataaattgtatttaggaagtgtcaggatgttcaaaggaaagggtaaaaagtgttcatggggaaaaagctctgtttagcacatgattttattgtattgcgttattagctgattttactcattttatatttgcaaaataaatttctaatatttattgaaattgcttaatttgcacaccctgtacacacagaaaatggtataaaatatgagaacgaagtttaaaattgtgactctgattcattatagcagaactttaaatttcccagctttttgaagatttaagctacgctattagtacttccctttgtctgtgccataagtgcttgaaaacgttaaggttttctgttttgttttgtttttttaatatcaaaagagtcggtgtgaaccttggttggaccccaagttcacaagatttttaaggtgatgagagcctgcagacattctgcctagatttactagcgtgtgccttttgcctgcttctctttgatttcacagaatattcattcagaagtcgcgtttctgtagtgtggtggattcccactgggctctggtccttcccttggatcccgtcagtggtgctgctcagcggcttgcacgtagacttgctaggaagaaatgcagagccagcctgtgctgcccactttcagagttgaactctttaagcccttgtgagtgggcttcaccagctactgcagaggcattttgcatttgtctgtgtcaagaagttcaccttctcaagccagtgaaatacagacttaattcgtcatgactgaacgaatttgtttatttcccattaggtttagtggagctacacattaatatgtatcgccttagagcaagagctgtgttccaggaaccagatcacgatttttagccatggaacaatatatcccatgggagaagacctttcagtgtgaactgttctatttttgtgttataatttaaacttcgatttcctcatagtcctttaagttgacatttctgcttactgctactggatttttgctgcagaaatatatcagtggcccacattaaacataccagttggatcatgataagcaaaatgaaagaaataatgattaagggaaaattaagtgactgtgttacactgcttctcccatgccagagaataaactctttcaagcatcatctttgaagagtcgtgtggtgtgaattggtttgtgtacattagaatgtatgcacacatccatggacactcaggatatagttggcctaataatcggggcatgggtaaaacttatgaaaatttcctcatgctgaattgtaattttctcttacctgtaaagtaaaatttagatcaattccatgtctttgttaagtacagggatttaatatattttgaatataatgggtatgttctaaatttgaactttgagaggcaatactgttggaattatgtggattctaactcattttaacaaggtagcctgacctgcataagatcacttgaatgttaggtttcatagaactatactaatcttctcacaaaaggtctataaaatacagtcgttgaaaaaaattttgtatcaaaatgtttggaaaattagaagcttctccttaacctgtattgatactgacttgaattattttctaaaattaagagccgtatacctacctgtaagtcttttcacatatcatttaaacttttgtttgtattattactgatttacagcttagttattaatttttctttataagaatgccgtcgatgtgcatgcttttatgtttttcagaaaagggtgtgtttggatgaaagtaaaaaaaaaaataaaatctttcactgtctctaaaaaaaaaaaaaaaaaaaaaaaaaaaaaaaaaaaaaaaaaaaaaaaaaaaaacaaaaaaaaacaaaaaaagaccaacggacaggacaactagaacgcaagaaaaacgcaagggagagcagaagaacagagcagcccagccgaagggaggcaccacaccaacacagcggcgagaacacgcgagctacagcgaaccgagtagaggacgaggaagataacaaaacagaaagtagcaaacaacaaaccgctgcgg

SEQ ID NO: 431368 - DNA, 3467 bp, Homo sapiens
cgcggagcgccctgccccggcagggggatgtggcgatgggtgagggtcatggggtgtgagcatccctgagccatcgatccgggagggccgcgggttcccttgctttgccgccgggagcggcgcacgcagccccgcactcgcctacccggccccgggcggcggcgcggcccatgcggctgggggcggaggctgggagcgggtggcgggcgcggcggcccgggcccgggcggtgattggccgcctgctggccgcgactgaggcccgggaggcgggcggggagcgcaggcggagctcgctgccgccgagctgagaagatgctgctgtccctggtgctccacacgtactccatgcgctacctgctgcccagcgtcgtgctcctgggcacggcgcccacctacgtgttggcctggggggtctggcggctgctctccgccttcctgcccgcccgcttctaccaagcgctggacgaccggctctactgcgtctaccagagcatggtgctcttcttcttcgagaattacaccggggtccagatattgctatatggagatttgccaaaaaataaagaaaatataatatatttagcaaatcatcaaagcacagttgactggattgttgctgacatcttggccatcaggcagaatgcgctaggacatgtgcgctacgtgctgaaagaagggttaaaatggctgccattgtatgggtgttactttgctcagcatggaggaatctatgtaaagcgcagtgccaaatttaacgagaaagagatgcgaaacaagttgcagagctacgtggacgcaggaactccaatgtatcttgtgatttttccagaaggtacaaggtataatccagagcaaacaaaagtcctttcagctagtcaggcatttgctgcccaacgtggccttgcagtattaaaacatgtgctaacaccacgaataaaggcaactcacgttgcttttgattgcatgaagaattatttagatgcaatttatgatgttacggtggtttatgaagggaaagacgatggagggcagcgaagagagtcaccgaccatgacggaatttctctgcaaagaatgtccaaaaattcatattcacattgatcgtatcgacaaaaaagatgtcccagaagaacaagaacatatgagaagatggctgcatgaacgtttcgaaatcaaagataagatgcttatagaattttatgagtcaccagatccagaaagaagaaaaagatttcctgggaaaagtgttaattccaaattaagtatcaagaagactttaccatcaatgttgatcttaagtggtttgactgcaggcatgcttatgaccgatgctggaaggaagctgtatgtgaacacctggatatatggaaccctacttggctgcctgtgggttactattaaagcatagacaagtagctgtctccagacagtgggatgtgctacattgtctatttttggcggctgcacatgacatcaaattgtttcctgaatttattaaggagtgtaaataaagccttgttgattgaagattggataatagaatttgtgacgaaagctgatatgcaatggtcttgggcaaacatacctggttgtacaactttagcatcggggctgctggaagggtaaaagctaaatggagtttctcctgctctgtccatttcctatgaactaatgacaacttgagaaggctgggaggattgtgtattttgcaagtcagatggctgcatttttgagcattaatttgcagcgtatttcactttttctgttattttcaatttattacaacttgacagctccaagctcttattactaaagtatttagtatcttgcagctagttaatatttcatcttttgcttatttctacaagtcagtgaaataaattgtatttaggaagtgtcaggatgttcaaaggaaagggtaaaaagtgttcatggggaaaaagctctgtttagcacatgattttattgtattgcgttattagctgattttactcattttatatttgcaaaataaatttctaatatttattgaaattgcttaatttgcacaccctgtacacacagaaaatggtataaaatatgagaacgaagtttaaaattgtgactctgattcattatagcagaactttaaatttcccagctttttgaagatttaagctacgctattagtacttccctttgtctgtgccataagtgcttgaaaacgttaaggttttctgttttgttttgtttttttaatatcaaaagagtcggtgtgaaccttggttggaccccaagttcacaagatttttaaggtgatgagagcctgcagacattctgcctagatttactagcgtgtgccttttgcctgcttctctttgatttcacagaatattcattcagaagtcgcgtttctgtagtgtggtggattcccactgggctctggtccttcccttggatcccgtcagtggtgctgctcagcggcttgcacgtagacttgctaggaagaaatgcagagccagcctgtgctgcccactttcagagttgaactctttaagcccttgtgagtgggcttcaccagctactgcagaggcattttgcatttgtctgtgtcaagaagttcaccttctcaagccagtgaaatacagacttaattcgtcatgactgaacgaatttgtttatttcccattaggtttagtggagctacacattaatatgtatcgccttagagcaagagctgtgttccaggaaccagatcacgatttttagccatggaacaatatatcccatgggagaagacctttcagtgtgaactgttctatttttgtgttataatttaaacttcgatttcctcatagtcctttaagttgacatttctgcttactgctactggatttttgctgcagaaatatatcagtggcccacattaaacataccagttggatcatgataagcaaaatgaaagaaataatgattaagggaaaattaagtgactgtgttacactgcttctcccatgccagagaataaactctttcaagcatcatctttgaagagtcgtgtggtgtgaattggtttgtgtacattagaatgtatgcacacatccatggacactcaggatatagttggcctaataatcggggcatgggtaaaacttatgaaaatttcctcatgctgaattgtaattttctcttacctgtaaagtaaaatttagatcaattccatgtccgtatcgatacaggttaaggagaagcttctaattttccaaacattttgatacaacatttttttcaacgactgtattttatagaccttttgtgagaagattagtatagttctatgaaacctaacattcaagtgatcttagtgccggtcaggctaccttgttaaaatgagttagaatccacataattccacgtattgcctctcaagttcaatttagatacccttatattcaaatatataatcctgtactgtaccggctcgatc

SEQ ID NO: 431369 - DNA, 5526 bp, Homo sapiens
cgcggagcgccctgccccggcagggggatgtggcgatgggtgagggtcatggggtgtgagcatccctgagccatcgatccgggagggccgcgggttcccttgctttgccgccgggagcggcgcacgcagccccgcactcgcctacccggccccgggcggcggcgcggcccatgcggctgggggcggaggctgggagcgggtggcgggcgcggcggcccgggcccgggcggtgattggccgcctgctggccgcgactgaggcccgggaggcgggcggggagcgcaggcggagctcgctgccgccgagctgagaagatgctgctgtccctggtgctccacacgtactccatgcgctacctgctgcccagcgtcgtgctcctgggcacggcgcccacctacgtgttggcctggggggtctggcggctgctctccgccttcctgcccgcccgcttctaccaagcgctggacgaccggctctactgcgtctaccagagcatggtgctcttcttcttcgagaattacaccggggtccagatattgctatatggagatttgccaaaaaataaagaaaatataatatatttagcaaatcatcaaagcacagttgactggattgttgctgacatcttggccatcaggcagaatgcgctaggacatgtgcgctacgtgctgaaagaagggttaaaatggctgccattgtatgggtgttactttgctcagcatggaggaatctatgtaaagcgcagtgccaaatttaacgagaaagagatgcgaaacaagttgcagagctacgtggacgcaggaactccaatgtatcttgtgatttttccagaaggtacaaggtataatccagagcaaacaaaagtcctttcagctagtcaggcatttgctgcccaacgtggccttgcagtattaaaacatgtgctaacaccacgaataaaggcaactcacgttgcttttgattgcatgaagaattatttagatgcaatttatgatgttacggtggtttatgaagggaaagacgatggagggcagcgaagagagtcaccgaccatgacggaatttctctgcaaagaatgtccaaaaattcatattcacattgatcgtatcgacaaaaaagatgtcccagaagaacaagaacatatgagaagatggctgcatgaacgtttcgaaatcaaagataagatgcttatagaattttatgagtcaccagatccagaaagaagaaaaagatttcctgggaaaagtgttaattccaaattaagtatcaagaagactttaccatcaatgttgatcttaagtggtttgactgcaggcatgcttatgaccgatgctggaaggaagctgtatgtgaacacctggatatatggaaccctacttggctgcctgtgggttactattaaagcatagacaagtagctgtctccagacagtgggatgtgctacattgtctatttttggcggctgcacatgacatcaaattgtttcctgaatttattaaggagtgtaaataaagccttgttgattgaagattggataatagaatttgtgacgaaagctgatatgcaatggtcttgggcaaacatacctggttgtacaactttagcatcggggctgctggaagggtaaaagctaaatggagtttctcctgctctgtccatttcctatgaactaatgacaacttgagaaggctgggaggattgtgtattttgcaagtcagatggctgcatttttgagcattaatttgcagcgtatttcactttttctgttattttcaatttattacaacttgacagctccaagctcttattactaaagtatttagtatcttgcagctagttaatatttcatcttttgcttatttctacaagtcagtgaaataaattgtatttaggaagtgtcaggatgttcaaaggaaagggtaaaaagtgttcatggggaaaaagctctgtttagcacatgattttattgtattgcgttattagctgattttactcattttatatttgcaaaataaatttctaatatttattgaaattgcttaatttgcacaccctgtacacacagaaaatggtataaaatatgagaacgaagtttaaaattgtgactctgattcattatagcagaactttaaatttcccagctttttgaagatttaagctacgctattagtacttccctttgtctgtgccataagtgcttgaaaacgttaaggttttctgttttgttttgtttttttaatatcaaaagagtcggtgtgaaccttggttggaccccaagttcacaagatttttaaggtgatgagagcctgcagacattctgcctagatttactagcgtgtgccttttgcctgcttctctttgatttcacagaatattcattcagaagtcgcgtttctgtagtgtggtggattcccactgggctctggtccttcccttggatcccgtcagtggtgctgctcagcggcttgcacgtagacttgctaggaagaaatgcagagccagcctgtgctgcccactttcagagttgaactctttaagcccttgtgagtgggcttcaccagctactgcagaggcattttgcatttgtctgtgtcaagaagttcaccttctcaagccagtgaaatacagacttaattcgtcatgactgaacgaatttgtttatttcccattaggtttagtggagctacacattaatatgtatcgccttagagcaagagctgtgttccaggaaccagatcacgatttttagccatggaacaatatatcccatgggagaagacctttcagtgtgaactgttctatttttgtgttataatttaaacttcgatttcctcatagtcctttaagttgacatttctgcttactgctactggatttttgctgcagaaatatatcagtggcccacattaaacataccagttggatcatgataagcaaaatgaaagaaataatgattaagggaaaattaagtgactgtgttacactgcttctcccatgccagagaataaactctttcaagcatcatctttgaagagtcgtgtggtgtgaattggtttgtgtacattagaatgtatgcacacatccatggacactcaggatatagttggcctaataatcggggcatgggtaaaacttatgaaaatttcctcatgctgaattgtaattttctcttacctgtaaagtaaaatttagatcaattccatgtctttgttaagtacagggatttaatatattttgaatataatgggtatgttctaaatttgaactttgagaggcaatactgttggaattatgtggattctaactcattttaacaaggtagcctgacctgcataagatcacttgaatgttaggtttcatagaactatactaatcttctcacaaaaggtctataaaatacagtcgttgaaaaaaattttgtatcaaaatgtttggaaaattagaagcttctccttaacctgtattgatactgacttgaattattttctaaaattaagagccgtatacctacctgtaagtcttttcacatatcatttaaacttttgtttgtattattactgatttacagcttagttattaatttttctttataagaatgccgtcgatgtgcatgcttttatgtttttcagaaaagggtgtgtttggatgaaagtaaaaaaaaaaataaaatctttcactgtctctaatggctgtgctgtttaacattttttgaccctaaaattcaccaacagtctcccagtacataaaataggcttaatgactggccctgcattcttcacaatatttttccctaagctttgagcaaagttttaaaaaaatacactaaaataatcaaaactgttaagcagtatattagtttggttatataaattcatctgcaatttataagatgcatggccgatgttaatttgcttggcaattctgtaatcattaagtgatctcagtgaaacatgtcaaatgccttaaattaactaagttggtgaataaaagtgccgatctggctaactcttacaccatacatactgatagtttttcatatgtttcatttccatgtgatttttaaaatttagagtggcaacaattttgcttaatatgggttacataagctttattttttcctttgttcataattatattctttgaataggtctgtgtcaatcaagtgatctaactagactgatcatagatagaaggaaataaggccaagttcaagaccagcctgggcaacatatcgagaacctgtctacaaaaaaattaaaaaaaattagccaggcatggtggcgtacactgagtagtttgtcccagctactcgggagggtgaggtgggaggatcgcttcagcccaggaggttgagattgcagtgagccatggacataccactgcactacagcctaggtaacagcacgagaccccaactcttagaaaatgaaaaggaaatatagaaatataaaatttgcttattatagacacacagtaactcccagatatgtaccacaaaaaatgtgaaaagagagagaaatgtctaccaaagcagtattttgtgtgtataattgcaagcgcatagtaaaataattttaaccttaatttgtttttagtagtgtttagattgaagattgagtgaaatattttcttggcagatattccgtatctggtggaaagctacaatgcaatgtcgttgtagttttgcatggcttgctttataaacaagattttttctccctccttttgggccagttttcattacgagtaactcacactttttgattaaagaacttgaaattacgttatcacttagtataattgacattatatagagactatgtaacatgcaatcattagaatcaaaattagtactttggtcaaaatatttacaacattcacatacttgtcaaatattcatgtaattaactgaatttaaaaccttcaactattatgaagtgctcgtctgtacaatcgctaatttactcagtttagagtagctacaactcttcgatactatcatcaatatttgacatcttttccaatttgtgtatgaaaagtaaatctattcctgtagcaactggggagtcatatatgaggtcaaagacatataccttgttattataatatgtatactataataatagctggttatcctgagcaggggaaaaggttatttttaggaaaaccacttcaaatagaaagctgaagtacttctaatatactgagggaagtataatatgtggaacaaactctcaacaaaatgtttattgatgttgatgaaacagatcagtttttccatccggattattattggttcatgattttatatgtgaatatgtaagatatgttctgcaattttataaatgttcatgtctttttttaaaaaaggtgctattgaaattctgtgtctccagcaggcaagaatacttgactaactctttttgtctctttatggtattttcagaataaagtctgacttgtgtttttgagattattggtgcctcattaattcagcaataaaggaaaatatgcatctcaaaaatt

SEQ ID NO: 431370 - DNA, 3763 bp, Homo sapiens
cgcggagcgccctgccccggcagggggatgtggcgatgggtgagggtcatggggtgtgagcatccctgagccatcgatccgggagggccgcgggttcccttgctttgccgccgggagcggcgcacgcagccccgcactcgcctacccggccccgggcggcggcgcggcccatgcggctgggggcggaggctgggagcgggtggcgggcgcggcggcccgggcccgggcggtgattggccgcctgctggccgcgactgaggcccgggaggcgggcggggagcgcaggcggagctcgctgccgccgagctgagaagatgctgctgtccctggtgctccacacgtactccatgcgctacctgctgcccagcgtcgtgctcctgggcacggcgcccacctacgtgttggcctggggggtctggcggctgctctccgccttcctgcccgcccgcttctaccaagcgctggacgaccggctctactgcgtctaccagagcatggtgctcttcttcttcgagaattacaccggggtccagatattgctatatggagatttgccaaaaaataaagaaaatataatatatttagcaaatcatcaaagcacagttgactggattgttgctgacatcttggccatcaggcagaatgcgctaggacatgtgcgctacgtgctgaaagaagggttaaaatggctgccattgtatgggtgttactttgctcagcatggaggaatctatgtaaagcgcagtgccaaatttaacgagaaagagatgcgaaacaagttgcagagctacgtggacgcaggaactccaatgtatcttgtgatttttccagaaggtacaaggtataatccagagcaaacaaaagtcctttcagctagtcaggcatttgctgcccaacgtggccttgcagtattaaaacatgtgctaacaccacgaataaaggcaactcacgttgcttttgattgcatgaagaattatttagatgcaatttatgatgttacggtggtttatgaagggaaagacgatggagggcagcgaagagagtcaccgaccatgacggaatttctctgcaaagaatgtccaaaaattcatattcacattgatcgtatcgacaaaaaagatgtcccagaagaacaagaacatatgagaagatggctgcatgaacgtttcgaaatcaaagataagatgcttatagaattttatgagtcaccagatccagaaagaagaaaaagatttcctgggaaaagtgttaattccaaattaagtatcaagaagactttaccatcaatgttgatcttaagtggtttgactgcaggcatgcttatgaccgatgctggaaggaagctgtatgtgaacacctggatatatggaaccctacttggctgcctgtgggttactattaaagcatagacaagtagctgtctccagacagtgggatgtgctacattgtctatttttggcggctgcacatgacatcaaattgtttcctgaatttattaaggagtgtaaataaagccttgttgattgaagattggataatagaatttgtgacgaaagctgatatgcaatggtcttgggcaaacatacctggttgtacaactttagcatcggggctgctggaagggtaaaagctaaatggagtttctcctgctctgtccatttcctatgaactaatgacaacttgagaaggctgggaggattgtgtattttgcaagtcagatggctgcatttttgagcattaatttgcagcgtatttcactttttctgttattttcaatttattacaacttgacagctccaagctcttattactaaagtatttagtatcttgcagctagttaatatttcatcttttgcttatttctacaagtcagtgaaataaattgtatttaggaagtgtcaggatgttcaaaggaaagggtaaaaagtgttcatggggaaaaagctctgtttagcacatgattttattgtattgcgttattagctgattttactcattttatatttgcaaaataaatttctaatatttattgaaattgcttaatttgcacaccctgtacacacagaaaatggtataaaatatgagaacgaagtttaaaattgtgactctgattcattatagcagaactttaaatttcccagctttttgaagatttaagctacgctattagtacttccctttgtctgtgccataagtgcttgaaaacgttaaggttttctgttttgttttgtttttttaatatcaaaagagtcggtgtgaaccttggttggaccccaagttcacaagatttttaaggtgatgagagcctgcagacattctgcctagatttactagcgtgtgccttttgcctgcttctctttgatttcacagaatattcattcagaagtcgcgtttctgtagtgtggtggattcccactgggctctggtccttcccttggatcccgtcagtggtgctgctcagcggcttgcacgtagacttgctaggaagaaatgcagagccagcctgtgctgcccactttcagagttgaactctttaagcccttgtgagtgggcttcaccagctactgcagaggcattttgcatttgtctgtgtcaagaagttcaccttctcaagccagtgaaatacagacttaattcgtcatgactgaacgaatttgtttatttcccattaggtttagtggagctacacattaatatgtatcgccttagagcaagagctgtgttccaggaaccagatcacgatttttagccatggaacaatatatcccatgggagaagacctttcagtgtgaactgttctatttttgtgttataatttaaacttcgatttcctcatagtcctttaagttgacatttctgcttactgctactggatttttgctgcagaaatatatcagtggcccacattaaacataccagttggatcatgataagcaaaatgaaagaaataatgattaagggaaaattaagtgactgtgttacactgcttctcccatgccagagaataaactctttcaagcatcatctttgaagagtcgtgtggtgtgaattggtttgtgtacattagaatgtatgcacacatccatggacactcaggatatagttggcctaataatcggggcatgggtaaaacttatgaaaatttcctcatgctgaattgtaattttctcttacctgtaaagtaaaatttagatcaattccatgtctttgttaagtacagggatttaatatattttgaatataatgggtatgttctaaatttgaactttgagaggcaatactgttggaattatgtggattctaactcattttaacaaggtagcctgacctgcataagatcacttgaatgttaggtttcatagaactatactaatcttctcacaaaaggtctataaaatacagtcgttgaaaaaaattttgtatcaaaatgtttggaaaattagaagcttctccttaacctgtattgatactgacttgaattattttctaaaattaagagccgtatacctacctgtaagtcttttcacatatcatttaaacttttgtttgtattattactgatttacagcttagttattaatttttctttataagaatgccgtcgatgtgcatgcttttatgtttttcagaaaagggtgtgtttggatgaaagtaaaaaaaaaaataaaatctttcactgtctcttttaaaaaaaaaaaatatatattttttctatctatttattttatatgatatggctaaatgtattttttgtgggtgtcct

SEQ ID NO: 431371 - DNA, 1570 bp, Homo sapiens
cgcggagcgccctgccccggcagggggatgtggcgatgggtgagggtcatggggtgtgagcatccctgagccatcgatccgggagggccgcgggttcccttgctttgccgccgggagcggcgcacgcagccccgcactcgcctacccggccccgggcggcggcgcggcccatgcggctgggggcggaggctgggagcgggtggcgggcgcggcggcccgggcccgggcggtgattggccgcctgctggccgcgactgaggcccgggaggcgggcggggagcgcaggcggagctcgctgccgccgagctgagaagatgctgctgtccctggtgctccacacgtactccatgcgctacctgctgcccagcgtcgtgctcctgggcacggcgcccacctacgtgttggcctggggggtctggcggctgctctccgccttcctgcccgcccgcttctaccaagcgctggacgaccggctctactgcgtctaccagagcatggtgctcttcttcttcgagaattacaccggggtccagatattgctatatggagatttgccaaaaaataaagaaaatataatatatttagcaaatcatcaaagcacagttgactggattgttgctgacatcttggccatcaggcagaatgcgctaggacatgtgcgctacgtgctgaaagaagggttaaaatggctgccattgtatgggtgttactttgctcagcatggaggaatctatgtaaagcgcagtgccaaatttaacgagaaagagatgcgaaacaagttgcagagctacgtggacgcaggaactccaatgtatcttgtgatttttccagaaggtacaaggtataatccagagcaaacaaaagtcctttcagctagtcaggcatttgctgcccaacgtggccttgcagtattaaaacatgtgctaacaccacgaataaaggcaactcacgttgcttttgattgcatgaagaattatttagatgcaatttatgatgttacggtggtttatgaagggaaagacgatggagggcagcgaagagagtcaccgaccatgacggaatttctctgcaaagaatgtccaaaaattcatattcacattgatcgtatcgacaaaaaagatgtcccagaagaacaagaacatatgagaagatggctgcatgaacgtttcgaaatcaaagataagatgcttatagaattttatgagtcaccagatccagaaagaagaaaaagatttcctgggaaaagtgttaattccaaattaagtatcaagaagactttaccatcaatgttgatcttaagtggtttgactgcaggcatgcttatgaccgatgctggaaggaagctgtatgtgaacacctggatatatggaaccctacttggctgcctgtgggttactattaaagcatagacaagtagctgtctccagacagtgggatgtgctacattgtctatttttggcggctgcacatgacatcaaattgtttcctgaatttattaaggagtgtaaataaagcacgatgcggccgaacctttaattataaaaaatttatttttcccctccacttaccc

SEQ ID NO: 431372 - DNA, 730 bp, Homo sapiens
gggaggctgaggcaggagaattgcttgaacccaggaggcagaggttgctgtgagtcaagatcacaccactcaggtggatcacctgaggtcaggagttcaagaccagcctggctaacatggtgaaaccccgtctctactaaaaatacaaaaattagtcacgtgtggtggtggacgcctgtaatcccagctacttgggaggctgaggcagaagaattgcttgaacccaggaggcagaggttgcagtgagctgagattgagccactgcactccagcctgggcgacagggcgagactccatctcaaagaaaaaaaaaaaagaaaaagaaactgaaaagtctattcctccacctacttttttttctctgtatcaactatgattactctcataaaaacctaagtggtattatattaagcatctggttttatagattgcctttctcagttaaaaatgttggatggccgggcgcggtggctcacgcctgtaatcccagcactttgggaggctgaggtgggcagatcacgaggtcaggagatcgcgaccatcctggctaacacggtgaaaccccgtctctactaaaaaatagaaaaaattagccgggtgtggtggcaggcgcctgtagtcccagctactcgggaggctgaggcaggagaatggtgtaaaacctgggaggtggagcttgcagtgagccaagatcgtgccactgggcgacagagcgagactcggtctcaaa

SEQ ID NO: 431373 - DNA, 713 bp, Homo sapiens
gggaggctgaggcaggagaattgcttgaacccaggaggcagaggttgctgtgagtcaagatcacaccactcaggtggatcacctgaggtcaggagttcaagaccagcctggctaacatggtgaaaccccgtctctactaaaaatacaaaaattagtcacgtgtggtggtggacgcctgtaatcccagctactcaggaggctgacgcaggagaatcgcttgaacctgggaggcagaggttgctgtgagctgagattgtgccattgcactccagcctgggcaacaagaacaaaacttcatctcaaaaaaaaagatcacgctgctgcactccagcctggctgatagaacgaaactccgtctcaaagaaaaacgaaaaagtaatactagtacatgtttactgtagaagtacatataatataaaaacatagaaaaagaaagtggctgggtgcggtggttcacgcctgtaatcccagcagtttgggaggccgaggtgggtggatcatgtgaggccgggagttcgagaccagcctggccaacatggtgatttcccgttggatatctactaaaaataccagaaaattagccgggcttggtggcatgcgtctgtaatcctagctacttgcgaggctgatgcaggagaatcgcttgaacccaagaggcagaggttgcaatgagccgagatcgcgccaccgcactccagcctgggcaatagagt

SEQ ID NO: 431374 - DNA, 2399 bp, Homo sapiens
gagtaactaaaggtactcctgacagagctggagatgaggggcattttggtgggcagtggtcactagggttcacgtcacctacttaatgcaaagaccttagtggtctcagaatgaaaaggtaaaatggaagagaaaagcacagtcctttcctgtcttttcaaatttactttttattaaggatgtacctgtgcactattctaaagctaagcatttaaggataaagtccagaaataaaatgtccatattttcttttcttttctttttttttttttttttctgtcatctgtcacccagactggactgcagtggtgccatcatgtcttactgcagcctcaaactcctgggctcaagtggtcctcctgcttcagcttcccaagtagctgggactacaggcatgtgccaccacccccagccaaaacatccatattttctcttagaatggtttacattatgatgggggatggggagctgggggagggctgtacattcccaaaagaaagtagtgttataggaaatccaaatgcgcttcagtgattcactcctgaaaagcagcctgggtatgttggcagattttgtttgcatttgtcttgcgtatttaaagtctcaggaaatctagtcttggtccaaaacactggagaaaaaaataacaccagacaaaacacatttgagtaacttgaagtagcagcatagaataggcccactaagaagttggaggggcaaagagaaagccgacagaatcagcttctcctggaaagtgaaagcatcaagttctatttatggtagacagagggtccttatttgcttgtccgtggtgtctatgtgggcctattgagggaatggtagttacttgaaggttcacatatgtaagcgtgtggacccagcacagtctgtgacctgattccagatcctcaagagtggagaaggaaagaaatatgatgatttcctatgcttgaccctaacccaaccccaaaactgctagggattcaacagtgagtaagatgtatgcaataagagaacagataacttctcaacaatgtgcatgccgtttgtgtagatgttcagaactacatatgtgtgaatatcactcccaccttacacacgcacacacactgcaatcacatggcattaaaaaatatattgtgtatggaacttggcgaggtcagtcaggacctggagctgtaatcatagccttattgccacttcttgcgttgtgtatacattgaatggctcatagattttaagagatttttttattgtaagtatttctactaaatgcacttatccttctatatgtttatatattttggtaaaattgatttatcagatacttggtattttagtaagaaaatttcctcaaatatttggctaatgctttgatgtcaagattgcatattgctgagttggagctcagaagaaatgtatgcagctaaaaattgcactgtgtgttcttgtgaatttgctcacaattctaaaatgacataattggtggctgtgatgcttacagtcactgcctactggctctcttatgatgaatgttgccatcatatgatcatttatttactttttgtgcaagcaatggcattttggttgttgccaaaaacaacacaagtggttgggagtgtatgttgttggaaggtgtacacttctgtttctttcagctgtattatttatacacccaggttttctgttaaggatgtaatcattcattcaagaaagaacaattggcaagaaataattaaattaccttaaaaagaattaagaggcactccagccagataacacctcccaacaacatgaaatttagttagtgcttagtgaaattccttaaatatatatgtatatgttttcttcaacattatttaatataactactgcttttatattttttaatggtgttgcaaccacttgtacacctgctacaccttactgacaaaactgggcagctgaaaataaaagagaataaattctattccactgtaagaagttgatttcttttcagctttctttgtatatcagtaaagaacacgaattgtttgaaaataattttaagtctgataagtatggatagcatgttacctaagcttttaatttgtacattttgatgtctgatcatttgcatggaagagacaatagtgccacgtctgaattgttctcttgtgcttggttaatatgtacttctctagattgttcaaaaagtttcaaatgacattccttactctttggttttcagaggcattcaagcaaaatatcacagtggtcttttgttttctgaccaatctaacaatacctgtgattaaatttaatttgttagtgtaaataaatttcttgccaatgagtattattgttgttagacaacgaatgcaataaaaagaaatactgaggtctgttgaagcaaattt

SEQ ID NO: 431375 - DNA, 1900 bp, Homo sapiens
gagtaactaaaggtactcctgacagagctggagatgaggggcattttggtgggcagtggtcactagggttcacgtcacctacttaatgcaaagaccttagtggtctcagaatgaaaaggtaaaatggaagagaaaagcacagtcctttcctgtcttttcaaatttactttttattaaggatgtacctgtgcactattctaaagctaagcatttaaggataaagtccagaaataaaatgtccatattttcttttcttttctttttttttttttttttctgtcatctgtcacccagactggactgcagtggtgccatcatgtcttactgcagcctcaaactcctgggctcaagtggtcctcctgcttcagcttcccaagtagctgggactacaggcatgtgccaccacccccagccaaaacatccatattttctcttagaatggtttacattatgatgggggatggggagctgggggagggctgtacattcccaaaagaaagtagtgttataggaaatccaaatgcgcttcagtgattcactcctgaaaagcagcctgggtatgttggcagattttgtttgcatttgtcttgcgtatttaaagtctcaggaaatctagtcttggtccaaaacactggagaaaaaaataacaccagacaaaacacatttgagtaacttgaagtagcagcatagaataggcccactaagaagttggaggggcaaagagaaagccgacagaatcagcttctcctggaaagtgaaagcatcaagttctatttatggtagacagagggtccttatttgcttgtccgtggtgtctatgtgggcctattgagggaatggtagttacttgaaggttcacatatgtaagcgtgtggacccagcacagtctgtgacctgattccagatcctcaagagtggagaaggaaagaaatatgatgatttcctatgcttgaccctaacccaaccccaaaactgctagggattcaacagtgagtaagatgtatgcaataagagaacagataacttctcaacaatgtgcatgccgtttgtgtagatgttcagaactacatatgtgtgaatatcactcccaccttacacacgcacacacactgcaatcacatggcattaaaaaatatattgtgtatggaacttggcgaggtcagtcaggacctggagctgtaatcatagccttattgccacttcttgcgttgtgtatacattgaatggctcatagattttaagagatttttttattgtaagtatttctactaaatgcacttatccttctatatgtttatatattttggtaaaattgatttatcagatacttggtattttagtaagaaaatttcctcaaatatttggctaatgctttgatgtcaagattgcatattgctgagttggagctcagaagaaatgtatgcagctaaaaattgcactgtgtgttcttgtgaatttgctcacaattctaaaatgacataattggtggctgtgatgcttacagtcactgcctactggctctcttatgatgaatgttgccatcatatgatcatttatttactttttgtgcaagcaatggcattttggttgttgccaaaaacaacacaagtggttgggagtgtatgttgttggaaggtgtacacttctgtttctttcagctgtattatttatacacccaggttttctgttaaggatgtaatcattcattcaagaaagaacaattggcaagaaataattaaattaccttaaaaagaattaagaggcactccagccagataacacctcccaacaacatgaaatttaatttgttagtgtaaataaatttcttgccaatgagtattattgttgttagacaacgaatgcaataaaaagaaatactgaggtctgttgaagcaaattt

SEQ ID NO: 431376 - DNA, 630 bp, Homo sapiens
gccaggcgactgcaacagtctcctcactcctcccacacagagtctcggcctttcctcccgcgtggacggcgcctctcccccgccatcctttccctggctgatgctgcatctgcaacgctcagcttctccctggaacctgctcccacagcatgtggcccggccctgtgcctgccctgagccctggttgtagagctgacatttgactctggctgccttgagggcagggaccgtggcttaaccagccactctgggcttcactttcctcatttgtcaagtggatctgccccaaagtttgctttgaggaaacgggcctccctctttccatttccagcttttagagctgcttctgccttccttggctcctggctttctcacatcttcagattccaaagcgcatcactccagtctgctcgtgtcaccacaagctttcttcccttctccagtcagtcaaatccgtcttctaaggatactgctgatcatctttagggctcacgcctgtagtcctggcactttgagaggacaaagagggaggatcgcttgagcccaggagttgaagaccagggcaacagagtgagatcccatttccacaaaaaataaaaaagattatccacgcatggtggcatgcacctg

SEQ ID NO: 431377 - DNA, 1805 bp, Homo sapiens
gacagtggagggcagtggagaggaccgcgctgtcctgctgtcaccaagagctggagacaccatctcccaccgagagtcatggccccattggccctgcacctcctcgtcctcgtccccatcctcctcagcctggtggcctcccaggactggaaggctgaacgcagccaagaccccttcgagaaatgcatgcaggatcctgactatgagcagctgctcaaggtggtgacctgggggctcaatcggaccctgaagccccagagggtgattgtggttggcgctggtgtggccgggctggtggccgccaaggtgctcagcgatgctggacacaaggtcaccatcctggaggcagataacaggatcgggggccgcatcttcacctaccgggaccagaacacgggctggattggggagctgggagccatgcgcatgcccagctctcacaggatcctccacaagctctgccagggcctggggctcaacctgaccaagttcacccagtacgacaagaacacgtggacggaggtgcacgaagtgaagctgcgcaactatgtggtggagaaggtgcccgagaagctgggctacgccttgcgtccccaggaaaagggccactcgcccgaagacatctaccagatggctctcaaccaggccctcaaagacctcaaggcactgggctgcagaaaggcgatgaagaagtttgaaaggcacacgctcttggaatatcttctcggggaggggaacctgagccggccggccgtgcagcttctgggagacgtgatgtccgaggatggcttcttctatctcagcttcgccgaggccctccgggcccacagctgcctcagcgacagactccagtacagccgcatcgtgggtggctgggacctgctgccgcgcgcgctgctgagctcgctgtccgggcttgtgctgttgaacgcgcccgtggtggcgatgacccagggaccgcacgatgtgcacgtgcagatcgagacctctcccccggcgcggaatctgaaggtgctgaaggccgacgtggtgctgctgacggcgagcggaccggcggtgaagcgcatcaccttctcgccgccgctgccccgccacatgcaggaggcgctgcggaggctgcactacgtgccggccaccaaggtgttcctaagcttccgcaggcccttctggcgcgaggagcacattgaaggcggccactcaaacaccgatcgcccgtcgcgcatgattttctacccgccgccgcgcgagggcgcgctgctgctggcctcgtacacgtggtcggacgcggcggcagcgttcgccggcttgagccgggaagaggcgttgcgcttggcgctcgacgacgtggcggcattgcacgggcctgtcgtgcgccagctctgggacggcaccggcgtcgtcaagcgttgggcggaggaccagcacagccagggtggctttgtggtacagccgccggcgctctggcaaaccgaaaaggatgactggacggtcccttatggccgcatctactttgccggcgagcacaccgcctacccgcacggctgggtggagacggcggtcaagtcggcgctgcgcgccgccatcaagatcaacagccggaaggggcctgcatcggacacggccagccccgaggggcacgcatctgacatggaggggcaggggcatgtgcatggggtggccagcagcccctcgcatgacctggcaaaggaagaaggcagccaccctccagtccaaggccagttatctctccaaaacacgacccacacgaggacctcgcattaaagtattttcggaaaaaaaagtgt

SEQ ID NO: 431378 - DNA, 531 bp, Homo sapiens
gcagaagggtgcagtggaaggggtgggggtagtgagataggttgcctcttactcaagctggaaggggatttcctgaggacagacaccaagcaatttaaaaactggcctggagagagggaagaggaaacagacctcgtgggtgtttctctgggtcaggcacttggcttctcagtcttgactttgattattcttttgtttttttgagacagggcctccctctttccatttccagcttttagagctgcttctgccttccttggctcctggctttctcacatcttcagattccaaagcgcatcactccagtctgctcgtgtcaccacaagctttcttcccttctccagtcagtcaaatccgtcttctaaggatactgctgatcatctttagggctcacgcctgtagtcctggcactttgagaggacaaagagggaggatcgcttgagcccaggagttgaagaccagggcaacagagtgagatcccatttccacaaaaaataaaaaagattatccacgcatggtggcatgcacctg

SEQ ID NO: 431379 - DNA, 777 bp, Homo sapiens
tccccgctcgcgactccccaccccccagggctccctaaagagggccacgagctgcgaaagggcgggaaaggcagttggagaagagaaacccaccttgtcccatccacatcaggacatcccagctggagttcaaccttcatcccttctgtggcagttaggagactgaatcaaggtccagagaaggtggaggaatcctgatactgagcggaagaaaatacacagatgtgcttccttcccagtcctgacaaatggcctttccttaagttcctcattaattcatatgaagacaacacatttggtgactaaatttggaatcagaggcttttaaagcctcccagctgctctgaccccaatatcaggaacttggcatctctgatctaacaagggcaccactaacaaggacaaagccaccatcattcaccttgattccgcacatgcccaacgatgacttctgtcctgggctaaccataaaggccatgggtgctgagagagccccccagaggcagccatgcaccctgcacctcctcgtcctcgtccccatcctcctcagcctggtggcctcccaggactggaaggctgaacgcagccaagaccccttcgagaaatgcatgcaggatcctgactatgagcagctgctcaaggtggtgacctgggggctcaatcggaccctgaagccccagagggtgattgtggttggcgctggtgtggccgggctggtggccgccaaggtgctcagcgatgctggacacaaggtgggaagcactgcttgcagtctac

SEQ ID NO: 431380 - DNA, 2318 bp, Homo sapiens
tccccgctcgcgactccccaccccccagggctccctaaagagggccacgagctgcgaaagggcgggaaaggcagttggagaagaggtaagcggttactcactccatggctgcagcaaggagaggcggcggcggcctcggctgaagaaagaaggtgggagcggagagcgcaggcgtgaaacccaccttgtcccatccacatcaggacatcccagctggagttcaaccttcatcccttctgtggcagttaggagactgaatcaaggtccagagaaggtggaggaatcctgatactgagcggaagaaaatacacagatgtgcttccttcccagtcctgacaaatggcctttccttaagttcctcattaattcatatgaagacaacacatttggtgactaaatttggaatcagaggcttttaaagcctcccagctgctctgaccccaatatcaggaacttggcatctctgatctaacaagggcaccactaacaaggacaaagccaccatcattcaccttgattccgcacatgcccaacgatgacttctgtcctgggctaaccataaaggccatgggtgctgagagagccccccagaggcagccatgcaccctgcacctcctcgtcctcgtccccatcctcctcagcctggtggcctcccaggactggaaggctgaacgcagccaagaccccttcgagaaatgcatgcaggatcctgactatgagcagctgctcaaggtggtgacctgggggctcaatcggaccctgaagccccagagggtgattgtggttggcgctggtgtggccgggctggtggccgccaaggtgctcagcgatgctggacacaaggtcaccatcctggaggcagataacaggatcgggggccgcatcttcacctaccgggaccagaacacgggctggattggggagctgggagccatgcgcatgcccagctctcacaggatcctccacaagctctgccagggcctggggctcaacctgaccaagttcacccagtacgacaagaacacgtggacggaggtgcacgaagtgaagctgcgcaactatgtggtggagaaggtgcccgagaagctgggctacgccttgcgtccccaggaaaagggccactcgcccgaagacatctaccagatggctctcaaccaggccctcaaagacctcaaggcactgggctgcagaaaggcgatgaagaagtttgaaaggcacacgctcttggaatatcttctcggggaggggaacctgagccggccggccgtgcagcttctgggagacgtgatgtccgaggatggcttcttctatctcagcttcgccgaggccctccgggcccacagctgcctcagcgacagactccagtacagccgcatcgtgggtggctgggacctgctgccgcgcgcgctgctgagctcgctgtccgggcttgtgctgttgaacgcgcccgtggtggcgatgacccagggaccgcacgatgtgcacgtgcagatcgagacctctcccccggcgcggaatctgaaggtgctgaaggccgacgtggtgctgctgacggcgagcggaccggcggtgaagcgcatcaccttctcgccgccgctgccccgccacatgcaggaggcgctgcggaggctgcactacgtgccggccaccaaggtgttcctaagcttccgcaggcccttctggcgcgaggagcacattgaaggcggccactcaaacaccgatcgcccgtcgcgcatgattttctacccgccgccgcgcgagggcgcgctgctgctggcctcgtacacgtggtcggacgcggcggcagcgttcgccggcttgagccgggaagaggcgttgcgcttggcgctcgacgacgtggcggcattgcacgggcctgtcgtgcgccagctctgggacggcaccggcgtcgtcaagcgttgggcggaggaccagcacagccagggtggctttgtggtacagccgccggcgctctggcaaaccgaaaaggatgactggacggtcccttatggccgcatctactttgccggcgagcacaccgcctacccgcacggctgggtggagacggcggtcaagtcggcgctgcgcgccgccatcaagatcaacagccggaaggggcctgcatcggacacggccagccccgaggggcacgcatctgacatggaggggcaggggcatgtgcatggggtggccagcagcccctcgcatgacctggcaaaggaagaaggcagccaccctccagtccaaggccagttatctctccaaaacacgacccacacgaggacctcgcattaaagtattttcggaaaaaaaagtgt

SEQ ID NO: 431381 - DNA, 2353 bp, Homo sapiens
tccccgctcgcgactccccaccccccagggctccctaaagagggccacgagctgcgaaagggcgggaaaggcagttggagaagaggtaagcggttactcactccatggctgcagcaaggagaggcggcggcggcctcggctgaagaaagaaggtgggagcggagagcgcaggcgtgaaacccaccttgtcccatccacatcaggacatcccagctggagttcaaccttcatcccttctgtggcagttaggagactgaatcaaggtccagagaaggtggaggaatcctgatactgagcggaagaaaatacacagatgtgcttccttcccagtcctgacaaatggcctttccttaagttcctcattaattcatatgaagacaacacatttggtgactaaatttggaatcagaggcttttaaagcctcccagctgctctgaccccaatatcaggaacttggcatctctgatctaacaagggcaccactaacaaggacaaagccaccatcattcaccttgattccgcacatgcccaacgatgacttctgtcctgggctaaccataaaggccatgggtgctgagagagccccccagaggcagccatgcaacaccatctcccaccgagagtcatggccccattggccctgcacctcctcgtcctcgtccccatcctcctcagcctggtggcctcccaggactggaaggctgaacgcagccaagaccccttcgagaaatgcatgcaggatcctgactatgagcagctgctcaaggtggtgacctgggggctcaatcggaccctgaagccccagagggtgattgtggttggcgctggtgtggccgggctggtggccgccaaggtgctcagcgatgctggacacaaggtcaccatcctggaggcagataacaggatcgggggccgcatcttcacctaccgggaccagaacacgggctggattggggagctgggagccatgcgcatgcccagctctcacaggatcctccacaagctctgccagggcctggggctcaacctgaccaagttcacccagtacgacaagaacacgtggacggaggtgcacgaagtgaagctgcgcaactatgtggtggagaaggtgcccgagaagctgggctacgccttgcgtccccaggaaaagggccactcgcccgaagacatctaccagatggctctcaaccaggccctcaaagacctcaaggcactgggctgcagaaaggcgatgaagaagtttgaaaggcacacgctcttggaatatcttctcggggaggggaacctgagccggccggccgtgcagcttctgggagacgtgatgtccgaggatggcttcttctatctcagcttcgccgaggccctccgggcccacagctgcctcagcgacagactccagtacagccgcatcgtgggtggctgggacctgctgccgcgcgcgctgctgagctcgctgtccgggcttgtgctgttgaacgcgcccgtggtggcgatgacccagggaccgcacgatgtgcacgtgcagatcgagacctctcccccggcgcggaatctgaaggtgctgaaggccgacgtggtgctgctgacggcgagcggaccggcggtgaagcgcatcaccttctcgccgccgctgccccgccacatgcaggaggcgctgcggaggctgcactacgtgccggccaccaaggtgttcctaagcttccgcaggcccttctggcgcgaggagcacattgaaggcggccactcaaacaccgatcgcccgtcgcgcatgattttctacccgccgccgcgcgagggcgcgctgctgctggcctcgtacacgtggtcggacgcggcggcagcgttcgccggcttgagccgggaagaggcgttgcgcttggcgctcgacgacgtggcggcattgcacgggcctgtcgtgcgccagctctgggacggcaccggcgtcgtcaagcgttgggcggaggaccagcacagccagggtggctttgtggtacagccgccggcgctctggcaaaccgaaaaggatgactggacggtcccttatggccgcatctactttgccggcgagcacaccgcctacccgcacggctgggtggagacggcggtcaagtcggcgctgcgcgccgccatcaagatcaacagccggaaggggcctgcatcggacacggccagccccgaggggcacgcatctgacatggaggggcaggggcatgtgcatggggtggccagcagcccctcgcatgacctggcaaaggaagaaggcagccaccctccagtccaaggccagttatctctccaaaacacgacccacacgaggacctcgcattaaagtattttcggaaaaaaaagtgt

SEQ ID NO: 431382 - DNA, 620 bp, Homo sapiens
tccccgctcgcgactccccaccccccagggctccctaaagagggccacgagctgcgaaagggcgggaaaggcagttggagaagaggtaagcggttactcactccatggctgcagcaaggagaggcggcggcggcctcggctgaagaaagaaggtgggagcggagagcgcaggcgtgaaacccaccttgtcccatccacatcaggacatcccagctggagttcaaccttcatcccttctgtggcagttaggagactgaatcaaggtccagagaaggtggaggaatcctgatactgagcgggcctccctctttccatttccagcttttagagctgcttctgccttccttggctcctggctttctcacatcttcagattccaaagcgcatcactccagtctgctcgtgtcaccacaagctttcttcccttctccagtcagtcaaatccgtcttctaaggatactgctgatcatctttagggctcacgcctgtagtcctggcactttgagaggacaaagagggaggatcgcttgagcccaggagttgaagaccagggcaacagagtgagatcccatttccacaaaaaataaaaaagattatccacgcatggtggcatgcacctg

SEQ ID NO: 431383 - DNA, 517 bp, Homo sapiens
cgggtgatggctccatcgtaatttcagtttccctttccaggaagaaaatacacagatgtgcttccttcccagtcctgacaaatggcctttccttaagttcctcattaattcatatgaagacaacacatttggtgactaaatttggaatcagaggcttttaaaggtgaatctcagctcttactgctttgctttcccctgtttagggataagagtggcaaatgggggctgggtgtggtggctcatgcctgtaatcccgacattttggggaggccaaggggagtagattacttggggtctggagtttgagaccagcctgggcaacatggcgaaacctcgtctctacaaaaatacaaaaattagcctggcgtagtggctcctgcctgtagtttcagatacttggaggctgaggtgggaggatcacatgaacctgggaggcagacattgcagtgagccgagatcgtaccactgcactccagcctgggtaacaaaagtgagaccctgtctcaaaaaaaaaaaa

SEQ ID NO: 431384 - DNA, 1022 bp, Homo sapiens
aggtgcctgtgatcccagctacttgggaggtggagcttgcagtgagccaagatctcgccagtgtatgccagcctgggcaacagtgtgagacttggtctcaaaacaaacaaacaaacaaaaaaacctaagtcccttcgctgtcaaatccttaggggagtaaattctgtcatctctgggtacctgttttcctgacttttcaaggtgttgaaaagagccttatgattcagccaaactttccaacagctctgatgggcagtttatcctcactcccactctacccagctctgttcctttcttctcttccactgtgtctgaatttgacagggtcccagtctcagtggtactgttcaaagtgtttataatgttactcttctgggcaatttttgcttcatacgtctccatccaatcaatgcatttcaggtgttgtggcagagagatttttgggggtgctggtacaagcaagacaggaataacccttaagtcacaataaaggcctctgcagggagtttttacattcacttcattttagacatcctcatttccctttcctacatcatgtaatttgtgtgattttttttttttagatggctattcatatgaaaaggaagcaatggaaaattggatcagcaaaaagaaacgtacaagtcccatgacaaatcttgttcttccttcagcggtacttacaccaaataggactctgaaaatggccatcaatagatggctggagacacaccaaaagtaaaattgttgatattgtattatttatattttcagtgatctcatttgaatgatttataggtaaatactaatcagacattattaaaagcaaaacaggaaaaaggtaaacttcttaaatttagttacctataaaaattgtcaattttcattctttaaaaacacatggacttactataaaagcctttttgtactagtgaaaagaatcttcagctatatagaaataaagttatactttaaattgcagtgtcctaagttttttaaattcctcttactatcattcccaa

SEQ ID NO: 431385 - DNA, 976 bp, Homo sapiens
aggtgcctgtgatcccagctacttgggaggtggagcttgcagtgagccaagatctcgccagtgtatgccagcctgggcaacagtgtgagacttggtctcaaaacaaacaaacaaacaaaaaaacctaagtcccttcgctgtcaaatccttaggggagtaaattctgtcatctctgggtacctgttttcctgacttttcaaggtgttgaaaagagccttatgattcagccaaactttccaacagctctgatgggcagtttatcctcactcccactctacccagctctgttcctttcttctcttccactgtgtctgaatttgacagggtcccagtctcagtggtactgttcaaagtgtttataatgttactcttctgggcaatttttgcttcatacgtctccatccaatcaatgcatttcaggtgttgtggcagagagatttttgggggtgctggtacaagcaagacaggaataacccttaagtcacaataaaggcctctgcagggagtttttacattcacttcattttagacatcctcatttccctttcctacatcatgtaatttgtgtgattttttttttttagatggctattcatatgaaaaggaagcaatggaaaattggatcagcaaaaagaaacgtacaagtcccatgacaaatcttgttcttccttcagcggtacttacaccaaataggactctgaaaatggccatcaatagatggctggagacacaccaaaagtaaaattgttgatattgtattatttatattttcagtgatctcatttgaatgatttataggtaaatactaatcagacattattaaaagcaaaacaggaaaaaggtaaacttcttaaatttagttacctataaaaattgtcaattttcattctttaaaaacacatggacttactataaaagcctttttgtactagtgaaaagaatcttcagctatatagaaataaagttatactttaaa

SEQ ID NO: 431386 - DNA, 1822 bp, Homo sapiens
tcgggggcggggctgttccctctgctctgggtctccgccggcgcccgccccgccagcctcacctgcgcggcacgtgacccgcaccgcccgtgggcaccttgaaggcggatcccgcgcgcccccgctcctgcaggctgtttttcttcaaataaagaacatggtgaaactgattcacacattagctgatcatggtgacgatgtcaactgctgtgccttctccttttccctcttggctacttgctccttggacaaaacaattcgcctgtactcgttacgtgactttactgaactgccacattctccattgaagtttcatacctatgctgtccactgctgctgtttctccccttcaggacatattttggcatcgtgttcaacagatggtaccactgtcctatggaatactgaaaatggacagatgctggcagtgatggaacagcctagtggcagccctgtgagggtttgccagttttccccagactccacgtgtttggcatcaggggcagctgatggaactgtggttttgtggaatgcacagtcatacaaattatatagatgtggtagtgttaaagatggctccttggcggcatgtgcattttctcctaatggaagcttctttgtcactggctcctcatgtggtgatttaacagtgtgggatgataaaatgaggtgtctgcatagtgaaaaagcacatgatcttggaattacctgctgcgatttttcttcacagccagtttctgatggagaacaaggtcttcagttttttcgactggcatcatgtggtcaggattgccaagtcaaaatttggattgtttcttttacccatatcttaggttttgaattaaaatataaaagtacactgagtgggcactgtgctcctgttctggcttgtgctttttcccatgatgggcagatgctagtctcagggtcagtggataagtctgtcatagtatatgatactaatactgagaatatacttcacacattgactcagcacaccaggtatgtcacaacttgtgcttttgcacctaatacccttttacttgctactggttcaatggacaaaacagtgaacatctggcaatttgacctggaaacactttgccaagcaaggagcacagaacatcagctgaagcaatttaccgaagattggtcagaggaggatgtctcaacatggctttgtgcacaagatttaaaagatcttgttggtattttcaagatgaataacattgatggaaaagaactgttgaatcttacaaaagaaagtctggctgatgatttgaaaattgaatctctaggactgcgtagtaaagtgctgaggaaaattgaagagctcaggaccaaggttaaatccctttcttcaggaattcctgatgaatttatatgtccaataactagagaacttatgaaagatccggtcatcgcatcagatggctattcatatgaaaaggaagcaatggaaaattggatcagcaaaaagaaacgtacaagtcccatgacaaatcttgttcttccttcagcggtacttacaccaaataggactctgaaaatggccatcaatagatggctggagacacaccaaaagtaaaattgttgatattgtattatttatattttcagtgatctcatttgaatgatttataggtaaatactaatcagacattattaaaagcaaaacaggaaaaaggtaaacttcttaaatttagttacctataaaaattgtcaattttcattctttaaaaacacatggacttactataaaagcctttttgtactagtgaaaagaatcttcagctatatagaaataaagttatactttaaa

SEQ ID NO: 431387 - DNA, 1593 bp, Homo sapiens
ggccgcgcccacgggccggctcagcggcggtggcggcaggtggggaagcgcgtctgagccctccatttcccggttctaaccgcgcagcagggcccaaccgggaccttgagtgcggcgaggcgtggacatattttggcatcgtgttcaacagatggtaccactgtcctatggaatactgaaaatggacagatgctggcagtgatggaacagcctagtggcagccctgtgagggtttgccagttttccccagactccacgtgtttggcatcaggggcagctgatggaactgtggttttgtggaatgcacagtcatacaaattatatagatgtggtagtgttaaagatggctccttggcggcatgtgcattttctcctaatggaagcttctttgtcactggctcctcatgtggtgatttaacagtgtgggatgataaaatgaggtgtctgcatagtgaaaaagcacatgatcttggaattacctgctgcgatttttcttcacagccagtttctgatggagaacaaggtcttcagttttttcgactggcatcatgtggtcaggattgccaagtcaaaatttggattgtttcttttacccatatcttaggttttgaattaaaatataaaagtacactgagtgggcactgtgctcctgttctggcttgtgctttttcccatgatgggcagatgctagtctcagggtcagtggataagtctgtcatagtatatgatactaatactgagaatatacttcacacattgactcagcacaccaggtatgtcacaacttgtgcttttgcacctaatacccttttacttgctactggttcaatggacaaaacagtgaacatctggcaatttgacctggaaacactttgccaagcaaggagcacagaacatcagctgaagcaatttaccgaagattggtcagaggaggatgtctcaacatggctttgtgcacaagatttaaaagatcttgttggtattttcaagatgaataacattgatggaaaagaactgttgaatcttacaaaagaaagtctggctgatgatttgaaaattgaatctctaggactgcgtagtaaagtgctgaggaaaattgaagagctcaggaccaaggttaaatccctttcttcaggaattcctgatgaatttatatgtccaataactagagaacttatgaaagatccggtcatcgcatcagatggctattcatatgaaaaggaagcaatggaaaattggatcagcaaaaagaaacgtacaagtcccatgacaaatcttgttcttccttcagcggtacttacaccaaataggactctgaaaatggccatcaatagatggctggagacacaccaaaagtaaaattgttgatattgtattatttatattttcagtgatctcatttgaatgatttataggtaaatactaatcagacattattaaaagcaaaacaggaaaaaggtaaacttcttaaatttagttacctataaaaattgtcaattttcattctttaaaaacacatggacttactataaaagcctttttgtactagtgaaaagaatcttcagctatatagaaataaagttatactttaaa

SEQ ID NO: 431388 - DNA, 2138 bp, Homo sapiens
tcgggggcggggctgttccctctgctctgggtctccgccggcgcccgccccgccagcctcacctgcgcggcacgtgacccgcaccgcccgtgggcaccttgaaggcggatcccgcgcgcccccgctcctgcaggctgtttttcttcaaataaagaacatggtgaaactgattcacacattagctgatcatggtgacgatgtcaactgctgtgccttctccttttccctcttggctacttgctccttggacaaaacaattcgcctgtactcgttacgtgactttactgaactgccacattctccattgaagtttcatacctatgctgtccactgctgctgtttctccccttcaggacatattttggcatcgtgttcaacagatggtaccactgtcctatggaatactgaaaatggacagatgctggcagtgatggaacagcctagtggcagccctgtgagggtttgccagttttccccagactccacgtgtttggcatcaggggcagctgatggaactgtggttttgtggaatgcacagtcatacaaattatatagatgtggtagtgttaaagatggctccttggcggcatgtgcattttctcctaatggaagcttctttgtcactggctcctcatgtggtgatttaacagtgtgggatgataaaatgaggtgtctgcatagtgaaaaagcacatgatcttggaattacctgctgcgatttttcttcacagccagtttctgatggagaacaaggtcttcagttttttcgactggcatcatgtggtcaggattgccaagtcaaaatttggattgtttcttttacccatatcttaggttttgaattaaaatataaaagtacactgagtgggcactgtgctcctgttctggcttgtgctttttcccatgatgggcagatgctagtctcagggtcagtggataagtctgtcatagtatatgatactaatactgagaatatacttcacacattgactcagcacaccaggtatgtcacaacttgtgcttttgcacctaatacccttttacttgctactggttcaatggacaaaacagtgaacatctggcaatttgacctggaaacactttgccaagcaaggagcacagaacatcagctgaagcaatttaccgaagattggtcagaggaggatgtctcaacatggctttgtgcacaagatttaaaagatcttgttggtattttcaagatgaataacattgatggaaaagaactgttgaatcttacaaaagaaagtctggctgatgatttgaaaattgaatctctaggactgcgtagtaaagtgctgaggaaaattgaagagctcaggaccaaggttaaatccctttcttcaggaattcctgatgaatttatatgtccaataactagagaacttatgaaagatccggtcatcgcatcagatggctattcatatgaaaaggaagcaatggaaaattggatcagcaaaaagaaacgtacaagtcccatgacaaatcttgttcttccttcagcggtacttacaccaaataggactctgaaaatggccatcaatagatggctggagacacaccaaaagtaaaattgttgatattgtattatttatattttcagtgatctcatttgaatgatttataggtaaatactaatcagacattattaaaagcaaaacaggaaaaaggtaaacttcttaaatttagttacctataaaaattgtcaattttcattctttaaaaacacatggacttactataaaagcctttttgtactagtgaaaagaatcttcagctatatagaaataaagttatactttaaaaaaaaaaaaaaaaaaaaaaaaaaaaaaaaaaaaaaggggggggggggaaaaagtacccccgggggggccaaagtttacgctgacacccgggtttctcttggcaccaagggggcgcccaataaagggagggcggaataaataaggaaagagagagagggcgggagggtaaacacaaccggcgcggagcggggaacacctcggcgcgtcgggacctggggaagggaccctactccggcgggggcgcaatatttcggagcacacccacaggagataacggccaagggaaacaataactatcccgcgtgcggggaccccc

SEQ ID NO: 431389 - DNA, 1681 bp, Homo sapiens
tcgggggcggggctgttccctctgctctgggtctccgccggcgcccgccccgccagcctcacctgcgcggcacgtgacccgcaccgcccgtgggcaccttgaaggcggatcccgcgcgcccccgctcctgcaggctgtttttcttcaaataaagaacatggtgaaactgattcacacattagctgatcatggtgacgatgtcaactgctgtgccttctccttttccctcttggctacttgctccttggacaaaacaattcgcctgtactcgttacgtgactttactgaactgccacattctccattgaagtttcatacctatgctgtccactgctgctgtttctccccttcaggacatattttggcatcgtgttcaacagatggtaccactgtcctatggaatactgaaaatggacagatgctggcagtgatggaacagcctagtggcagccctgtgagggtttgccagttttccccagactccacgtgtttggcatcaggggcagctgatggaactgtggttttgtggaatgcacagtcatacaaattatatagatgtggtagtgttaaagatggctccttggcggcatgtgcattttctcctaatggaagcttctttgtcactggctcctcatgtggtgatttaacagtgtgggatgataaaatgaggtgtctgcatagtgaaaaagcacatgatcttggaattacctgctgcgatttttcttcacagccagtttctgatggagaacaaggtcttcagttttttcgactggcatcatgtggtcaggattgccaagtcaaaatttggattgtttcttttacccatatcttaggttttgaattaaaatataaaagtacactgagtgggcactgtgctcctgttctggcttgtgctttttcccatgatgggcagatgctagtctcagggtcagtggataagtctgtcatagtatatgatactaatactgagaatatacttcacacattgactcagcacaccaggtatgtcacaacttgtgcttttgcacctaatacccttttacttgctactggttcaatggacaaaacagtgaacatctggcaatttgacctggaaacactttgccaagcaaggagcacagaacatcagctgaagcaatttaccgaagattggtcagaggaggatgtctcaacatggctttgtgcacaagatttaaaagatcttgttggtattttcaagatgaataacattgatggaaaagaactgttgaatcttacaaaagaaagtctggctgatgatttgaaaattgatggctattcatatgaaaaggaagcaatggaaaattggatcagcaaaaagaaacgtacaagtcccatgacaaatcttgttcttccttcagcggtacttacaccaaataggactctgaaaatggccatcaatagatggctggagacacaccaaaagtaaaattgttgatattgtattatttatattttcagtgatctcatttgaatgatttataggtaaatactaatcagacattattaaaagcaaaacaggaaaaaggtaaacttcttaaatttagttacctataaaaattgtcaattttcattctttaaaaacacatggacttactataaaagcctttttgtactagtgaaaagaatcttcagctatatagaaataaagttatactttaaa

SEQ ID NO: 431390 - DNA, 443 bp, Homo sapiens
  misc_feature (54)..(54): n is a, c, g, or t
tataaagaagagtggcgtttgtacaatccaaggaaagacaagccacgcgctgantaggcacgtcatatgaaagttgagtggaaaattggatcagcaaaaagaaacgtacaagtcccatgacaaatcttgttcttccttcagcggtacttacaccaaataggactctgaaaatggccatcaatagatggctggagacacaccaaaagtaaaattgttgatattgtattatttatattttcagtgatctcatttgaatgatttataggtaaatactaatcagacattattaaaagcaaaacaggaaaaaggtaaacttcttaaatttagttacctataaaaattgtcaattttcattctttaaaaacacatggacttactataaaagcctttttgtactagtgaaaagaatcttcagctatatagaaataaagttatactttaaa

SEQ ID NO: 431391 - DNA, 437 bp, Homo sapiens
aagagtagtagacccgtaattgtgccctcacaaaccaagcggacctgagtaggcacttctctgcaaattgagtggaaaattggatcagcaaaaagaaacgtacaagtcccatgacaaatcttgttcttccttcagcggtacttacaccaaataggactctgaaaatggccatcaatagatggctggagacacaccaaaagtaaaattgttgatattgtattatttatattttcagtgatctcatttgaatgatttataggtaaatactaatcagacattattaaaagcaaaacaggaaaaaggtaaacttcttaaatttagttacctataaaaattgtcaattttcattctttaaaaacacatggacttactataaaagcctttttgtactagtgaaaagaatcttcagctatatagaaataaagttatactttaaa

SEQ ID NO: 431392 - DNA, 1729 bp, Homo sapiens
tcgggggcggggctgttccctctgctctgggtctccgccggcgcccgccccgccagcctcacctgcgcggcacgtgacccgcaccgcccgtgggcaccttgaaggcggatcccgcgcgcccccgctcctgcaggctgtttttcttcaaataaagaacatggtgaaactgattcacacattagctgatcatggtgacgatgtcaactgctgtgccttctccttttccctcttggctacttgctccttggacaaaacaattcgcctgtactcgttacgtgactttactgaactgccacattctccattgaagtttcatacctatgctgtccactgctgctgtttctccccttcaggacatattttggcatcgtgttcaacagatggtaccactgtcctatggaatactgaaaatggacagatgctggcagtgatggaacagcctagtggcagccctgtgagggtttgccagttttccccagactccacgtgtttggcatcaggggcagctgatggaactgtggttttgtggaatgcacagtcatacaaattatatagatgtggtagtgttaaagatggctccttggcggcatgtgcattttctcctaatggaagcttctttgtcactggctcctcatgtggtgatttaacagtgtgggatgataaaatgaggtgtctgcatagtgaaaaagcacatgatcttggaattacctgctgcgatttttcttcacagccagtttctggttttgaattaaaatataaaagtacactgagtgggcactgtgctcctgttctggcttgtgctttttcccatgatgggcagatgctagtctcagggtcagtggataagtctgtcatagtatatgatactaatactgagaatatacttcacacattgactcagcacaccaggtatgtcacaacttgtgcttttgcacctaatacccttttacttgctactggttcaatggacaaaacagtgaacatctggcaatttgacctggaaacactttgccaagcaaggagcacagaacatcagctgaagcaatttaccgaagattggtcagaggaggatgtctcaacatggctttgtgcacaagatttaaaagatcttgttggtattttcaagatgaataacattgatggaaaagaactgttgaatcttacaaaagaaagtctggctgatgatttgaaaattgaatctctaggactgcgtagtaaagtgctgaggaaaattgaagagctcaggaccaaggttaaatccctttcttcaggaattcctgatgaatttatatgtccaataactagagaacttatgaaagatccggtcatcgcatcagatggctattcatatgaaaaggaagcaatggaaaattggatcagcaaaaagaaacgtacaagtcccatgacaaatcttgttcttccttcagcggtacttacaccaaataggactctgaaaatggccatcaatagatggctggagacacaccaaaagtaaaattgttgatattgtattatttatattttcagtgatctcatttgaatgatttataggtaaatactaatcagacattattaaaagcaaaacaggaaaaaggtaaacttcttaaatttagttacctataaaaattgtcaattttcattctttaaaaacacatggacttactataaaagcctttttgtactagtgaaaagaatcttcagctatatagaaataaagttatactttaaa

SEQ ID NO: 431393 - DNA, 1868 bp, Homo sapiens
tcgggggcggggctgttccctctgctctgggtctccgccggcgcccgccccgccagcctcacctgcgcggcacgtgacccgcaccgcccgtgggcaccttgaaggcggatcccgcgcgcccccgctcctgcaggctgtttttcttcaaataaagaacatggtgaaactgattcacacattagctgatcatggtgacgatgtcaactgctgtgccttctccttttccctcttggctacttgctccttggacaaaacaattcgcctgtactcgttacgtgactttactgaactgccacattctccattgaagtttcatacctatgctgtccactgctgctgtttctccccttcaggacatattttggcatcgtgttcaacagatggtaccactgtcctatggaatactgaaaatggacagatgctggcagtgatggaacagcctagtggcagccctgtgagggtttgccagttttccccagactccacgtgtttggcatcaggggcagctgatggaactgtggttttgtggaatgcacagtcatacaaattatatagatgtggtagtgttaaagatggctccttggcggcatgtgcattttctcctaatggaagcttctttgtcactggctcctcatgtggtgatttaacagtgtgggatgataaaatgaggtgtctgcatagtgaaaaagcacatgatcttggaattacctgctgcgatttttcttcacagccagtttctgatggagaacaaggtcttcagttttttcgactggcatcatgtggtcaggattgccaagtcaaaatttggattgtttcttttacccatatcttaggttttgaattaaaatataaaagtacactgagtgggcactgtgctcctgttctggcttgtgctttttcccatgatgggcagatgctagtctcagggtcagtggataagtctgtcatagtatatgatactaatactgagaatatacttcacacattgactcagcacaccaggtatgtcacaacttgtgcttttgcacctaatacccttttacttgctactggttcaatggacaaaacagtgaacatctggcaatttgacctggaaacactttgccaagcaaggagcacagaacatcagctgaagcaatttaccgaagattggtcagaggaggatgtctcaacatggctttgtgcacaagatttaaaagatcttgttggtattttcaagatgaataacattgatggaaaagaactgttgaatcttacaaaagaaagtctggctgatgatttgaaaattgaatctctaggactgcgtagtaaagtgctgaggaaaattgaagagctcaggaccaaggttaaatccctttcttcaggaattcctgatgaatttatatgtccaataactagagaacttatgaaagatccggtcatcgcatcagatggctattcatatgaaaaggaagcaatggaaaattggatcagcaaaaagaaacgtacaagtcccatgacaaatcttgttcttccttcagcggtacttacaccaaataggactctgaaaatggccatcaatagatggctggagacacaccaaaagtaaaattgttgatattgtattatttatattttcagtgatctcatttgaatgatttataggtaaatactaatcagacattattaaaagcaaaacaggaaaaaggtaaacttcttaaatttagttacctataaaaattgtcaattttcattctttaaaaacacatggacttactataaaagcctttttgtactagtgaaaagaatcttcagctatatagaaataaagttatactttaaattgcagtgtcctaagttttttaaattcctcttactatcattcccaa

SEQ ID NO: 431394 - DNA, 627 bp, Homo sapiens
ccctgagtagctgggactataggactataggcacacaccaccactcttggctaatttttttgtttgtttgagacgaagttttgctcttgtcgcccaggctggagtgcaatggcgtgatctcagctcactggcaacatctgcctcccgggttcaaatgattctcctgcctcagtctcctgagtagctgggattacaggtgcccgccaccacgctcagctaatttttgtatttttagtagagatggggttttaccatgttggccaggctggtcttagactcctgacctcagttgatccacctgcctcagcctctgcattcagtttattcacatatttttggtaactcccatggcagctcctaggatttcagcggtctgtgggccagaaagcaggcaccagggctgacctcaaggccgtatcagagggccaagcagagttcttttggatacctgcttttcatcccacagggccttagagtcagaggtaaggtagcaacagagctagaatggggcaatgcactcttaccctccttctcaacttttatttaagctgtgctaaatgttttcttcaagggaaccagatttagttctttacagaattttccagtgaaataaaacatgttgtaata

SEQ ID NO: 431395 - DNA, 443 bp, Homo sapiens
agagtcacgggcaggaggcagagagagccacctgtgctgcaaaagactcaagattagcagctgctgaagaggcatctgtggagtctctggttcctcctgctctccgtggcctggtacgccctcacaagaagcggaagaagctgtcttcctcttgtaggaaggccaagagagcaaagtcccagaacccactgcgcagcttcaagcacaaaggaaagaaattcagacccacagccaagccctcctgaggttgttgggcctctctggagctgagcacattgtggagcacaggcttacacccttcgtggacaggcgaggctctggtgcttactgcacagcctgaacagacagttctggggccggcagtgctgggccctttagctccttggcacttccaagctggcatcttgccccttgacaacagaataaaaattttagctgcccca

SEQ ID NO: 431396 - DNA, 545 bp, Homo sapiens
  misc_feature (19)..(19): n is a, c, g, or t
  misc_feature (37)..(38): n is a, c, g, or t
  misc_feature (40)..(40): n is a, c, g, or t
  misc_feature (72)..(72): n is a, c, g, or t
  misc_feature (75)..(75): n is a, c, g, or t
  misc_feature (105)..(105): n is a, c, g, or t
  misc_feature (119)..(119): n is a, c, g, or t
  misc_feature (149)..(149): n is a, c, g, or t
  misc_feature (203)..(203): n is a, c, g, or t
  misc_feature (205)..(205): n is a, c, g, or t
  misc_feature (218)..(218): n is a, c, g, or t
  misc_feature (246)..(246): n is a, c, g, or t
  misc_feature (253)..(253): n is a, c, g, or t
  misc_feature (261)..(261): n is a, c, g, or t
tgccagcaacgccttcacnaccaccactcctttttgnnanaaccaccaccccctcaggccccctccccgccntcnctcgcgcgccatgcacctaccctctcgccncccccgccatgtgnttgaaagccccccccactcttggggccccnattgttgcccctgcacgtcccctcgcctgccctcgcgtcgcgtcctcccgtggncnttgatacgccccntcacaaagagagcggaaggaggctgtcnttcctcnttgtaggnagcccaagagagcaaagtcccagaacccactgcgcagcttcaagcacaaaggaaagaaattcagacccacagccaagccctcctgaggttgttgggcctctctggagctgagcacattgtggagcacaggcttacacccttcgtggacaggcgaggctctggtgcttactgcacagcctgaacagacagttctggggccggcagtgctgggccctttagctccttggcacttccaagctggcatcttgccccttgacaacagaataaaaattttagctgcccca

SEQ ID NO: 431397 - DNA, 619 bp, Homo sapiens
ccctgaattcctgccaagtcgactcttgaggagtcccccaagttggggtcctagattgcatgtcatcctgcttaccaggcgtcacaaggccatgctgggggcatgaggaggttggggcagcaggagagtggggagaaactaggagagtgcctgagtattttagaaagaaccaagttatgctgggtcagctgtgccgagctgccccagccatgagaagagaagcctgcccttgctggcaggtggctatggccggcccagagccttcctgcccagctcctgcagccctgctgcctgggatcaggctgggagatgggccttcctgaccgccagccttcctctccccgagcacacgcacatgtagattcggggggaagctgcctgctcttccttagaggagccggggcagctatctgctggtccctttctgaacaactgttgatgtgtgagctgtgtctgtgtgttatgtgcataagcggtggtgtgacatacacacatgtgtactgtcccttatgccctggcctgagctctccagctgccttctcagcctgaaggctgggcttctctgctggcttggggtcctagattgcatgtcacctgcttaccaggcgtcacaaggcca

SEQ ID NO: 431398 - DNA, 384 bp, Homo sapiens
gctccatcacctttaaaaatatttataaaatagttccaaaaatctgatatctgaaaagcaatccaagcctgtgtaaatgggaatcactgataagtatcatcatctgtatcagcttggcttggacatgaaaaattgattctctttatgtcactccttgcacctggacaaattctccccgggatacctgtatcccggggagggacctcacaacagccagactgtttctcctgctcacttaaccctgtgttgccccacacagtatcgtgaagagcgcttccgactgtccagttgtgaggcaccaccggggtcatcagggattggtggagagggagtataaagaccagggttggtaagggagggcccagaccgaagaaggtttggtga

SEQ ID NO: 431399 - DNA, 4888 bp, Homo sapiens
gtgagccatgatcgtgccactgcactccagtctgggcaacagtgatcccatctgaaaaaaaaaaacaaaaaaaaaaatgcaatttagggccaggtggggtggctcacgcctataatcccagcactttgggaggccagggcagggggatcgcctgaggtcagcagtttgagaccaggctggccaacatggtgaaaacccctctctactaaaagtataaaaattagccgggcatggtggtgtgtgcctgtagtcccagctattcgggaagctgaggcaggagaatcgcttgaacccgggaggaggttgcagtgagcagaaatcgagccactgcactccagcctggggggcagagggagactctgtctcagaaaaaaaaaaaaaatgcaatttagttctctaggcttttccatttaatagttttatatcctcctgtttctaaatctggatgacagtgtaacactccagtaaggtgaattgtgaattgctgaaattcttcagatgtttaaaagagttttcagtattcctcatgttagaattaatgcagagaaaaattatatcctttgaactagttacatgttgtggacttctggcctgaggctcttggggattatgtgacatattgggaagggacacatttctgctctgtggctgttactagaaatctagccagcaaatcagactacgtttgtgagaagacaggaaggcacagattagggttgagccagccttcaacaggtttggctggcagtagacacagtggagcacatcttaactattttggtaggtcctgggtttctcttggtagtttttgatagaaaggggaatggtgtgaggaaaaagtgggcatacatttcacctttccactgataaggcaggtggaattgggatagtcagtggatgggccaatagctggtggctgtgagaagaataaggatttccatactggtgtgtcatatttacagataggttgtgacctaaaaagttttttaaaaaacagcagttagggcctgggcgcggtggctcacgcctgtaatcccagcactttgggaggccgaggcgggcggatcacaaggtcaggagatcgagaccatcctggctaacaacggtgaaaccctgtctctactaaaaatacaaaaaattggccgggcgtggtggcgggtgcctgtagtcccagctactcgggaggctgaggcaagagaatggcgtgaactcgggaggtggagcttgcagtgagctgagatcatgccactgcactccagcctgggcgacagagtgagactccttctaaaaaacaaaaacaaaaccaaaacagtagttagggtacacacacacaaattctagtgattttccccccaatactacccttgacttttgaaattcttgctttctcagagtttacaacatccttaccaaacagccttctccctccttaccacaaaaaaagaaaaaaaagttctggggttgaggggacactccattcttaacatcctctattatcccagcccaattccccagctctcactgggactagttgtacctatcttcatcatttggtcccagcatgactacctgttggtgcatgagctgatctctcctaacctaacagccagatgctagtctctggtactcagatgctgggctgcatcagataggatgcacaggatcatcctggaagcttgttgacatagattcctgtgcaacactcagatatagtcttaatgtagatttgtgttgggtggtatggtaggtagaataatggcctaccactctgaaacatatgaatatgttacctaacatgacagaagagaattaagttgctaatcagatgactgtaaaataaattatcctggatcatctggatgggcctaatgtaatcacaaaggttgtttccttgccttttccagcttggctctggctcccttcctccagcaagggtgggttgagctctcacatggcaccactttgacctcttctgcttccctcttctacactgaaagacttatgggccaggagcagtggctcgcacctgcaatcccagcactttgggaggccgaggaaggcagatcgcttggccccaggagttcaaaaccgtcctgggcaacgtggcgaaaccccatctagaaagaaaagaagagaaggggaggggggaggggaggaggagttacatatatacacatacacacacacacacacgtacgtacatacatacatacacgctaactggacgtggtggtgcgtgcctgtagtcttagctttccaggagactgaggtgggaggaccacttgagcctgagatcgcgccagcctgggtgacagtcagaccatgtctcaaaaaaaaaaaaagatttgtgattaggattcttagtcctcacctgtattattttcctattgctactgtaacaaattaccacaaatttactggcttgagacgacgcaagtctgtaggtcagaagtctgacacgggtcttaactggtgacccgagtcagatttgggacacaaagaacagaaaccaagctgtgcaggtttctgacaggcagtccggttagggagccctacagcaacccgccggtcctctctctcaggcagttgctgccatggctcattattccaaccggttctcctcagcccagtctatctcagtggctccattcatagggtgatgtgcccggcgggacactaaccctaaccaagcagagagacggtcatgcccgtcacgacctcggccctcgccccggccgaggcttctcctgcaggtcgcgagaatcaggtgcgtcagcggcgtccgggaacgccggaagagccagtggagcggctctgtagtccaaagtaccccgtcgaccccagcacggccgctccaccgcctcctactagacccagtcctagggactgcgcagtcgcagagctccgtccgagtaccggaagcctaggcgccagcacttccgggaagtgacttcgtctccgaagccgattggttgttgctttgctcccgctcgcgtcggtggcgtttttcctgcagcgcgtgcgtgctgcgctactgagcagcgccatggaggactctgaagcactgggcttcgaacacatgggcctcgatccccggctccttcaggctgtcaccgatctgggctggtcgcgacctacgctgatccaggagaaggccatcccactggccctagaagggaaggacctcctggctcgggcccgcacgggctccgggaagacggccgcttatgctattccgatgctgcagctgttgctccataggaaggcgacaggtccggtggtagaacaggcagtgagaggccttgttcttgttcctaccaaggagctggcacggcaagcacagtccatgattcagcagctggctacctactgtgctcgggatgtccgagtggccaatgtctcagctgctgaagactcagtctctcagagagctgtgctgatggagaagccagatgtggtagtagggaccccatctcgcatattaagccacttgcagcaagacagcctgaaacttcgtgactccctggagcttttggtggtggacgaagctgaccttcttttttcctttggctttgaagaagagctcaagagtctcctctgtcacttgccccggatttaccaggcttttctcatgtcagctacttttaacgaggacgtacaagcactcaaggagctgatattacataacccggttacccttaagttacaggagtcccagctgcctgggccagaccagttacagcagtttcaggtggtctgtgagactgaggaagacaaattcctcctgctgtatgccctgctcaagctgtcattgattcggggcaagtctctgctctttgtcaacactctagaacggagttaccggctacgcctgttcttggaacagttcagcatccccacctgtgtgctcaatggagagcttccactgcgctccaggtgccacatcatctcacagttcaaccaaggcttctacgactgtgtcatagcaactgatgctgaagtcctgggggccccagtcaagggcaagcgtcggggccgagggcccaaaggggacaaggcctctgatccggaagcaggtgtggcccggggcatagacttccaccatgtgtctgctgtgctcaactttgatcttcccccaacccctgaggcctacatccatcgagctggcaggacagcacgcgctaacaacccaggcatagtcttaacctttgtgcttcccacggagcagttccacttaggcaagattgaggagcttctcagtggagagaacaggggccccattctgctcccctaccagttccggatggaggagatcgagggcttccgctatcgctgcagggatgccatgcgctcagtgactaagcaggccattcgggaggcaagattgaaggagatcaaggaagagcttctgcattctgagaagcttaagacatactttgaagacaaccctagggacctccagctgctgcggcatgacctacctttgcaccccgcagtggtgaagccccacctgggccatgttcctgactacctggttcctcctgctctccgtggcctggtacgccctcacaagaagcggaagaagctgtcttcctcttgtaggaaggccaagagagcaaagtcccagaacccactgcgcagcttcaagcacaaaggaaagaaattcagacccacagccaagccctcctgaggttgttgggcctctctggagctgagcacattgtggagcacaggcttacacccttcgtggacaggcgaggctctggtgcttactgcacagcctgaacagacagttctggggccggcagtgctgggccctttagctccttggcacttccaagctggcatcttgccccttgacaacagaataaaaattttagctgcccca

SEQ ID NO: 431400 - DNA, 3656 bp, Homo sapiens
aaggctcccctctgtaagcctgggaagcctgggcgacagagtgagactccttctaaaaaacaaaaacaaaaccaaaacagtagttagggtacacacacacaaattctagtgattttccccccaatactacccttgacttttgaaattcttgctttctcagagtttacaacatccttaccaaacagccttctccctccttaccacaaaaaaagaaaaaaaagttctggggttgaggggacactccattcttaacatcctctattatcccagcccaattccccagctctcactgggactagttgtacctatcttcatcatttggtcccagcatgactacctgttggtgcatgagctgatctctcctaacctaacagccagatgctagtctctggtactcagatgctgggctgcatcagataggatgcacaggatcatcctggaagcttgttgacatagattcctgtgcaacactcagatatagtcttaatgtagatttgtgttgggtggtatggtaggtagaataatggcctaccactctgaaacatatgaatatgttacctaacatgacagaagagaattaagttgctaatcagatgactgtaaaataaattatcctggatcatctggatgggcctaatgtaatcacaaaggttgtttccttgccttttccagcttggctctggctcccttcctccagcaagggtgggttgagctctcacatggcaccactttgacctcttctgcttccctcttctacactgaaagacttatgggccaggagcagtggctcgcacctgcaatcccagcactttgggaggccgaggaaggcagatcgcttggccccaggagttcaaaaccgtcctgggcaacgtggcgaaaccccatctagaaagaaaagaagagaaggggaggggggaggggaggaggagttacatatatacacatacacacacacacacacgtacgtacatacatacatacacgctaactggacgtggtggtgcgtgcctgtagtcttagctttccaggagactgaggtgggaggaccacttgagcctgagatcgcgccagcctgggtgacagtcagaccatgtctcaaaaaaaaaaaaagatttgtgattaggattcttagtcctcacctgtattattttcctattgctactgtaacaaattaccacaaatttactggcttgagacgacgcaagtctgtaggtcagaagtctgacacgggtcttaactggtgacccgagtcagatttgggacacaaagaacagaaaccaagctgtgcaggtttctgacaggcagtccggttagggagccctacagcaacccgccggtcctctctctcaggcagttgctgccatggctcattattccaaccggttctcctcagcccagtctatctcagtggctccattcatagggtgatgtgcccggcgggacactaaccctaaccaagcagagagacggtcatgcccgtcacgacctcggccctcgccccggccgaggcttctcctgcaggtcgcgagaatcaggtgcgtcagcggcgtccgggaacgccggaagagccagtggagcggctctgtagtccaaagtaccccgtcgaccccagcacggccgctccaccgcctcctactagacccagtcctagggactgcgcagtcgcagagctccgtccgagtaccggaagcctaggcgccagcacttccgggaagtgacttcgtctccgaagccgattggttgttgctttgctcccgctcgcgtcggtggcgtttttcctgcagcgcgtgcgtgctgcgctactgagcagcgccatggaggactctgaagcactgggcttcgaacacatgggcctcgatccccggctccttcaggctgtcaccgatctgggctggtcgcgacctacgctgatccaggagaaggccatcccactggccctagaagggaaggacctcctggctcgggcccgcacgggctccgggaagacggccgcttatgctattccgatgctgcagctgttgctccataggaaggcgacaggtccggtggtagaacaggcagtgagaggccttgttcttgttcctaccaaggagctggcacggcaagcacagtccatgattcagcagctggctacctactgtgctcgggatgtccgagtggccaatgtctcagctgctgaagactcagtctctcagagagctgtgctgatggagaagccagatgtggtagtagggaccccatctcgcatattaagccacttgcagcaagacagcctgaaacttcgtgactccctggagcttttggtggtggacgaagctgaccttcttttttcctttggctttgaagaagagctcaagagtctcctctgtcacttgccccggatttaccaggcttttctcatgtcagctacttttaacgaggacgtacaagcactcaaggagctgatattacataacccggttacccttaagttacaggagtcccagctgcctgggccagaccagttacagcagtttcaggtggtctgtgagactgaggaagacaaattcctcctgctgtatgccctgctcaagctgtcattgattcggggcaagtctctgctctttgtcaacactctagaacggagttaccggctacgcctgttcttggaacagttcagcatccccacctgtgtgctcaatggagagcttccactgcgctccaggtgccacatcatctcacagttcaaccaaggcttctacgactgtgtcatagcaactgatgctgaagtcctgggggccccagtcaagggcaagcgtcggggccgagggcccaaaggggacaaggcctctgatccggaagcaggtgtggcccggggcatagacttccaccatgtgtctgctgtgctcaactttgatcttcccccaacccctgaggcctacatccatcgagctggcaggacagcacgcgctaacaacccaggcatagtcttaacctttgtgcttcccacggagcagttccacttaggcaagattgaggagcttctcagtggagagaacaggggccccattctgctcccctaccagttccggatggaggagatcgagggcttccgctatcgctgcagggatgccatgcgctcagtgactaagcaggccattcgggaggcaagattgaaggagatcaaggaagagcttctgcattctgagaagcttaagacatactttgaagacaaccctagggacctccagctgctgcggcatgacctacctttgcaccccgcagtggtgaagccccacctgggccatgttcctgactacctggttcctcctgctctccgtggcctggtacgccctcacaagaagcggaagaagctgtcttcctcttgtaggaaggccaagagagcaaagtcccagaacccactgcgcagcttcaagcacaaaggaaagaaattcagacccacagccaagccctcctgaggttgttgggcctctctggagctgagcacattgtggagcacaggcttacacccttcgtggacaggcgaggctctggtgcttactgcacagcctgaacagacagttctggggccggcagtgctgggccctttagctccttggcacttccaagctggcatcttgccccttgacaacagaataaaaattttagctgcccca

SEQ ID NO: 431401 - DNA, 3539 bp, Homo sapiens
gcgcttaggggctgaggcgcgatggcaggtgtcggggctgggcctctgcgggcgatggggcggcaggccctgctgcttctcgcgctgtgcgccacaggcgcccaggggctctacttccacatcggcgagaccgagaagcgctgtttcatcgaggaaatccccgacgagaccatggtcatcggcaactatcgtacccagatgtgggataagcagaaggaggtcttcctgccctcgacccctggcctgggcatgcacgtggaagtgaaggaccccgacggcaaggtggtgctgtcccggcagtacggctcggagggccgcttcacgttcacctcccacacgcccggtgaccatcaaatctgtctgcactccaattctaccaggatggctctcttcgctggtggcaaactgcgtgtgcatctcgacatccaggttggggagcatgccaacaactaccctgagattgctgcaaaagataagctgacggagctacagctccgcgcccgccagttgcttgatcaggtggaacagattcagaaggagcaggattaccaaaggcttggctctggctcccttcctccagcaagggtgggttgagctctcacatggcaccactttgacctcttctgcttccctcttctacactgaaagacttatgggccaggagcagtggctcgcacctgcaatcccagcactttgggaggccgaggaaggcagatcgcttggccccaggagttcaaaaccgtcctgggcaacgtggcgaaaccccatctagaaagaaaagaagagaaggggaggggggaggggaggaggagttacatatatacacatacacacacacacacacgtacgtacatacatacatacacgctaactggacgtggtggtgcgtgcctgtagtcttagctttccaggagactgaggtgggaggaccacttgagcctgagatcgcgccagcctgggtgacagtcagaccatgtctcaaaaaaaaaaaaagatttgtgattaggattcttagtcctcacctgtattattttcctattgctactgtaacaaattaccacaaatttactggcttgagacgacgcaagtctgtaggtcagaagtctgacacgggtcttaactggtgacccgagtcagatttgggacacaaagaacagaaaccaagctgtgcaggtttctgacaggcagtccggttagggagccctacagcaacccgccggtcctctctctcaggcagttgctgccatggctcattattccaaccggttctcctcagcccagtctatctcagtggctccattcatagggtgatgtgcccggcgggacactaaccctaaccaagcagagagacggtcatgcccgtcacgacctcggccctcgccccggccgaggcttctcctgcaggtcgcgagaatcaggtgcgtcagcggcgtccgggaacgccggaagagccagtggagcggctctgtagtccaaagtaccccgtcgaccccagcacggccgctccaccgcctcctactagacccagtcctagggactgcgcagtcgcagagctccgtccgagtaccggaagcctaggcgccagcacttccgggaagtgacttcgtctccgaagccgattggttgttgctttgctcccgctcgcgtcggtggcgtttttcctgcagcgcgtgcgtgctgcgctactgagcagcgccatggaggactctgaagcactgggcttcgaacacatgggcctcgatccccggctccttcaggctgtcaccgatctgggctggtcgcgacctacgctgatccaggagaaggccatcccactggccctagaagggaaggacctcctggctcgggcccgcacgggctccgggaagacggccgcttatgctattccgatgctgcagctgttgctccataggaaggcgacaggtccggtggtagaacaggcagtgagaggccttgttcttgttcctaccaaggagctggcacggcaagcacagtccatgattcagcagctggctacctactgtgctcgggatgtccgagtggccaatgtctcagctgctgaagactcagtctctcagagagctgtgctgatggagaagccagatgtggtagtagggaccccatctcgcatattaagccacttgcagcaagacagcctgaaacttcgtgactccctggagcttttggtggtggacgaagctgaccttcttttttcctttggctttgaagaagagctcaagagtctcctctgtcacttgccccggatttaccaggcttttctcatgtcagctacttttaacgaggacgtacaagcactcaaggagctgatattacataacccggttacccttaagttacaggagtcccagctgcctgggccagaccagttacagcagtttcaggtggtctgtgagactgaggaagacaaattcctcctgctgtatgccctgctcaagctgtcattgattcggggcaagtctctgctctttgtcaacactctagaacggagttaccggctacgcctgttcttggaacagttcagcatccccacctgtgtgctcaatggagagcttccactgcgctccaggtgccacatcatctcacagttcaaccaaggcttctacgactgtgtcatagcaactgatgctgaagtcctgggggccccagtcaagggcaagcgtcggggccgagggcccaaaggggacaaggcctctgatccggaagcaggtgtggcccggggcatagacttccaccatgtgtctgctgtgctcaactttgatcttcccccaacccctgaggcctacatccatcgagctggcaggacagcacgcgctaacaacccaggcatagtcttaacctttgtgcttcccacggagcagttccacttaggcaagattgaggagcttctcagtggagagaacaggggccccattctgctcccctaccagttccggatggaggagatcgagggcttccgctatcgctgcagggatgccatgcgctcagtgactaagcaggccattcgggaggcaagattgaaggagatcaaggaagagcttctgcattctgagaagcttaagacatactttgaagacaaccctagggacctccagctgctgcggcatgacctacctttgcaccccgcagtggtgaagccccacctgggccatgttcctgactacctggttcctcctgctctccgtggcctggtacgccctcacaagaagcggaagaagctgtcttcctcttgtaggaaggccaagagagcaaagtcccagaacccactgcgcagcttcaagcacaaaggaaagaaattcagacccacagccaagccctcctgaggttgttgggcctctctggagctgagcacattgtggagcacaggcttacacccttcgtggacaggcgaggctctggtgcttactgcacagcctgaacagacagttctggggccggcagtgctgggccctttagctccttggcacttccaagctggcatcttgccccttgacaacagaataaaaattttagctgcccca

SEQ ID NO: 431402 - DNA, 2486 bp, Homo sapiens
actctacagatcccttttctttgggacggcgcaagtctgtaggtcagaagtctgacacgggtcttaactggtgacccgagtcagatttgggacacaaagaacagaaaccaagctgtgcaggtttctgacaggcagtccggttagggagccctacagcaacccgccggtcctctctctcaggcagttgctgccatggctcattattccaaccggttctcctcagcccagtctatctcagtggctccattcatagggtgatgtgcccggcgggacactaaccctaaccaagcagagagacggtcatgcccgtcacgacctcggccctcgccccggccgaggcttctcctgcaggtcgcgagaatcaggtgcgtcagcggcgtccgggaacgccggaagagccagtggagcggctctgtagtccaaagtaccccgtcgaccccagcacggccgctccaccgcctcctactagacccagtcctagggactgcgcagtcgcagagctccgtccgagtaccggaagcctaggcgccagcacttccgggaagtgacttcgtctccgaagccgattggttgttgctttgctcccgctcgcgtcggtggcgtttttcctgcagcgcgtgcgtgctgcgctactgagcagcgccatggaggactctgaagcactgggcttcgaacacatgggcctcgatccccggctccttcaggctgtcaccgatctgggctggtcgcgacctacgctgatccaggagaaggccatcccactggccctagaagggaaggacctcctggctcgggcccgcacgggctccgggaagacggccgcttatgctattccgatgctgcagctgttgctccataggaaggcgacaggtccggtggtagaacaggcagtgagaggccttgttcttgttcctaccaaggagctggcacggcaagcacagtccatgattcagcagctggctacctactgtgctcgggatgtccgagtggccaatgtctcagctgctgaagactcagtctctcagagagctgtgctgatggagaagccagatgtggtagtagggaccccatctcgcatattaagccacttgcagcaagacagcctgaaacttcgtgactccctggagcttttggtggtggacgaagctgaccttcttttttcctttggctttgaagaagagctcaagagtctcctctgtcacttgccccggatttaccaggcttttctcatgtcagctacttttaacgaggacgtacaagcactcaaggagctgatattacataacccggttacccttaagttacaggagtcccagctgcctgggccagaccagttacagcagtttcaggtggtctgtgagactgaggaagacaaattcctcctgctgtatgccctgctcaagctgtcattgattcggggcaagtctctgctctttgtcaacactctagaacggagttaccggctacgcctgttcttggaacagttcagcatccccacctgtgtgctcaatggagagcttccactgcgctccaggtgccacatcatctcacagttcaaccaaggcttctacgactgtgtcatagcaactgatgctgaagtcctgggggccccagtcaagggcaagcgtcggggccgagggcccaaaggggacaaggcctctgatccggaagcaggtgtggcccggggcatagacttccaccatgtgtctgctgtgctcaactttgatcttcccccaacccctgaggcctacatccatcgagctggcaggacagcacgcgctaacaacccaggcatagtcttaacctttgtgcttcccacggagcagttccacttaggcaagattgaggagcttctcagtggagagaacaggggccccattctgctcccctaccagttccggatggaggagatcgagggcttccgctatcgctgcagggatgccatgcgctcagtgactaagcaggccattcgggaggcaagattgaaggagatcaaggaagagcttctgcattctgagaagcttaagacatactttgaagacaaccctagggacctccagctgctgcggcatgacctacctttgcaccccgcagtggtgaagccccacctgggccatgttcctgactacctggttcctcctgctctccgtggcctggtacgccctcacaagaagcggaagaagctgtcttcctcttgtaggaaggccaagagagcaaagtcccagaacccactgcgcagcttcaagcacaaaggaaagaaattcagacccacagccaagccctcctgaggttgttgggcctctctggagctgagcacattgtggagcacaggcttacacccttcgtggacaggcgaggctctggtgcttactgcacagcctgaacagacagttctggggccggcagtgctgggccctttagctccttggcacttccaagctggcatcttgccccttgacaacagaataaaaattttagctgcccca

SEQ ID NO: 431403 - DNA, 5187 bp, Homo sapiens
  misc_feature (4905)..(4905): n is a, c, g, or t
  misc_feature (4907)..(4907): n is a, c, g, or t
gtgagccatgatcgtgccactgcactccagtctgggcaacagtgatcccatctgaaaaaaaaaaacaaaaaaaaaaatgcaatttagggccaggtggggtggctcacgcctataatcccagcactttgggaggccagggcagggggatcgcctgaggtcagcagtttgagaccaggctggccaacatggtgaaaacccctctctactaaaagtataaaaattagccgggcatggtggtgtgtgcctgtagtcccagctattcgggaagctgaggcaggagaatcgcttgaacccgggaggaggttgcagtgagcagaaatcgagccactgcactccagcctggggggcagagggagactctgtctcagaaaaaaaaaaaaaatgcaatttagttctctaggcttttccatttaatagttttatatcctcctgtttctaaatctggatgacagtgtaacactccagtaaggtgaattgtgaattgctgaaattcttcagatgtttaaaagagttttcagtattcctcatgttagaattaatgcagagaaaaattatatcctttgaactagttacatgttgtggacttctggcctgaggctcttggggattatgtgacatattgggaagggacacatttctgctctgtggctgttactagaaatctagccagcaaatcagactacgtttgtgagaagacaggaaggcacagattagggttgagccagccttcaacaggtttggctggcagtagacacagtggagcacatcttaactattttggtaggtcctgggtttctcttggtagtttttgatagaaaggggaatggtgtgaggaaaaagtgggcatacatttcacctttccactgataaggcaggtggaattgggatagtcagtggatgggccaatagctggtggctgtgagaagaataaggatttccatactggtgtgtcatatttacagataggttgtgacctaaaaagttttttaaaaaacagcagttagggcctgggcgcggtggctcacgcctgtaatcccagcactttgggaggccgaggcgggcggatcacaaggtcaggagatcgagaccatcctggctaacaacggtgaaaccctgtctctactaaaaatacaaaaaattggccgggcgtggtggcgggtgcctgtagtcccagctactcgggaggctgaggcaagagaatggcgtgaactcgggaggtggagcttgcagtgagctgagatcatgccactgcactccagcctgggcgacagagtgagactccttctaaaaaacaaaaacaaaaccaaaacagtagttagggtacacacacacaaattctagtgattttccccccaatactacccttgacttttgaaattcttgctttctcagagtttacaacatccttaccaaacagccttctccctccttaccacaaaaaaagaaaaaaaagttctggggttgaggggacactccattcttaacatcctctattatcccagcccaattccccagctctcactgggactagttgtacctatcttcatcatttggtcccagcatgactacctgttggtgcatgagctgatctctcctaacctaacagccagatgctagtctctggtactcagatgctgggctgcatcagataggatgcacaggatcatcctggaagcttgttgacatagattcctgtgcaacactcagatatagtcttaatgtagatttgtgttgggtggtatggtaggtagaataatggcctaccactctgaaacatatgaatatgttacctaacatgacagaagagaattaagttgctaatcagatgactgtaaaataaattatcctggatcatctggatgggcctaatgtaatcacaaaggttgtttccttgccttttccagcttggctctggctcccttcctccagcaagggtgggttgagctctcacatggcaccactttgacctcttctgcttccctcttctacactgaaagacttatgggccaggagcagtggctcgcacctgcaatcccagcactttgggaggccgaggaaggcagatcgcttggccccaggagttcaaaaccgtcctgggcaacgtggcgaaaccccatctagaaagaaaagaagagaaggggaggggggaggggaggaggagttacatatatacacatacacacacacacacacgtacgtacatacatacatacacgctaactggacgtggtggtgcgtgcctgtagtcttagctttccaggagactgaggtgggaggaccacttgagcctgagatcgcgccagcctgggtgacagtcagaccatgtctcaaaaaaaaaaaaagatttgtgattaggattcttagtcctcacctgtattattttcctattgctactgtaacaaattaccacaaatttactggcttgagacgacgcaagtctgtaggtcagaagtctgacacgggtcttaactggtgacccgagtcagatttgggacacaaagaacagaaaccaagctgtgcaggtttctgacaggcagtccggttagggagccctacagcaacccgccggtcctctctctcaggcagttgctgccatggctcattattccaaccggttctcctcagcccagtctatctcagtggctccattcatagggtgatgtgcccggcgggacactaaccctaaccaagcagagagacggtcatgcccgtcacgacctcggccctcgccccggccgaggcttctcctgcaggtcgcgagaatcaggtgcgtcagcggcgtccgggaacgccggaagagccagtggagcggctctgtagtccaaagtaccccgtcgaccccagcacggccgctccaccgcctcctactagacccagtcctagggactgcgcagtcgcagagctccgtccgagtaccggaagcctaggcgccagcacttccgggaagtgacttcgtctccgaagccgattggttgttgctttgctcccgctcgcgtcggtggcgtttttcctgcagcgcgtgcgtgctgcgctactgagcagcgccatggaggactctgaagcactgggcttcgaacacatgggcctcgatccccggctccttcaggctgtcaccgatctgggctggtcgcgacctacgctgatccaggagaaggccatcccactggccctagaagggaaggacctcctggctcgggcccgcacgggctccgggaagacggccgcttatgctattccgatgctgcagctgttgctccataggaaggcgacaggtccggtggtagaacaggcagtgagaggccttgttcttgttcctaccaaggagctggcacggcaagcacagtccatgattcagcagctggctacctactgtgctcgggatgtccgagtggccaatgtctcagctgctgaagactcagtctctcagagagctgtgctgatggagaagccagatgtggtagtagggaccccatctcgcatattaagccacttgcagcaagacagcctgaaacttcgtgactccctggagcttttggtggtggacgaagctgaccttcttttttcctttggctttgaagaagagctcaagagtctcctctgtcacttgccccggatttaccaggcttttctcatgtcagctacttttaacgaggacgtacaagcactcaaggagctgatattacataacccggttacccttaagttacaggagtcccagctgcctgggccagaccagttacagcagtttcaggtggtctgtgagactgaggaagacaaattcctcctgctgtatgccctgctcaagctgtcattgattcggggcaagtctctgctctttgtcaacactctagaacggagttaccggctacgcctgttcttggaacagttcagcatccccacctgtgtgctcaatggagagcttccactgcgctccaggtgccacatcatctcacagttcaaccaaggcttctacgactgtgtcatagcaactgatgctgaagtcctgggggccccagtcaagggcaagcgtcggggccgagggcccaaaggggacaaggcctctgatccggaagcaggtgtggcccggggcatagacttccaccatgtgtctgctgtgctcaactttgatcttcccccaacccctgaggcctacatccatcgagctggcaggacagcacgcgctaacaacccaggcatagtcttaacctttgtgcttcccacggagcagttccacttaggcaagattgaggagcttctcagtggagagaacaggggccccattctgctcccctaccagttccggatggaggagatcgagggcttccgctatcgctgcagggatgccatgcgctcagtgactaagcaggccattcgggaggcaagattgaaggagatcaaggaagagcttctgcattctgagaagcttaagacatactttgaagacaaccctagggacctccagctgctgcggcatgacctacctttgcaccccgcagtggtgaagccccacctgggccatgttcctgactacctggttcctcctgctctccgtggcctggtacgccctcacaagaagcggaagaagctgtcttcctcttgtaggaaggccaagagagcaaagtcccagaacccactgcgcagcttcaagcacaaaggaaagaaattcagacccacagccaagccctcctgaggttgttgggcctctctggagctgagcacattgtggagcacaggcttacacccttcgtggacaggcgaggctctggtgcttactgcacagcctgaacagacagttctggggccggcagtgctgggccctttagctccttggcacttccaagctggcatcttgccccttgacaacagaataaaaattttagctgccccaaaaaaaaaaagacgaananacagacggagacaaaacacagaacaccaaacacagcggggagcaaacaagaaccccgggaggcaacaaatacagacacaacattatacaaaaagggcgcacccaaggagcgagaacaacaataacggagccgcgcacagaacaaacgcgcgaagagaacaagagaacaggcgagaccagggagcgacccaacggcggggcacacaagggaacaaaccaacaagaacgaccggccaacaccggggcccgcggccccaacgcggagacaccacgaccaaacc

SEQ ID NO: 431404 - DNA, 5448 bp, Homo sapiens
gtgagccatgatcgtgccactgcactccagtctgggcaacagtgatcccatctgaaaaaaaaaaacaaaaaaaaaaatgcaatttagggccaggtggggtggctcacgcctataatcccagcactttgggaggccagggcagggggatcgcctgaggtcagcagtttgagaccaggctggccaacatggtgaaaacccctctctactaaaagtataaaaattagccgggcatggtggtgtgtgcctgtagtcccagctattcgggaagctgaggcaggagaatcgcttgaacccgggaggaggttgcagtgagcagaaatcgagccactgcactccagcctggggggcagagggagactctgtctcagaaaaaaaaaaaaaatgcaatttagttctctaggcttttccatttaatagttttatatcctcctgtttctaaatctggatgacagtgtaacactccagtaaggtgaattgtgaattgctgaaattcttcagatgtttaaaagagttttcagtattcctcatgttagaattaatgcagagaaaaattatatcctttgaactagttacatgttgtggacttctggcctgaggctcttggggattatgtgacatattgggaagggacacatttctgctctgtggctgttactagaaatctagccagcaaatcagactacgtttgtgagaagacaggaaggcacagattagggttgagccagccttcaacaggtttggctggcagtagacacagtggagcacatcttaactattttggtaggtcctgggtttctcttggtagtttttgatagaaaggggaatggtgtgaggaaaaagtgggcatacatttcacctttccactgataaggcaggtggaattgggatagtcagtggatgggccaatagctggtggctgtgagaagaataaggatttccatactggtgtgtcatatttacagataggttgtgacctaaaaagttttttaaaaaacagcagttagggcctgggcgcggtggctcacgcctgtaatcccagcactttgggaggccgaggcgggcggatcacaaggtcaggagatcgagaccatcctggctaacaacggtgaaaccctgtctctactaaaaatacaaaaaattggccgggcgtggtggcgggtgcctgtagtcccagctactcgggaggctgaggcaagagaatggcgtgaactcgggaggtggagcttgcagtgagctgagatcatgccactgcactccagcctgggcgacagagtgagactccttctaaaaaacaaaaacaaaaccaaaacagtagttagggtacacacacacaaattctagtgattttccccccaatactacccttgacttttgaaattcttgctttctcagagtttacaacatccttaccaaacagccttctccctccttaccacaaaaaaagaaaaaaaagttctggggttgaggggacactccattcttaacatcctctattatcccagcccaattccccagctctcactgggactagttgtacctatcttcatcatttggtcccagcatgactacctgttggtgcatgagctgatctctcctaacctaacagccagatgctagtctctggtactcagatgctgggctgcatcagataggatgcacaggatcatcctggaagcttgttgacatagattcctgtgcaacactcagatatagtcttaatgtagatttgtgttgggtggtatggtaggtagaataatggcctaccactctgaaacatatgaatatgttacctaacatgacagaagagaattaagttgctaatcagatgactgtaaaataaattatcctggatcatctggatgggcctaatgtaatcacaaaggttgtttccttgccttttccagcttggctctggctcccttcctccagcaagggtgggttgagctctcacatggcaccactttgacctcttctgcttccctcttctacactgaaagacttatgggccaggagcagtggctcgcacctgcaatcccagcactttgggaggccgaggaaggcagatcgcttggccccaggagttcaaaaccgtcctgggcaacgtggcgaaaccccatctagaaagaaaagaagagaaggggaggggggaggggaggaggagttacatatatacacatacacacacacacacacgtacgtacatacatacatacacgctaactggacgtggtggtgcgtgcctgtagtcttagctttccaggagactgaggtgggaggaccacttgagcctgagatcgcgccagcctgggtgacagtcagaccatgtctcaaaaaaaaaaaaagatttgtgattaggattcttagtcctcacctgtattattttcctattgctactgtaacaaattaccacaaatttactggcttgagacgacgcaagtctgtaggtcagaagtctgacacgggtcttaactggtgacccgagtcagatttgggacacaaagaacagaaaccaagctgtgcaggtttctgacaggcagtccggttagggagccctacagcaacccgccggtcctctctctcaggcagttgctgccatggctcattattccaaccggttctcctcagcccagtctatctcagtggctccattcatagggtgatgtgcccggcgggacactaaccctaaccaagcagagagacggtcatgcccgtcacgacctcggccctcgccccggccgaggcttctcctgcaggtcgcgagaatcaggtgcgtcagcggcgtccgggaacgccggaagagccagtggagcggctctgtagtccaaagtaccccgtcgaccccagcacggccgctccaccgcctcctactagacccagtcctagggactgcgcagtcgcagagctccgtccgagtaccggaagcctaggcgccagcacttccgggaagtgacttcgtctccgaagccgattggttgttgctttgctcccgctcgcgtcggtggcgtttttcctgcagcgcgtgcgtgctgcgctactgagcagcgccatggaggactctgaagcactgggcttcgaacacatgggcctcgatccccggctccttcaggctgtcaccgatctgggctggtcgcgacctacgctgatccaggagaaggccatcccactggccctagaagggaaggacctcctggctcgggcccgcacgggctccgggaagacggccgcttatgctattccgatgctgcagctgttgctccataggaaggcgacaggtccggtggtagaacaggcagtgagaggccttgttcttgttcctaccaaggagctggcacggcaagcacagtccatgattcagcagctggctacctactgtgctcgggatgtccgagtggccaatgtctcagctgctgaagactcagtctctcagagagctgtgctgatggagaagccagatgtggtagtagggaccccatctcgcatattaagccacttgcagcaagacagcctgaaacttcgtgactccctggagcttttggtggtggacgaagctgaccttcttttttcctttggctttgaagaagagctcaagagtctcctctgtcacttgccccggatttaccaggcttttctcatgtcagctacttttaacgaggacgtacaagcactcaaggagctgatattacataacccggttacccttaagttacaggagtcccagctgcctgggccagaccagttacagcagtttcaggtggtctgtgagactgaggaagacaaattcctcctgctgtatgccctgctcaagctgtcattgattcggggcaagtctctgctctttgtcaacactctagaacggagttaccggctacgcctgttcttggaacagttcagcatccccacctgtgtgctcaatggagagcttccactgcgctccaggtgccacatcatctcacagttcaaccaaggcttctacgactgtgtcatagcaactgatgctgaagtcctgggggccccagtcaagggcaagcgtcggggccgagggcccaaaggggacaaggcctctgatccggaagcaggtgtggcccggggcatagacttccaccatgtgtctgctgtgctcaactttgatcttcccccaacccctgaggcctacatccatcgagctggcaggacagcacgcgctaacaacccaggcatagtcttaacctttgtgcttcccacggagcagttccacttaggcaagattgaggagcttctcagtggagagaacaggggccccattctgctcccctaccagttccggatggaggagatcgagggcttccgctatcgctgcagggatgccatgcgctcagtgactaagcaggccattcgggaggcaagattgaaggagatcaaggaagagcttctgcattctgagaagcttaagacatactttgaagacaaccctagggacctccagctgctgcggcatgacctacctttgcaccccgcagtggtgaagccccacctgggccatgttcctgactacctggttcctcctgctctccgtggcctggtacgccctcacaagaagcggaagaagctgtcttcctcttgtaggaaggccaagagagcaaagtcccagaacccactgcgcagcttcaagcacaaaggaaagaaattcagacccacagccaagccctcctgaggttgttgggcctctctggagctgagcacattgtggagcacaggcttacacccttcgtggacaggcgaggctctggtgcttactgcacagcctgaacagacagttctggggccggcagtgctgggccctttagctccttggcacttccaagctggcatcttgccccttgacaacagaataaaaattttagctgccccagtttgtgcctccagcatatgaaaaggactatttgaatccccaaaacatcaggagtcgggaaacttcggaagacagctgtgcctggctctgtggctgcatgcagtgcttcacttggccagcagaggtcagctgtgccgagctgccccagccatgagaagagaagcctgcccttgctggcaggtggctatggccggcccagagccttcctgcccagctcctgcagccctgctgcctgggatcaggctgggagatgggccttcctgaccgccagccttcctctccccgagcacacgcacatgtagattcggggggaagctgcctgctcttccttagaggagccggggcagctatctgctggtccctttctgaacaactgttgatgtgtgagctgtgtctgtgtgttatgtgcataagcggtggtgtgacatacacacatgtgtactgtcccttatgccctggcctgagctctccagctgccttctcagcctgaaggctgggcttctctgctggcttggggtcctagattgcatgtcacctgcttaccaggcgtcacaaggcca

SEQ ID NO: 431405 - DNA, 5054 bp, Homo sapiens
gtgagccatgatcgtgccactgcactccagtctgggcaacagtgatcccatctgaaaaaaaaaaacaaaaaaaaaaatgcaatttagggccaggtggggtggctcacgcctataatcccagcactttgggaggccagggcagggggatcgcctgaggtcagcagtttgagaccaggctggccaacatggtgaaaacccctctctactaaaagtataaaaattagccgggcatggtggtgtgtgcctgtagtcccagctattcgggaagctgaggcaggagaatcgcttgaacccgggaggaggttgcagtgagcagaaatcgagccactgcactccagcctggggggcagagggagactctgtctcagaaaaaaaaaaaaaatgcaatttagttctctaggcttttccatttaatagttttatatcctcctgtttctaaatctggatgacagtgtaacactccagtaaggtgaattgtgaattgctgaaattcttcagatgtttaaaagagttttcagtattcctcatgttagaattaatgcagagaaaaattatatcctttgaactagttacatgttgtggacttctggcctgaggctcttggggattatgtgacatattgggaagggacacatttctgctctgtggctgttactagaaatctagccagcaaatcagactacgtttgtgagaagacaggaaggcacagattagggttgagccagccttcaacaggtttggctggcagtagacacagtggagcacatcttaactattttggtaggtcctgggtttctcttggtagtttttgatagaaaggggaatggtgtgaggaaaaagtgggcatacatttcacctttccactgataaggcaggtggaattgggatagtcagtggatgggccaatagctggtggctgtgagaagaataaggatttccatactggtgtgtcatatttacagataggttgtgacctaaaaagttttttaaaaaacagcagttagggcctgggcgcggtggctcacgcctgtaatcccagcactttgggaggccgaggcgggcggatcacaaggtcaggagatcgagaccatcctggctaacaacggtgaaaccctgtctctactaaaaatacaaaaaattggccgggcgtggtggcgggtgcctgtagtcccagctactcgggaggctgaggcaagagaatggcgtgaactcgggaggtggagcttgcagtgagctgagatcatgccactgcactccagcctgggcgacagagtgagactccttctaaaaaacaaaaacaaaaccaaaacagtagttagggtacacacacacaaattctagtgattttccccccaatactacccttgacttttgaaattcttgctttctcagagtttacaacatccttaccaaacagccttctccctccttaccacaaaaaaagaaaaaaaagttctggggttgaggggacactccattcttaacatcctctattatcccagcccaattccccagctctcactgggactagttgtacctatcttcatcatttggtcccagcatgactacctgttggtgcatgagctgatctctcctaacctaacagccagatgctagtctctggtactcagatgctgggctgcatcagataggatgcacaggatcatcctggaagcttgttgacatagattcctgtgcaacactcagatatagtcttaatgtagatttgtgttgggtggtatggtaggtagaataatggcctaccactctgaaacatatgaatatgttacctaacatgacagaagagaattaagttgctaatcagatgactgtaaaataaattatcctggatcatctggatgggcctaatgtaatcacaaaggttgtttccttgccttttccagcttggctctggctcccttcctccagcaagggtgggttgagctctcacatggcaccactttgacctcttctgcttccctcttctacactgaaagacttatgggccaggagcagtggctcgcacctgcaatcccagcactttgggaggccgaggaaggcagatcgcttggccccaggagttcaaaaccgtcctgggcaacgtggcgaaaccccatctagaaagaaaagaagagaaggggaggggggaggggaggaggagttacatatatacacatacacacacacacacacgtacgtacatacatacatacacgctaactggacgtggtggtgcgtgcctgtagtcttagctttccaggagactgaggtgggaggaccacttgagcctgagatcgcgccagcctgggtgacagtcagaccatgtctcaaaaaaaaaaaaagatttgtgattaggattcttagtcctcacctgtattattttcctattgctactgtaacaaattaccacaaatttactggcttgagacgacgcaagtctgtaggtcagaagtctgacacgggtcttaactggtgacccgagtcagatttgggacacaaagaacagaaaccaagctgtgcaggtttctgacaggcagtccggttagggagccctacagcaacccgccggtcctctctctcaggcagttgctgccatggctcattattccaaccggttctcctcagcccagtctatctcagtggctccattcatagggtgatgtgcccggcgggacactaaccctaaccaagcagagagacggtcatgcccgtcacgacctcggccctcgccccggccgaggcttctcctgcaggtcgcgagaatcaggtgcgtcagcggcgtccgggaacgccggaagagccagtggagcggctctgtagtccaaagtaccccgtcgaccccagcacggccgctccaccgcctcctactagacccagtcctagggactgcgcagtcgcagagctccgtccgagtaccggaagcctaggcgccagcacttccgggaagtgacttcgtctccgaagccgattggttgttgctttgctcccgctcgcgtcggtggcgtttttcctgcagcgcgtgcgtgctgcgctactgagcagcgccatggaggactctgaagcactgggcttcgaacacatgggcctcgatccccggctccttcaggctgtcaccgatctgggctggtcgcgacctacgctgatccaggagaaggccatcccactggccctagaagggaaggacctcctggctcgggcccgcacgggctccgggaagacggccgcttatgctattccgatgctgcagctgttgctccataggaaggcgacaggtccggtggtagaacaggcagtgagaggccttgttcttgttcctaccaaggagctggcacggcaagcacagtccatgattcagcagctggctacctactgtgctcgggatgtccgagtggccaatgtctcagctgctgaagactcagtctctcagagagctgtgctgatggagaagccagatgtggtagtagggaccccatctcgcatattaagccacttgcagcaagacagcctgaaacttcgtgactccctggagcttttggtggtggacgaagctgaccttcttttttcctttggctttgaagaagagctcaagagtctcctctgtcacttgccccggatttaccaggcttttctcatgtcagctacttttaacgaggacgtacaagcactcaaggagctgatattacataacccggttacccttaagttacaggagtcccagctgcctgggccagaccagttacagcagtttcaggtggtctgtgagactgaggaagacaaattcctcctgctgtatgccctgctcaagctgtcattgattcggggcaagtctctgctctttgtcaacactctagaacggagttaccggctacgcctgttcttggaacagttcagcatccccacctgtgtgctcaatggagagcttccactgcgctccaggtgccacatcatctcacagttcaaccaaggcttctacgactgtgtcatagcaactgatgctgaagtcctgggggccccagtcaagggcaagcgtcggggccgagggcccaaaggggacaaggcctctgatccggaagcaggtgtggcccggggcatagacttccaccatgtgtctgctgtgctcaactttgatcttcccccaacccctgaggcctacatccatcgagctggcaggacagcacgcgctaacaacccaggcatagtcttaacctttgtgcttcccacggagcagttccacttaggcaagattgaggagcttctcagtggagagaacaggggccccattctgctcccctaccagttccggatggaggagatcgagggcttccgctatcgctgcagggatgccatgcgctcagtgactaagcaggccattcgggaggcaagattgaaggagatcaaggaagagcttctgcattctgagaagcttaagacatactttgaagacaaccctagggacctccagctgctgcggcatgacctacctttgcaccccgcagtggtgaagccccacctgggccatgttcctgactacctggttcctcctgctctccgtggcctggtacgccctcacaagaagcggaagaagctgtcttcctcttgtaggaaggccaagagagcaaagtcccagaacccactgcgcagcttcaagcacaaaggaaagaaattcagacccacagccaagccctcctgaggttgttgggcctctctggagctgagcacattgtggagcacaggcttacacccttcgtggacaggcgaggctctggtgcttactgcacagcctgaacagacagttctggggccggcagtgctgggccctttagctccttggcacttccaagctggcatcttgccccttgacaacagaataaaaattttagctgccccaaaaaaaagaacaaacacggccggggagagaaagcaagaacaacgacacaccagagcagaggaagcgcgggtcggcgcacagcgggagggggaagcgaacagggagaggacgccgcaacggcgaccatgcggcaggcgcaaccagcggaagtaacgaagcggggcgc

SEQ ID NO: 431406 - DNA, 4748 bp, Homo sapiens
gtgagccatgatcgtgccactgcactccagtctgggcaacagtgatcccatctgaaaaaaaaaaacaaaaaaaaaaatgcaatttagggccaggtggggtggctcacgcctataatcccagcactttgggaggccagggcagggggatcgcctgaggtcagcagtttgagaccaggctggccaacatggtgaaaacccctctctactaaaagtataaaaattagccgggcatggtggtgtgtgcctgtagtcccagctattcgggaagctgaggcaggagaatcgcttgaacccgggaggaggttgcagtgagcagaaatcgagccactgcactccagcctggggggcagagggagactctgtctcagaaaaaaaaaaaaaatgcaatttagttctctaggcttttccatttaatagttttatatcctcctgtttctaaatctggatgacagtgtaacactccagtaaggtgaattgtgaattgctgaaattcttcagatgtttaaaagagttttcagtattcctcatgttagaattaatgcagagaaaaattatatcctttgaactagttacatgttgtggacttctggcctgaggctcttggggattatgtgacatattgggaagggacacatttctgctctgtggctgttactagaaatctagccagcaaatcagactacgtttgtgagaagacaggaaggcacagattagggttgagccagccttcaacaggtttggctggcagtagacacagtggagcacatcttaactattttggtaggtcctgggtttctcttggtagtttttgatagaaaggggaatggtgtgaggaaaaagtgggcatacatttcacctttccactgataaggcaggtggaattgggatagtcagtggatgggccaatagctggtggctgtgagaagaataaggatttccatactggtgtgtcatatttacagataggttgtgacctaaaaagttttttaaaaaacagcagttagggcctgggcgcggtggctcacgcctgtaatcccagcactttgggaggccgaggcgggcggatcacaaggtcaggagatcgagaccatcctggctaacaacggtgaaaccctgtctctactaaaaatacaaaaaattggccgggcgtggtggcgggtgcctgtagtcccagctactcgggaggctgaggcaagagaatggcgtgaactcgggaggtggagcttgcagtgagctgagatcatgccactgcactccagcctgggcgacagagtgagactccttctaaaaaacaaaaacaaaaccaaaacagtagttagggtacacacacacaaattctagtgattttccccccaatactacccttgacttttgaaattcttgctttctcagagtttacaacatccttaccaaacagccttctccctccttaccacaaaaaaagaaaaaaaagttctggggttgaggggacactccattcttaacatcctctattatcccagcccaattccccagctctcactgggactagttgtacctatcttcatcatttggtcccagcatgactacctgttggtgcatgagctgatctctcctaacctaacagccagatgctagtctctggtactcagatgctgggctgcatcagataggatgcacaggatcatcctggaagcttgttgacatagattcctgtgcaacactcagatatagtcttaatgtagatttgtgttgggtggtatggtaggtagaataatggcctaccactctgaaacatatgaatatgttacctaacatgacagaagagaattaagttgctaatcagatgactgtaaaataaattatcctggatcatctggatgggcctaatgtaatcacaaaggttgtttccttgccttttccagcttggctctggctcccttcctccagcaagggtgggttgagctctcacatggcaccactttgacctcttctgcttccctcttctacactgaaagacttatgggccaggagcagtggctcgcacctgcaatcccagcactttgggaggccgaggaaggcagatcgcttggccccaggagttcaaaaccgtcctgggcaacgtggcgaaaccccatctagaaagaaaagaagagaaggggaggggggaggggaggaggagttacatatatacacatacacacacacacacacgtacgtacatacatacatacacgctaactggacgtggtggtgcgtgcctgtagtcttagctttccaggagactgaggtgggaggaccacttgagcctgagatcgcgccagcctgggtgacagtcagaccatgtctcaaaaaaaaaaaaagatttgtgattaggattcttagtcctcacctgtattattttcctattgctactgtaacaaattaccacaaatttactggcttgagacgacgcaagtctgtaggtcagaagtctgacacgggtcttaactggtgacccgagtcagatttgggacacaaagaacagaaaccaagctgtgcaggtttctgacaggcagtccggttagggagccctacagcaacccgccggtcctctctctcaggcagttgctgccatggctcattattccaaccggttctcctcagcccagtctatctcagtggctccattcatagggtgatgtgcccggcgggacactaaccctaaccaagcagagagacggtcatgcccgtcacgacctcggccctcgccccggccgaggcttctcctgcaggtcgcgagaatcaggtgcgtcagcggcgtccgggaacgccggaagagccagtggagcggctctgtagtccaaagtaccccgtcgaccccagcacggccgctccaccgcctcctactagacccagtcctagggactgcgcagtcgcagagctccgtccgagtaccggaagcctaggcgccagcacttccgggaagtgacttcgtctccgaagccgattggttgttgctttgctcccgctcgcgtcggtggcgtttttcctgcagcgcgtgcgtgctgcgctactgagcagcgccatggaggactctgaagcactgggcttcgaacacatgggcctcgatccccggctccttcaggctgtcaccgatctgggctggtcgcgacctacgctgatccaggagaaggccatcccactggccctagaagggaaggacctcctggctcgggcccgcacgggctccgggaagacggccgcttatgctattccgatgctgcagctgttgctccataggaaggcgacaggtccggtggtagaacaggcagtgagaggccttgttcttgttcctaccaaggagctggcacggcaagcacagtccatgattcagcagctggctacctactgtgctcgggatgtccgagtggccaatgtctcagctgctgaagactcagtctctcagagagctgtgctgatggagaagccagatgtggtagtagggaccccatctcgcatattaagccacttgcagcaagacagcctgaaacttcgtgactccctggagcttttggtggtggacgaagctgaccttcttttttcctttggctttgaagaagagctcaagagtctcctctgtcacttgccccggatttaccaggcttttctcatgtcagctacttttaacgaggacgtacaagcactcaaggagctgatattacataacccggttacccttaagttacaggagtcccagctgcctgggccagaccagttacagcagtttcaggtggtctgtgagactgaggaagacaaattcctcctgctgtatgccctgctcaagctgtcattgattcggggcaagtctctgctctttgtcaacactctagaacggagttaccggctacgcctgttcttggaacagttcagcatccccacctgtgtgctcaatggagagcttccactgcgctccaggtgccacatcatctcacagttcaaccaaggcttctacgactgtgtcatagcaactgatgctgaagtcctgggggccccagtcaagggcaagcgtcggggccgagggcccaaaggggacaaggcctctgatccggaagcaggtgtggcccggggcatagacttccaccatgtgtctgctgtgctcaactttgatcttcccccaacccctgaggcctacatccatcgagctggcaggacagcacgcgctaacaacccaggcatagtcttaacctttgtgcttcccacggagcagttccacttaggcaagattgaaggagatcaaggaagagcttctgcattctgagaagcttaagacatactttgaagacaaccctagggacctccagctgctgcggcatgacctacctttgcaccccgcagtggtgaagccccacctgggccatgttcctgactacctggttcctcctgctctccgtggcctggtacgccctcacaagaagcggaagaagctgtcttcctcttgtaggaaggccaagagagcaaagtcccagaacccactgcgcagcttcaagcacaaaggaaagaaattcagacccacagccaagccctcctgaggttgttgggcctctctggagctgagcacattgtggagcacaggcttacacccttcgtggacaggcgaggctctggtgcttactgcacagcctgaacagacagttctggggccggcagtgctgggccctttagctccttggcacttccaagctggcatcttgccccttgacaacagaataaaaattttagctgcccca

SEQ ID NO: 431407 - DNA, 4590 bp, Homo sapiens
gtgagccatgatcgtgccactgcactccagtctgggcaacagtgatcccatctgaaaaaaaaaaacaaaaaaaaaaatgcaatttagggccaggtggggtggctcacgcctataatcccagcactttgggaggccagggcagggggatcgcctgaggtcagcagtttgagaccaggctggccaacatggtgaaaacccctctctactaaaagtataaaaattagccgggcatggtggtgtgtgcctgtagtcccagctattcgggaagctgaggcaggagaatcgcttgaacccgggaggaggttgcagtgagcagaaatcgagccactgcactccagcctggggggcagagggagactctgtctcagaaaaaaaaaaaaaatgcaatttagttctctaggcttttccatttaatagttttatatcctcctgtttctaaatctggatgacagtgtaacactccagtaaggtgaattgtgaattgctgaaattcttcagatgtttaaaagagttttcagtattcctcatgttagaattaatgcagagaaaaattatatcctttgaactagttacatgttgtggacttctggcctgaggctcttggggattatgtgacatattgggaagggacacatttctgctctgtggctgttactagaaatctagccagcaaatcagactacgtttgtgagaagacaggaaggcacagattagggttgagccagccttcaacaggtttggctggcagtagacacagtggagcacatcttaactattttggtaggtcctgggtttctcttggtagtttttgatagaaaggggaatggtgtgaggaaaaagtgggcatacatttcacctttccactgataaggcaggtggaattgggatagtcagtggatgggccaatagctggtggctgtgagaagaataaggatttccatactggtgtgtcatatttacagataggttgtgacctaaaaagttttttaaaaaacagcagttagggcctgggcgcggtggctcacgcctgtaatcccagcactttgggaggccgaggcgggcggatcacaaggtcaggagatcgagaccatcctggctaacaacggtgaaaccctgtctctactaaaaatacaaaaaattggccgggcgtggtggcgggtgcctgtagtcccagctactcgggaggctgaggcaagagaatggcgtgaactcgggaggtggagcttgcagtgagctgagatcatgccactgcactccagcctgggcgacagagtgagactccttctaaaaaacaaaaacaaaaccaaaacagtagttagggtacacacacacaaattctagtgattttccccccaatactacccttgacttttgaaattcttgctttctcagagtttacaacatccttaccaaacagccttctccctccttaccacaaaaaaagaaaaaaaagttctggggttgaggggacactccattcttaacatcctctattatcccagcccaattccccagctctcactgggactagttgtacctatcttcatcatttggtcccagcatgactacctgttggtgcatgagctgatctctcctaacctaacagccagatgctagtctctggtactcagatgctgggctgcatcagataggatgcacaggatcatcctggaagcttgttgacatagattcctgtgcaacactcagatatagtcttaatgtagatttgtgttgggtggtatggtaggtagaataatggcctaccactctgaaacatatgaatatgttacctaacatgacagaagagaattaagttgctaatcagatgactgtaaaataaattatcctggatcatctggatgggcctaatgtaatcacaaaggttgtttccttgccttttccagcttggctctggctcccttcctccagcaagggtgggttgagctctcacatggcaccactttgacctcttctgcttccctcttctacactgaaagacttatgggccaggagcagtggctcgcacctgcaatcccagcactttgggaggccgaggaaggcagatcgcttggccccaggagttcaaaaccgtcctgggcaacgtggcgaaaccccatctagaaagaaaagaagagaaggggaggggggaggggaggaggagttacatatatacacatacacacacacacacacgtacgtacatacatacatacacgctaactggacgtggtggtgcgtgcctgtagtcttagctttccaggagactgaggtgggaggaccacttgagcctgagatcgcgccagcctgggtgacagtcagaccatgtctcaaaaaaaaaaaaagatttgtgattaggattcttagtcctcacctgtattattttcctattgctactgtaacaaattaccacaaatttactggcttgagacgacgcaagtctgtaggtcagaagtctgacacgggtcttaactggtgacccgagtcagatttgggacacaaagaacagaaaccaagctgtgcaggtttctgacaggcagtccggttagggagccctacagcaacccgccggtcctctctctcaggcagttgctgccatggctcattattccaaccggttctcctcagcccagtctatctcagtggctccattcatagggtgatgtgcccggcgggacactaaccctaaccaagcagagagacggtcatgcccgtcacgacctcggccctcgccccggccgaggcttctcctgcaggtcgcgagaatcaggtgcgtcagcggcgtccgggaacgccggaagagccagtggagcggctctgtagtccaaagtaccccgtcgaccccagcacggccgctccaccgcctcctactagacccagtcctagggactgcgcagtcgcagagctccgtccgagtaccggaagcctaggcgccagcacttccgggaagtgacttcgtctccgaagccgattggttgttgctttgctcccgctcgcgtcggtggcgtttttcctgcagcgcgtgcgtgctgcgctactgagcagcgccatggaggactctgaagcactgggcttcgaacacatgggcctcgatccccggctccttcaggctgtcaccgatctgggctggtcgcgacctacgctgatccaggagaaggccatcccactggccctagaagggaaggacctcctggctcgggcccgcacgggctccgggaagacggccgcttatgctattccgatgctgcagctgttgctccataggaaggcgacaggtccggtggtagaacaggcagtgagaggccttgttcttgttcctaccaaggagctggcacggcaagcacagtccatgattcagcagctggctacctactgtgctcgggatgtccgagtggccaatgtctcagctgctgaagactcagtctctcagagagctgtgctgatggagaagccagatgtggtagtagggaccccatctcgcatattaagccacttgcagcaagacagcctgaaacttcgtgactccctggagcttttggtggtggacgaagctgaccttcttttttcctttggctttgaagaagagctcaagagtctcctctgtcacttgccccggatttaccaggcttttctcatgtcagctacttttaacgaggacgtacaagcactcaaggagctgatattacataacccggttacccttaagttacaggagtcccagctgcctgggccagaccagttacagcagtttcaggtggtctgtgagactgaggaagacaaattcctcctgctgtatgccctgctcaagctgtcattgattcggggcaagtctctgctctttgtcaacactctagaacggagttaccggctacgcctgttcttggaacagttcagcatccccacctgtgtgctcaatggagagcttccactgcgctccaggtgccacatcatctcacagttcaaccaagacttccaccatgtgtctgctgtgctcaactttgatcttcccccaacccctgaggcctacatccatcgagctggcaggatgccatgcgctcagtgactaagcaggccattcgggaggcaagattgaaggagatcaaggaagagcttctgcattctgagaagcttaagacatactttgaagacaaccctagggacctccagctgctgcggcatgacctacctttgcaccccgcagtggtgaagccccacctgggccatgttcctgactacctggttcctcctgctctccgtggcctggtacgccctcacaagaagcggaagaagctgtcttcctcttgtaggaaggccaagagagcaaagtcccagaacccactgcgcagcttcaagcacaaaggaaagaaattcagacccacagccaagccctcctgaggttgttgggcctctctggagctgagcacattgtggagcacaggcttacacccttcgtggacaggcgaggctctggtgcttactgcacagcctgaacagacagttctggggccggcagtgctgggccctttagctccttggcacttccaagctggcatcttgccccttgacaacagaataaaaattttagctgcccca

SEQ ID NO: 431408 - DNA, 4429 bp, Homo sapiens
gtgagccatgatcgtgccactgcactccagtctgggcaacagtgatcccatctgaaaaaaaaaaacaaaaaaaaaaatgcaatttagggccaggtggggtggctcacgcctataatcccagcactttgggaggccagggcagggggatcgcctgaggtcagcagtttgagaccaggctggccaacatggtgaaaacccctctctactaaaagtataaaaattagccgggcatggtggtgtgtgcctgtagtcccagctattcgggaagctgaggcaggagaatcgcttgaacccgggaggaggttgcagtgagcagaaatcgagccactgcactccagcctggggggcagagggagactctgtctcagaaaaaaaaaaaaaatgcaatttagttctctaggcttttccatttaatagttttatatcctcctgtttctaaatctggatgacagtgtaacactccagtaaggtgaattgtgaattgctgaaattcttcagatgtttaaaagagttttcagtattcctcatgttagaattaatgcagagaaaaattatatcctttgaactagttacatgttgtggacttctggcctgaggctcttggggattatgtgacatattgggaagggacacatttctgctctgtggctgttactagaaatctagccagcaaatcagactacgtttgtgagaagacaggaaggcacagattagggttgagccagccttcaacaggtttggctggcagtagacacagtggagcacatcttaactattttggtaggtcctgggtttctcttggtagtttttgatagaaaggggaatggtgtgaggaaaaagtgggcatacatttcacctttccactgataaggcaggtggaattgggatagtcagtggatgggccaatagctggtggctgtgagaagaataaggatttccatactggtgtgtcatatttacagataggttgtgacctaaaaagttttttaaaaaacagcagttagggcctgggcgcggtggctcacgcctgtaatcccagcactttgggaggccgaggcgggcggatcacaaggtcaggagatcgagaccatcctggctaacaacggtgaaaccctgtctctactaaaaatacaaaaaattggccgggcgtggtggcgggtgcctgtagtcccagctactcgggaggctgaggcaagagaatggcgtgaactcgggaggtggagcttgcagtgagctgagatcatgccactgcactccagcctgggcgacagagtgagactccttctaaaaaacaaaaacaaaaccaaaacagtagttagggtacacacacacaaattctagtgattttccccccaatactacccttgacttttgaaattcttgctttctcagagtttacaacatccttaccaaacagccttctccctccttaccacaaaaaaagaaaaaaaagttctggggttgaggggacactccattcttaacatcctctattatcccagcccaattccccagctctcactgggactagttgtacctatcttcatcatttggtcccagcatgactacctgttggtgcatgagctgatctctcctaacctaacagccagatgctagtctctggtactcagatgctgggctgcatcagataggatgcacaggatcatcctggaagcttgttgacatagattcctgtgcaacactcagatatagtcttaatgtagatttgtgttgggtggtatggtaggtagaataatggcctaccactctgaaacatatgaatatgttacctaacatgacagaagagaattaagttgctaatcagatgactgtaaaataaattatcctggatcatctggatgggcctaatgtaatcacaaaggttgtttccttgccttttccagcttggctctggctcccttcctccagcaagggtgggttgagctctcacatggcaccactttgacctcttctgcttccctcttctacactgaaagacttatgggccaggagcagtggctcgcacctgcaatcccagcactttgggaggccgaggaaggcagatcgcttggccccaggagttcaaaaccgtcctgggcaacgtggcgaaaccccatctagaaagaaaagaagagaaggggaggggggaggggaggaggagttacatatatacacatacacacacacacacacgtacgtacatacatacatacacgctaactggacgtggtggtgcgtgcctgtagtcttagctttccaggagactgaggtgggaggaccacttgagcctgagatcgcgccagcctgggtgacagtcagaccatgtctcaaaaaaaaaaaaagatttgtgattaggattcttagtcctcacctgtattattttcctattgctactgtaacaaattaccacaaatttactggcttgagacgacgcaagtctgtaggtcagaagtctgacacgggtcttaactggtgacccgagtcagatttgggacacaaagaacagaaaccaagctgtgcaggtttctgacaggcagtccggttagggagccctacagcaacccgccggtcctctctctcaggcagttgctgccatggctcattattccaaccggttctcctcagcccagtctatctcagtggctccattcatagggtgatgtgcccggcgggacactaaccctaaccaagcagagagacggtcatgcccgtcacgacctcggccctcgccccggccgaggcttctcctgcaggtcgcgagaatcaggtgcgtcagcggcgtccgggaacgccggaagagccagtggagcggctctgtagtccaaagtaccccgtcgaccccagcacggccgctccaccgcctcctactagacccagtcctagggactgcgcagtcgcagagctccgtccgagtaccggaagcctaggcgccagcacttccgggaagtgacttcgtctccgaagccgattggttgttgctttgctcccgctcgcgtcggtggcgtttttcctgcagcgcgtgcgtgctgcgctactgagcagcgccatggaggactctgaagcactgggcttcgaacacatgggcctcgatccccggctccttcaggctgtcaccgatctgggctggtcgcgacctacgctgatccaggagaaggccatcccactggccctagaagggaaggacctcctggctcgggcccgcacgggctccgggaagacggccgcttatgctattccgatgctgcagctgttgctccataggaaggcgacaggtccggtggtagaacaggcagtgagaggccttgttcttgttcctaccaaggagctggcacggcaagcacagtccatgattcagcagctggctacctactgtgctcgggatgtccgagtggccaatgtctcagctgctgaagactcagtctctcagagagctgtgctgatggagaagccagatgtggtagtagggaccccatctcgcatattaagccacttgcagcaagacagcctgaaacttcgtgactccctggagcttttggtggtggacgaagctgaccttcttttttcctttggctttgaagaagagctcaagagtctcctctgtcacttgccccggatttaccaggcttttctcatgtcagctacttttaacgaggacgtacaagcactcaaggagctgatattacataacccggttacccttaagttacaggagtcccagctgcctgggccagaccagttacagcagtttcaggtggtctgtgagactgaggaagacaaattcctcctgctgtatgccctgctcaagctgtcattgattcggggcaagtctctgctctttgtcaacactctagaacggagttaccggctacgcctgttcttggaacagttcagcatccccacctgtgtgctcaatggagagcttccactgcgctccaggtgccacatcatctcacagttcaaccaaggcttctacgactgtgtcatagcaactgatgctgaagtcctgggggccccagtcaagggcaagcgtcggggccgagggcccaaaggggacaaggcctctgatccggaagcaggtgtggcccggggcatagacttccaccatgtgtctgctgtgctcaactttgatcttcccccaacccctgaggcctacatccatcgagctggcagtagtgtgacggcccaggcatctgcatggtaggcacactgagggacttggggtgtgctggacagagcctgcgggttggagatgcaagctgcactgtcttcccttgcaggacagcacgcgctaacaacccaggcatagtcttaacctttgtgcttcccacggagcagttccacttaggcaagattgaggagcttctcagtggaggtaagagcctggctcttgtggtcctgggccagggtcaggcttcttccacaatgcttt

SEQ ID NO: 431409 - DNA, 2283 bp, Homo sapiens
gcgcttaggggctgaggcgcgatggcaggtgtcggggctgggcctctgcgggcgatggggcggcaggccctgctgcttctcgcgctgtgcgccacaggcgcccaggggctctacttccacatcggcgagaccgagaagcgctgtttcatcgaggaaatccccgacgagaccatggtcatcggcaactatcgtacccagatgtgggataagcagaaggaggtcttcctgccctcgacccctggcctgggcatgcacgtggaagtgaaggaccccgacggcaaggtggtgctgtcccggcagtacggctcggagggccgcttcacgttcacctcccacacgcccggtgaccatcaaatctgtctgcactccaattctaccaggatggctctcttcgctggtggcaaactgcgtgtgcatctcgacatccaggttggggagcatgccaacaactaccctgagattgctgcaaaagataagctgacggagctacagctccgcgcccgccagttgcttgatcaggtggaacagattcagaaggagcaggattaccaaaggtatcgtgaagagcgcttccgactgacgagcgagagcaccaaccagagggtcctatggtggtccattgctcagactgtcatcctcatcctcactggcatctggcagatgcgtcacctcaagagcttctttgaggccaagaagctggtgtagtgccctctttgtatgacccttcctttttacctcatttatttggtactttccccacacagtcctttatccacctggatttttagggaaaaaaatgaaaaagaataagtcacattggttccatggccacaaaccattcagatcagccacttgctgaccctggttcttaaggacacatgacattagtccaatctttcaaaatcttgtcttagggcttgtgaggaatcagaactaacccaggactcagtcctgcttcttttgcctcgagtgattttcctctgtttttcactaaataagcaaatgaaaactctctccattaccttctgctttctctttgtccacttacgcagtaggtgactggcatgtgccacagagcaggccctgcctcactgtctgctggtcagttctgggttcacttaatggctttgtgaatgtaaataaggggcaggtcttggccctagaggattgagatgtttttctatatcttagaactatttttggataaattatatattttccttcctagtagaagtgttactgcctgtaactagctcaaaataccaatgcagtttctgcattctgggttttgtttttcctttttttttttttttttgagttttgctcttgtcgcccaggctggagtgcaatggcgtgatctcagctcactggcaacatctgcctcccgggttcaaatgattctcctgcctcagtctcctgagtagctgggattacaggtgcccgccaccacgctcagctaatttttgtatttttagtagagatggggttttaccatgttggccaggctggtcttagactcctgacctcagttgatccacctgcctcagcctctgcattcagtttattcacatatttttggtaactcccatggcagctcctaggatttcagcggtctgtgggccagaaagcaggcaccagggctgacctcaaggccgtatcagagggccaagcagagttcttttggatacctgcttttcatcccacagggccttagagtcagaggtaaggtagcaacagagctagaatggggcaatgcactcttaccctccttctcaacttttatttaagctgtgctaaatgttttcttcaagggaaccagatttagttctttacagaattttccagtgaaataaaacatgttgtaatagctgtgtttgagatgaaataagaggttgtgggtagaggggaggcacctaaaggaaaagaggaaaggtgcctgggctacctatgcagataacctggagtggacttcactgtggactcgtggtactaaggcttggcctggacaggcagtctagggggtatgggaatacacggtgtggttgttcaactatttgcaaaggtcaaccaaatagaccacatgttcgcaaagtatcatctgaggaaattaagtaccttcttagccctctcagtcataaatttgaacaaattttaatacacttccctcatgcccttctatataaaacttaataccattagttccccattcttgacattttatttcagtttttattatatatttatttgaaatatttattaaattatctgacctacagaactaaa

SEQ ID NO: 431410 - DNA, 2507 bp, Homo sapiens
gcgcttaggggctgaggcgcgatggcaggtgtcggggctgggcctctgcgggcgatggggcggcaggccctgctgcttctcgcgctgtgcgccacaggcgcccaggggctctacttccacatcggcgagaccgagaagcgctgtttcatcgaggaaatccccgacgagaccatggtcatcggcaactatcgtacccagatgtgggataagcagaaggaggtcttcctgccctcgacccctggcctgggcatgcacgtggaagtgaaggaccccgacggcaaggtggtgctgtcccggcagtacggctcggagggccgcttcacgttcacctcccacacgcccggtgaccatcaaatctgtctgcactccaattctaccaggatggctctcttcgctggtggcaaactgcgtgtgcatctcgacatccaggttggggagcatgccaacaactaccctgagattgctgcaaaagataagctgacggagctacagctccgcgcccgccagttgcttgatcaggtggaacagattcagaaggagcaggattaccaaaggtatcgtgaagagcgcttccgactgacgagcgagagcaccaaccagagggtcctatggtggtccattgctcagactgtcatcctcatcctcactggcatctggcagatgcgtcacctcaagagcttctttgaggccaagaagctggtgtagtgccctctttgtatgacccttcctttttacctcatttatttggtactttccccacacagtcctttatccacctggatttttagggaaaaaaatgaaaaagaataagtcacattggttccatggccacaaaccattcagatcagccacttgctgaccctggttcttaaggacacatgacattagtccaatctttcaaaatcttgtcttagggcttgtgaggaatcagaactaacccaggactcagtcctgcttcttttgcctcgagtgattttcctctgtttttcactaaataagcaaatgaaaactctctccattaccttctgctttctctttgtccacttacgcagtaggtgactggcatgtgccacagagcaggccctgcctcactgtctgctggtcagttctgggttcacttaatggctttgtgaatgtaaataaggggcaggtcttggccctagaggattgagatgtttttctatatcttagaactatttttggataaattatatattttccttcctagtagaagtgttactgcctgtaactagctcaaaataccaatgcagtttctgcattctgggttttgtttttcctttttttttttttttttgagttttgctcttgtcgcccaggctggagtgcaatggcgtgatctcagctcactggcaacatctgcctcccgggttcaaatgattctcctgcctcagtctcctgagtagctgggattacaggtgcccgccaccacgctcagctaatttttgtatttttagtagagatggggttttaccatgttggccaggctggtcttagactcctgacctcagttgatccacctgcctcagcctctgcattcagtttattcacatatttttggtaactcccatggcagctcctaggatttcagcggtctgtgggccagaaagcaggcaccagggctgacctcaaggccgtatcagagggccaagcagagttcttttggatacctgcttttcatcccacagggccttagagtcagaggtaaggtagcaacagagctagaatggggcaatgcactcttaccctccttctcaacttttatttaagctgtgctaaatgttttcttcaagggaaccagatttagttctttacagaattttccagtgaaataaaacatgttgtaatagctgtgtttgagatgaaataagaggttgtgggtagaggggaggcacctaaaggaaaagaggaaaggtgcctgggctacctatgcagataacctggagtggacttcactgtggactcgtggtactaaggcttggcctggacaggcagtctagggggtatgggaatacacggtgtggttgttcaactatttgcaaaggtcaaccaaatagaccacatgttcgcaaagtatcatctgaggaaattaagtaccttcttagccctctcagtcataaatttgaacaaattttaatacacttccctcatgcccttctatataaaacttaataccattagttccccattcttgacattttatttcagtttttattatatatttatttgaaatatttattaaattatctgacctacagaactaaattcttctccttttgttatttcttatgtcctataccatatatgtacctatttatatatatatttatgtatttttaaaatttttatttattttattttttgagacagtcttgctctgtcgcccaggctggagtgcagtggcatgatcttggctcactgcaacctctgcctcccgggttcaagcagttctgcctcaacttctgagtagctgggattacagacaccca

SEQ ID NO: 431411 - DNA, 1828 bp, Homo sapiens
gcgcttaggggctgaggcgcgatggcaggtgtcggggctgggcctctgcgggcgatggggcggcaggccctgctgcttctcgcgctgtgcgccacaggcgcccaggggctctacttccacatcggcgagaccgagaagcgctgtttcatcgaggaaatccccgacgagaccatggtcatcggcaactatcgtacccagatgtgggataagcagaaggaggtcttcctgccctcgacccctggcctgggcatgcacgtggaagtgaaggaccccgacggcaaggtggtgctgtcccggcagtacggctcggagggccgcttcacgttcacctcccacacgcccggtgaccatcaaatctgtctgcactccaattctaccaggatggctctcttcgctggtggcaaactgcgtgtgcatctcgacatccaggttggggagcatgccaacaactaccctgagattgctgcaaaagataagctgacggagctacagctccgcgcccgccagttgcttgatcaggtggaacagattcagaaggagcaggattaccaaaggtatcgtgaagagcgcttccgactgacgagcgagagcaccaaccagagggtcctatggtggtccattgctcagactgtcatcctcatcctcactggcatctggcagatgcgtcacctcaagagcttctttgaggccaagaagctggtgtagtgccctctttgtatgacccttcctttttacctcatttatttggtactttccccacacagtcctttatccacctggatttttagggaaaaaaatgaaaaagaataagtcacattggttccatggccacaaaccattcagatcagccacttgctgaccctggttcttaaggacacatgacattagtccaatctttcaaaatcttgtcttagggcttgtgaggaatcagaactaacccaggactcagtcctgcttcttttgcctcgagtgattttcctctgtttttcactaaataagcaaatgaaaactctctccattaccttctgctttctctttgtccacttacgcagtaggtgactggcatgtgccacagagcaggccctgcctcactgtctgctggtcatttattcacatatttttggtaactcccatggcagctcctaggatttcagcggtctgtgggccagaaagcaggcaccagggctgacctcaaggccgtatcagagggccaagcagagttcttttggatacctgcttttcatcccacagggccttagagtcagaggtaaggtagcaacagagctagaatggggcaatgcactcttaccctccttctcaacttttatttaagctgtgctaaatgttttcttcaagggaaccagatttagttctttacagaattttccagtgaaataaaacatgttgtaatagctgtgtttgagatgaaataagaggttgtgggtagaggggaggcacctaaaggaaaagaggaaaggtgcctgggctacctatgcagataacctggagtggacttcactgtggactcgtggtactaaggcttggcctggacaggcagtctagggggtatgggaatacacggtgtggttgttcaactatttgcaaaggtcaaccaaatagaccacatgttcgcaaagtatcatctgaggaaattaagtaccttcttagccctctcagtcataaatttgaacaaattttaatacacttccctcatgcccttctatataaaacttaataccattagttccccattcttgacattttatttcagtttttattatatatttatttgaaatatttattaaattatctgacctacagaactaaa

SEQ ID NO: 431412 - DNA, 1867 bp, Homo sapiens
gcgcttaggggctgaggcgcgatggcaggtgtcggggctgggcctctgcgggcgatggggcggcaggccctgctgcttctcgcgctgtgcgccacaggcgcccaggggctctacttccacatcggcgagaccgagaagcgctgtttcatcgaggaaatccccgacgagaccatggtcatcggcaactatcgtacccagatgtgggataagcagaaggaggtcttcctgccctcgacccctggcctgggcatgcacgtggaagtgaaggaccccgacggcaaggtggtgctgtcccggcagtacggctcggagggccgcttcacgttcacctcccacacgcccggtgaccatcaaatctgtctgcactccaattctaccaggatggctctcttcgctggtggcaaactgcgtgtgcatctcgacatccaggttggggagcatgccaacaactaccctgagattgctgcaaaagataagctgacggagctacagctccgcgcccgccagttgcttgatcaggtggaacagattcagaaggagcaggattaccaaaggtatcgtgaagagcgcttccgactgacgagcgagagcaccaaccagagggtcctatggtggtccattgctcagactgtcatcctcatcctcactggcatctggcagatgcgtcacctcaagagcttctttgaggccaagaagctggtgtagtgccctctttgtatgacccttcctttttacctcatttatttggtactttccccacacagtcctttatccacctggatttttagggaaaaaaatgaaaaagaataagtcacattggttccatggccacaaaccattcagatcagccacttgctgaccctggttcttaaggacacatgacattagtccaatctttcaaaatcttgtcttagggcttgtgaggaatcagaactaacccaggactcagtcctgcttcttttgcctcgagtgattttcctctgtttttcactaaataagcaaatgaaaactctctccattaccttctgctttctctttgtccacttacgcagtaggtgactggcatgtgccacagagcaggccctgcctcactgtctgctggtcagttctgggttcacttaatggctttgtgaatgtaaataaggggcaggtcttggccctagaggattgagatgtttttctatatcttagaactatttttggataaattatatattttccttcctagtagaagtgttactgcctgtaactagctcaaaataccaatgcagtttctgcattctgggttttgtttttcctttttttttttttttttgagttttgctcttgtcgcccaggctggagtgcaatggcgtgatctcagctcactggcaacatctgcctcccgggttcaaatgattctcctgcctcagtctcctgagtagctgggattacaggtgcccgccaccacgctcagctaatttttgtatttttagtagagatggggttttaccatgttggccaggctggtcttagactcctgacctcagttgatccacctgcctcagcctctgcattcagtttattcacatatttttggtaactcccatggcagctcctaggatttcagcggtctgtgggccagaaagcaggcaccagggctgacctcaaggccgtatcagagggccaagcagagttcttttggatacctgcttttcatcccacagggccttagagtcagaggtaaggtagcaacagagctagaatggggcaatgcactcttaccctccttctcaacttttatttaagctgtgctaaatgttttcttcaagggaaccagatttagttctttacagaattttccagtgaaataaaacatgttgtaata

SEQ ID NO: 431413 - DNA, 2320 bp, Homo sapiens
gcgcttaggggctgaggcgcgatggcaggtgtcggggctgggcctctgcgggcgatggggcggcaggccctgctgcttctcgcgctgtgcgccacaggcgcccaggggctctacttccacatcggcgagaccgagaagcgctgtttcatcgaggaaatccccgacgagaccatggtcatcggcaactatcgtacccagatgtgggataagcagaaggaggtcttcctgccctcgacccctggcctgggcatgcacgtggaagtgaaggaccccgacggcaaggtggtgctgtcccggcagtacggctcggagggccgcttcacgttcacctcccacacgcccggtgaccatcaaatctgtctgcactccaattctaccaggatggctctcttcgctggtggcaaactgcgtgtgcatctcgacatccaggttggggagcatgccaacaactaccctgagattgctgcaaaagataagctgacggagctacagctccgcgcccgccagttgcttgatcaggtggaacagattcagaaggagcaggattaccaaaggtatcgtgaagagcgcttccgactgacgagcgagagcaccaaccagagggtcctatggtggtccattgctcagactgtcatcctcatcctcactggcatctggcagatgcgtcacctcaagagcttctttgaggccaagaagctggtgtagtgccctctttgtatgacccttcctttttacctcatttatttggtactttccccacacagtcctttatccacctggatttttagggaaaaaaatgaaaaagaataagtcacattggttccatggccacaaaccattcagatcagccacttgctgaccctggttcttaaggacacatgacattagtccaatctttcaaaatcttgtcttagggcttgtgaggaatcagaactaacccaggactcagtcctgcttcttttgcctcgagtgattttcctctgtttttcactaaataagcaaatgaaaactctctccattaccttctgctttctctttgtccacttacgcagtaggtgactggcatgtgccacagagcaggccctgcctcactgtctgctggtcagttctgggttcacttaatggctttgtgaatgtaaataaggggcaggtcttggccctagaggattgagatgtttttctatatcttagaactatttttggataaattatatattttccttcctagtagaagtgttactgcctgtaactagctcaaaataccaatgcagtttctgcattctgggttttgtttttcctttttttttttttttttgagttttgctcttgtcgcccaggctggagtgcaatggcgtgatctcagctcactggcaacatctgcctcccgggttcaaatgattctcctgcctcagtctcctgagtagctgggattacaggtgcccgccaccacgctcagctaatttttgtatttttagtagagatggggttttaccatgttggccaggctggtcttagactcctgacctcagttgatccacctgcctcagcctctgcattcagtttattcacatatttttggtaactcccatggcagctcctaggatttcagcggtctgtgggccagaaagcaggcaccagggctgacctcaaggccgtatcagagggccaagcagagttcttttggatacctgcttttcatcccacagggccttagagtcagaggtaaggtagcaacagagctagaatggggcaatgcactcttaccctccttctcaacttttatttaagctgtgctaaatgttttcttcaagggaaccagatttagttctttacagaattttccagtgaaataaaacatgttgtaataaaaaaaaaaaaaaacaaaaaaaaaacaaaaaaaaaacaaaaaaaaaaaacaaaaaaaaaaaaaaaaaaacaaaacaaaaaacgacgggcggcgccccccccaaaaaaccccccgggggagccccaaccaccaccactctttttaacaaggggccccccacaagggcaacaaaaaacggcgggcgcgccaaacacgggcagaggacaaacacaacgcgtctcgagagctattcggcggaagaacaccacccttcggggcgccggcggaccatggggggcacaaccaccccgccagaatatgggggccgagggaaacaacaccgcgggttactgggggcaacacccgcgtatcgtcggcgcaaattctctcgttttttcttatacgcggcgtacaaacgacaaaagccagcacgccgcgcgcaacaaggacggaccacacacacacgcagacggc

SEQ ID NO: 431414 - DNA, 1543 bp, Homo sapiens
gcgcttaggggctgaggcgcgatggcaggtgtcggggctgggcctctgcgggcgatggggcggcaggccctgctgcttctcgcgctgtgcgccacaggcgcccaggggctctacttccacatcggcgagaccgagaagcgctgtttcatcgaggaaatccccgacgagaccatggtcatcggcaactatcgtacccagatgtgggataagcagaaggaggtcttcctgccctcgacccctggcctgggcatgcacgtggaagtgaaggaccccgacggcaaggtggtgctgtcccggcagtacggctcggagggccgcttcacgttcacctcccacacgcccggtgaccatcaaatctgtctgcactccaattctaccaggatggctctcttcgctggtggcaaactgcgtgtgcatctcgacatccaggttggggagcatgccaacaactaccctgagattgctgcaaaagataagctgacggagctacagctccgcgcccgccagttgcttgatcaggtggaacagattcagaaggagcaggattaccaaaggtatcgtgaagagcgcttccgactgacgagcgagagcaccaaccagagggtcctatggtggtccattgctcagactgtcatcctcatcctcactggcatctggcagatgcgtcacctcaagagcttctttgaggccaagaagctggtgtagtgccctctttgtatgacccttcctttttacctcatttatttggtactttccccacacagtcctttatccacctggatttttagggaaaaaaatgaaaaagaataagtcacattggttccatggccacaaaccattcagatcagccacttgctgaccctggttcttaaggacacatgacattagtccaatctttcaaaatcttgtcttagggcttgtgaggaatcagaactaacccaggactcagtcctgcttcttttgcctcgagtgattttcctctgtttttcactaaataagcaaatgaaaactctctccattaccttctgctttctctttgtccacttacgcagtaggtgactggcatgtgccacagagcaggccctgcctcactgtctgctggtcagttctgggttcacttaatggctttgtgaatgtaaataaggggcaggtcttggccctagaggattgagatgtttttctatatcttagaatcctgacctcagttgatccacctgcctcagcctctgcattcagtttattcacatatttttggtaactcccatggcagctcctaggatttcagcggtctgtgggccagaaagcaggcaccagggctgacctcaaggccgtatcagagggccaagcagagttcttttggatacctgcttttcatcccacagggccttagagtcagaggtaaggtagcaacagagctagaatggggcaatgcactcttaccctccttctcaacttttatttaagctgtgctaaatgttttcttcaagggaaccagatttagttctttacagaattttccagtgaaataaaacatgttgtaata

SEQ ID NO: 431415 - DNA, 1899 bp, Homo sapiens
gtccctttcttggggcagcctcagtggggagaccatagcactcctaatggagtcacagatagtattccaaaaggagtttggtcctggagttgagtaattacacgcagggagggacctcacaacagccagactgtttctcctgctcacttaaccctgtgttgccccacacagtatcgtgaagagcgcttccgactgacgagcgagagcaccaaccagagggtcctatggtggtccattgctcagactgtcatcctcatcctcactggcatctggcagatgcgtcacctcaagagcttctttgaggccaagaagctggtgtagtgccctctttgtatgacccttcctttttacctcatttatttggtactttccccacacagtcctttatccacctggatttttagggaaaaaaatgaaaaagaataagtcacattggttccatggccacaaaccattcagatcagccacttgctgaccctggttcttaaggacacatgacattagtccaatctttcaaaatcttgtcttagggcttgtgaggaatcagaactaacccaggactcagtcctgcttcttttgcctcgagtgattttcctctgtttttcactaaataagcaaatgaaaactctctccattaccttctgctttctctttgtccacttacgcagtaggtgactggcatgtgccacagagcaggccctgcctcactgtctgctggtcagttctgggttcacttaatggctttgtgaatgtaaataaggggcaggtcttggccctagaggattgagatgtttttctatatcttagaactatttttggataaattatatattttccttcctagtagaagtgttactgcctgtaactagctcaaaataccaatgcagtttctgcattctgggttttgtttttcctttttttttttttttttgagttttgctcttgtcgcccaggctggagtgcaatggcgtgatctcagctcactggcaacatctgcctcccgggttcaaatgattctcctgcctcagtctcctgagtagctgggattacaggtgcccgccaccacgctcagctaatttttgtatttttagtagagatggggttttaccatgttggccaggctggtcttagactcctgacctcagttgatccacctgcctcagcctctgcattcagtttattcacatatttttggtaactcccatggcagctcctaggatttcagcggtctgtgggccagaaagcaggcaccagggctgacctcaaggccgtatcagagggccaagcagagttcttttggatacctgcttttcatcccacagggccttagagtcagaggtaaggtagcaacagagctagaatggggcaatgcactcttaccctccttctcaacttttatttaagctgtgctaaatgttttcttcaagggaaccagatttagttctttacagaattttccagtgaaataaaacatgttgtaatagctgtgtttgagatgaaataagaggttgtgggtagaggggaggcacctaaaggaaaagaggaaaggtgcctgggctacctatgcagataacctggagtggacttcactgtggactcgtggtactaaggcttggcctggacaggcagtctagggggtatgggaatacacggtgtggttgttcaactatttgcaaaggtcaaccaaatagaccacatgttcgcaaagtatcatctgaggaaattaagtaccttcttagccctctcagtcataaatttgaacaaattttaatacacttccctcatgcccttctatataaaacttaataccattagttccccattcttgacattttatttcagtttttattatatatttatttgaaatatttattaaattatctgacctacagaactaaa

SEQ ID NO: 431416 - DNA, 1412 bp, Homo sapiens
gcgcttaggggctgaggcgcgatggcaggtgtcggggctgggcctctgcgggcgatggggcggcaggccctgctgcttctcgcgctgtgcgccacaggcgcccaggggctctacttccacatcggcgagaccgagaagcgctgtttcatcgaggaaatccccgacgagaccatggtcatcggcaactatcgtacccagatgtgggataagcagaaggaggtcttcctgccctcgacccctggcctgggcatgcacgtggaagtgaaggaccccgacggcaaggtggtgctgtcccggcagtacggctcggagggccgcttcacgttcacctcccacacgcccggtgaccatcaaatctgtctgcactccaattctaccaggatggctctcttcgctggtggcaaactgcgtgtgcatctcgacatccaggttggggagcatgccaacaactaccctgagattgctgcaaaagataagctgacggagctacagctccgcgcccgccagttgcttgatcaggtggaacagattcagaaggagcaggattaccaaaggtatcgtgaagagcgcttccgactgacgagcgagagcaccaaccagagggtcctatggtggtccattgctcagactgtcatcctcatcctcactggcatctggcagatgcgtcacctcaagagcttctttgaggccaagaagctggtgtagtgccctctttgtatgacccttcctttttacctcatttatttggtactttccccacacagtcctttatccacctggatttttagggaaaaaaatgaaaaagaataagtcacattggttccatggccacaaaccattcagatcagccacttgctgaccctggttcttaaggacacatgacattagtccaatctttcaaaatcttgtcttagggcttgtgaggaatcagaactaacccaggactcagtcctgcttcttttgcctcgagtgattttcctctgtttttcactaaataagcaaatgaaaactctctccattaccttctgctttctctttgtccacttacgcagtaggtgactggcatgtgccacagagcaggccctgcctcactgtctgctggtcatttattcacatatttttggtaactcccatggcagctcctaggatttcagcggtctgtgggccagaaagcaggcaccagggctgacctcaaggccgtatcagagggccaagcagagttcttttggatacctgcttttcatcccacagggccttagagtcagaggtaaggtagcaacagagctagaatggggcaatgcactcttaccctccttctcaacttttatttaagctgtgctaaatgttttcttcaagggaaccagatttagttctttacagaattttccagtgaaataaaacatgttgtaata

SEQ ID NO: 431417 - DNA, 3667 bp, Homo sapiens
  misc_feature (3596)..(3596): n is a, c, g, or t
  misc_feature (3605)..(3605): n is a, c, g, or t
  misc_feature (3667)..(3667): n is a, c, g, or t
gtgagccatgatcgtgccactgcactccagtctgggcaacagtgatcccatctgaaaaaaaaaaacaaaaaaaaaaatgcaatttagggccaggtggggtggctcacgcctataatcccagcactttgggaggccagggcagggggatcgcctgaggtcagcagtttgagaccaggctggccaacatggtgaaaacccctctctactaaaagtataaaaattagccgggcatggtggtgtgtgcctgtagtcccagctattcgggaagctgaggcaggagaatcgcttgaacccgggaggaggttgcagtgagcagaaatcgagccactgcactccagcctggggggcagagggagactctgtctcagaaaaaaaaaaaaaatgcaatttagttctctaggcttttccatttaatagttttatatcctcctgtttctaaatctggatgacagtgtaacactccagtaaggtgaattgtgaattgctgaaattcttcagatgtttaaaagagttttcagtattcctcatgttagaattaatgcagagaaaaattatatcctttgaactagttacatgttgtggacttctggcctgaggctcttggggattatgtgacatattgggaagggacacatttctgctctgtggctgttactagaaatctagccagcaaatcagactacgtttgtgagaagacaggaaggcacagattagggttgagccagccttcaacaggtttggctggcagtagacacagtggagcacatcttaactattttggtaggtcctgggtttctcttggtagtttttgatagaaaggggaatggtgtgaggaaaaagtgggcatacatttcacctttccactgataaggcaggtggaattgggatagtcagtggatgggccaatagctggtggctgtgagaagaataaggatttccatactggtgtgtcatatttacagataggttgtgacctaaaaagttttttaaaaaacagcagttagggcctgggcgcggtggctcacgcctgtaatcccagcactttgggaggccgaggcgggcggatcacaaggtcaggagatcgagaccatcctggctaacaacggtgaaaccctgtctctactaaaaatacaaaaaattggccgggcgtggtggcgggtgcctgtagtcccagctactcgggaggctgaggcaagagaatggcgtgaactcgggaggtggagcttgcagtgagctgagatcatgccactgcactccagcctgggcgacagagtgagactccttctaaaaaacaaaaacaaaaccaaaacagtagttagggtacacacacacaaattctagtgattttccccccaatactacccttgacttttgaaattcttgctttctcagagtttacaacatccttaccaaacagccttctccctccttaccacaaaaaaagaaaaaaaagttctggggttgaggggacactccattcttaacatcctctattatcccagcccaattccccagctctcactgggactagttgtacctatcttcatcatttggtcccagcatgactacctgttggtgcatgagctgatctctcctaacctaacagccagatgctagtctctggtactcagatgctgggctgcatcagataggatgcacaggatcatcctggaagcttgttgacatagattcctgtgcaacactcagatatagtcttaatgtagatttgtgttgggtggtatggtaggtagaataatggcctaccactctgaaacatatgaatatgttacctaacatgacagaagagaattaagttgctaatcagatgactgtaaaataaattatcctggatcatctggatgggcctaatgtaatcacaaaggttgtttccttgccttttccagcttggctctggctcccttcctccagcaagggtgggttgagctctcacatggcaccactttgacctcttctgcttccctcttctacactgaaagacttatgggccaggagcagtggctcgcacctgcaatcccagcactttgggaggccgaggaaggcagatcgcttggccccaggagttcaaaaccgtcctgggcaacgtggcgaaaccccatctagaaagaaaagaagagaaggggaggggggaggggaggaggagttacatatatacacatacacacacacacacacgtacgtacatacatacatacacgctaactggacgtggtggtgcgtgcctgtagtcttagctttccaggagactgaggtgggaggaccacttgagcctgagatcgcgccagcctgggtgacagtcagaccatgtctcaaaaaaaaaaaaagatttgtgattaggattcttagtcctcacctgtattattttcctattgctactgtaacaaattaccacaaatttactggcttgagacgacgcaagtctgtaggtcagaagtctgacacgggtcttaactggtgacccgagtcagatttgggacacaaagaacagaaaccaagctgtgcaggtttctgacaggcagtccggttagggagccctacagcaacccgccggtcctctctctcaggcagttgctgccatggctcattattccaaccggttctcctcagcccagtctatctcagtggctccattcatagggtgatgtgcccggcgggacactaaccctaaccaagcagagagacggtcatgcccgtcacgacctcggccctcgccccggccgaggcttctcctgcaggtcgcgagaatcaggtgcgtcagcggcgtccgggaacgccggaagagccagtggagcggctctgtagtccaaagtaccccgtcgaccccagcacggccgctccaccgcctcctactagacccagtcctagggactgcgcagtcgcagagctccgtccgagtaccggaagcctaggcgccagcacttccgggaagtgacttcgtctccgaagccgattggttgttgctttgctcccgctcgcgtcggtggcgtttttcctgcagcgcgtgcgtgctgcgctactgagcagcgccatggaggactctgaagcactgggcttcgaacacatgggcctcgatccccggctccttcaggctgtcaccgatctgggctggtcgcgacctacgctgatccaggagaaggccatcccactggccctagaagggaaggacctcctggctcgggcccgcacgggctccgggaagacggccgcttatgctattccgatgctgcagctgttgctccataggaaggcgacaggtccggtggtagaacaggcagtgagaggccttgttcttgttcctaccaaggagctggcacggcaagcacagtccatgattcagcagctggctacctactgtgctcgggatgtccgagtggccaatgtctcagctgctgaagactcagtctctcagagagctgtgctgatggagaagccagatgtggtagtagggaccccatctcgcatattaagccacttgcagcaagacagcctgaaacttcgtgactccctggagcttttggtggtggacgaagctgactcttttcttgcttgagagactcagagttctctgtgactgcccngatttacangctttctctgtgagtatttacgagagtaacctcaggtgtatatacgtacttagtaaggtcan

SEQ ID NO: 431418 - DNA, 1049 bp, Homo sapiens
  misc_feature (792)..(792): n is a, c, g, or t
  misc_feature (794)..(794): n is a, c, g, or t
gcgcttaggggctgaggcgcgatggcaggtgtcggggctgggcctctgcgggcgatggggcggcaggccctgctgcttctcgcgctgtgcgccacaggcgcccaggggctctacttccacatcggcgagaccgagaagcgctgtttcatcgaggaaatccccgacgagaccatggtcatcggcaactatcgtacccagatgtgggataagcagaaggaggtcttcctgccctcgacccctggcctgggcatgcacgtggaagtgaaggaccccgacggcaaggtggtgctgtcccggcagtacggctcggagggccgcttcacgttcacctcccacacgcccggtgaccatcaaatctgtctgcactccaattctaccaggatggctctcttcgctggtggcaaactgcgtgtgcatctcgacatccaggttggggagcatgccaacaactaccctgagattgctgcaaaagataagctgacggagctacagctccgcgcccgccagttgcttgatcaggtggaacagattcagaaggagcaggattaccaaaggtatcgtgaagagcgcttccgactgacgagcgagagcaccaaccagagggtcctatggtggtccattgctcagactgtcatcctcatcctcactggcatctggcagatgcgtcacctcaagagcttctttgaggccaagaagctggtgtagtgccctctttgtatgacccttcctttttacctcatttatttggtactttccccacacagtcctttatccacctggattttgaacacnantgacacacggaagtaaacgtccaaacaagagcgacaaaaacaacgcctccgagagggcatcacaatacccggcggcgcgcagcaacggaggcacacgacacgggcgccccggggccacaaagccgagataccgggaccacagcagtacttgcgacccaggggggagacaactgcgcgagccccctaaaagcggcgggcagcactaaagatccgagagaacggcccggggacgccggcattatgcaggcgagcgaa

SEQ ID NO: 431419 - DNA, 1758 bp, Homo sapiens
gcgcttaggggctgaggcgcgatggcaggtgtcggggctgggcctctgcgggcgatggggcggcaggccctgctgcttctcgcgctgtgcgccacaggcgcccaggggctctacttccacatcggcgagaccgagaagcgctgtttcatcgaggaaatccccgacgagaccatggtcatcggcaactatcgtacccagatgtgggataagcagaaggaggtcttcctgccctcgacccctggcctgggcatgcacgtggaagtgaaggaccccgacggcaaggtggtgctgtcccggcagtacggctcggagggccgcttcacgttcacctcccacacgcccggtgaccatcaaatctgtctgcactccaattctaccaggatggctctcttcgctggtggcaaactgcgtgtgcatctcgacatccaggttggggagcatgccaacaactaccctgagattgctgcaaaagataagctgacggagctacagctccgcgcccgccagttgcttgatcaggtggaacagattcagaaggagcaggattaccaaagggcaagtgcatatctccttgtaatttgagagggcagttgacctttatacccactatacctactcaagtttctgcttgggagatcagctctgcagagaatggaatgagaagtattggtttagataggttgttgtcgttgttttgagacggagtttcactcttgttgcccatgctggagtgcaatgccatgatcttggctcactgcaacctccgcctccccaggttcaagcgattctcctgcctcagcctcctgagtagctgggattacaggcatgcgccaccatgcctggctaattttgtacttttagtagagacgggggtttctccacgttggtcaggctggtctcgaactcccgacatcaagtgatccgcccgcctcagcctcccaaagtgctgggattacaggtgtgagctaccgcgccctgcctgttttgcttttttatcaaaacattttattgtggtaaaatataacaccaaatgtgtcattttaactgtctatatagttcagtggtattaagtgccttcataatgttgtgctaccaacaccatcatccagctccagaactttttcatcttctcaaactaaaaatctgtacttattttgttttgtttttgagatggagtctcgctctgttgcccaggctggagcgcagtggcgccatctcggctcactgcaccctccgcctcccaggttcaagcgattctcctgcctcagcctcccaagtagctgggattacaggcaagtgccaccatgcgtggctcatttttgtgtttttagtagagactgggtttcaccatgttggccaggctggtcttgaactcctggcctcaggcaatccactgccgcagcctcccaaagtgttgggattacaggcgtgagccactgcacccagcaaatctgtacttattataaacaataacttcccgtttccttttgtcctgacacccaccattctactttctgtctctatgatcctgactaccctatctcatataagtggaatcattcagtatttgtccttttgtgactggcttatttcactgagtataatgttctcacagttcatccatgttatagcatgtgtcagaatttcttaaggctaatattccattgtatgcatgtgccacatttcgctttcagtagtcatttttaagctctataaaataaaatgaagaaaggacagttcacaatctaataatagcca

SEQ ID NO: 431420 - DNA, 975 bp, Homo sapiens
accgactgctatgtaactacaactcacacttatataatctcatctgtcgtggtgtgttcaacttcctcctgctctccgtggcctggtacgccctcacaagaagcggaagaagctgtcttcctcttgtaggaaggccaagagagcaaagtcccagaacccactgcgcagcttcaagcacaaaggaaagaaattcagacccacagccaagccctcctgaggttgttgggcctctctggagctgagcacattgtggagcacaggcttacacccttcgtggacaggcgaggctctggtgcttactgcacagcctgaacagacagttctggggccggcagtgctgggccctttagctccttggcacttccaagctggcatcttgccccttgacaacagaataaaaattttagctgccccagtttgtgcctccagcatatgaaaaggactatttgaatccccaaaacatcaggagtcgggaaacttcggaagacagctgtgcctggctctgtggctgcatgcagtgcttcacttggccagcagaggtcagctgtgccgagctgccccagccatgagaagagaagcctgcccttgctggcaggtggctatggccggcccagagccttcctgcccagctcctgcagccctgctgcctgggatcaggctgggagatgggccttcctgaccgccagccttcctctccccgagcacacgcacatgtagattcggggggaagctgcctgctcttccttagaggagccggggcagctatctgctggtccctttctgaacaactgttgatgtgtgagctgtgtctgtgtgttatgtgcataagcggtggtgtgacatacacacatgtgtactgtcccttatgccctggcctgagctctccagctgccttctcagcctgaaggctgggcttctctgctggcttggggtcctagattgcatgtcacctgcttaccaggcgtcacaaggcca

SEQ ID NO: 431421 - DNA, 1797 bp, Homo sapiens
  misc_feature (1743)..(1744): n is a, c, g, or t
gcgcttaggggctgaggcgcgatggcaggtgtcggggctgggcctctgcgggcgatggggcggcaggccctgctgcttctcgcgctgtgcgccacaggcgcccaggggctctacttccacatcggcgagaccgagaagcgctgtttcatcgaggaaatccccgacgagaccatggtcatcggcaactatcgtacccagatgtgggataagcagaaggaggtcttcctgccctcgacccctggcctgggcatgcacgtggaagtgaaggaccccgacggcaaggtggtgctgtcccggcagtacggctcggagggccgcttcacgttcacctcccacacgcccggtgaccatcaaatctgtctgcactccaattctaccaggatggctctcttcgctggtggcaaactgcgtgtgcatctcgacatccaggttggggagcatgccaacaactaccctgagattgctgcaaaagataagctgacggagctacagctccgcgcccgccagttgcttgatcaggtggaacagattcagaaggagcaggattaccaaagggcaagtgcatatctccttgtaatttgagagggcagttgacctttatacccactatacctactcaagtttctgcttgggagatcagctctgcagagaatggaatgagaagtattggtttagataggttgttgtcgttgttttgagacggagtttcactcttgttgcccatgctggagtgcaatgccatgatcttggctcactgcaacctccgcctccccaggttcaagcgattctcctgcctcagcctcctgagtagctgggattacaggcatgcgccaccatgcctggctaattttgtacttttagtagagacgggggtttctccacgttggtcaggctggtctcgaactcccgacatcaagtgatccgcccgcctcagcctcccaaagtgctgggattacaggtgtgagctaccgcgccctgcctgttttgcttttttatcaaaacattttattgtggtaaaatataacaccaaatgtgtcattttaactgtctatatagttcagtggtattaagtgccttcataatgttgtgctaccaacaccatcatccagctccagaactttttcatcttctcaaactaaaaatctgtacttattttgttttgtttttgagatggagtctcgctctgttgcccaggctggagcgcagtggcgccatctcggctcactgcaccctccgcctcccaggttcaagcgattctcctgcctcagcctcccaagtagctgggattacaggcaagtgccaccatgcgtggctcatttttgtgtttttagtagagactgggtttcaccatgttggccaggctggtcttgaactcctggcctcaggcaatccactgccgcagcctcccaaagtgttgggattacaggcgtgagccactgcacccagcaaatctgtacttattataaacaataacttcccgtttccttttgtcctgacacccaccattctactttctgtctctatgattccacttacatgagataactagaataggcaaattcatagagacagaaagtagaatggtgatttcctgaggctgaggggcagaggagatggacagttagtgtttaagcagtatcatcttcttcaaacttaaaaatctgtacttattttgttttgtttttgaggatgggagtcttcgctctgttgccccactggcactccaccccggggcaacaggannggggactcccatcttcaagaaaaaaaaaatttaaacttctgtggcatccaagg

SEQ ID NO: 431422 - DNA, 792 bp, Homo sapiens
gcgcttaggggctgaggcgcgatggcaggtgtcggggctgggcctctgcgggcgatggggcggcaggccctgctgcttctcgcgctgtgcgccacaggcgcccaggggctctacttccacatcggcgagaccgagaagcgctgtttcatcgaggaaatccccgacgagaccatggtcatcggcaactatcgtacccagatgtgggataagcagaaggaggtcttcctgccctcgacccctggcctgggcatgcacgtggaagtgaaggaccccgacggcaaggtggtgctgtcccggcagtacggctcggagggccgcttcacgttcacctcccacacgcccggtgaccatcaaatctgtctgcactccaattctaccaggatggctctcttcgctggtggcaaactgcgtgtgcatctcgacatccaggttggggagcatgccaacaactaccctgagattgctgcaaaagataagctgacggagctacagctccgcgcccgccagttgcttgatcaggtggaacagattcagaaggagcaggattaccaaaggtatcgtgaagagcgcttccgactgacgagcgagagcaccaaccagagggtcctatggtggtccattgctcagactcacacacaaccttatacacacagttaatacacacataatatgtgggcgctgccagccaacctccaagacacataatatgcacacacatgctcacactctcacacacccttatgcagacacacattacatacacacacatatgtacgcacggcctactgcttg

SEQ ID NO: 431423 - DNA, 186 bp, Homo sapiens
cagcagatgggtcaggtaggctggaaggggtagagacacgtggacacagtgatgtgcactgctggctaaagtctttaattcatattcttacagacaggtccggtggtagaacaggcagtgagaggccttgttcttgttcctaccaaggagctggcacggcaagcacagtccatgattcagcagctg

SEQ ID NO: 431424 - DNA, 470 bp, Homo sapiens
ggctgggcctctgcgggcgatggggcggcaggccctgctgcttctcgcgctgtgcgccacaggcgcccaggggctctacttccacatcggcgagaccgagaagcgctgtttcatcgaggaaatccccgacgagaccatggtcatcggtcaggcgggctgagggtggggaggccctttgtacccagctcagccctcggcggcgctccctcctcccgagcccagccgggtcgctggctcccccagtacctagcctgagggtgccccgaggacgccaggccccctgcctagagctccgggccgcacgtcggagggggccgggcggagaggcggcccactagggccggtcgtgactatgtgtctgccccgcaggcaactatcgtacccagatgtgggataagcagaaggaggtcttcctgccctcgacccctggcctgggcatgcacgtggaagtgaaggaccccgacggcaag

SEQ ID NO: 431425 - DNA, 681 bp, Homo sapiens
gcaactatcgtacccagatgtgggataagcagaaggaggtcttcctgccctcgacccctggcctgggcatgcacgtggaagtgaaggaccccgacggcaaggtaaggctggcgttggcccacgcagccgttcttcagtggagctcccgtggggtgtaaagcactgcctggaggaggcctcaagggacaggaacttgcacttggagagcctgcggtataaaggtggggccttcactcacatatgttgcaggtggtgctgtcccggcagtacggctcggagggccgcttcacgttcacctcccacacgcccggtgaccatcaaatctgtctgcactccaattctaccaggatggctctcttcgctggtggcaaactggtaagaggattttctctttggcttcagcttagaatctctcacttgtttccaaattttgatttatcaagattgtgaaactttgtagcacagtcagaattggggagacagatgttgccttctgctccacagccagggacaatagtgggttccataccctggaacagacaactggaggccccaccactcatacattccatgtttccttgtagcgtgtgcatctcgacatccaggttggggagcatgccaacaactaccctgagattgctgcaaaagataagctgacggagctacagctccgcgcccgcc

SEQ ID NO: 431426 - DNA, 4173 bp, Homo sapiens
  misc_feature (2109)..(2109): n is a, c, g, or t
ggcctgggctggggaagcctaggtaagctgaggggcagctctgggaaagtcctaggggtgggggcagtctccacagcctccacaagggagttaccaccttcccgcacttctgggtacaagtctcctgctctggctgtattccacagttagaacttcatatctttggcttagagctgaattttctgttaccatgtggatgctccaggtgaaggggcccgctcctgcttaaaaacaccatgcatgcagactgctgctgggaatgtgacagttggctgttggagagaagggggcactggcattgagagacctccagactggacatggccctgagtccaggggctaacctggtcttccatgaagacccaaagatgacaccaagtcccccctcctgtggggccccgggattagggtctggtaccatccctcagccccacccagacatggctcaggtgcctatgttgaatctgctcccaagtcctggcttggctctcgttccagatcttaatgattctttgagtccagtctcaggggaggcctcaggcctggtgtctgaaaacacccccagacctgatgacagcagagctatcgctccagcctccctccagatcaccagttcttgttctggtgaagccctggacctggattccaaggatgtctcaaggcctgactcacaggggcgcctctgtccagcctcaaaccccattctgagccctagctctactgaggcccctcgtctgagctctgggaaccaccctcagtcaaattctgaagatgccttcaagtgcctctcaagtaagattttcaagttgggtcagagaaactccaacccttctaggcatgaattaaacccatttataaggcaccgttccagagaaggtctggttctgggccactgcatctctaggccaagctcaaaagcactccttattccaacctcaaactcttctctggaccttgactccaatccattgctcaacatgggctcaagaaacacctccaagctgaacctgaatgtagctccagattctcatgggaccctaatcccagacacaaatgagaccatcactttggcttcacataatatctctgagtctgtttcaaaaggagcctttagtaccacctggagcacaagttcaaaggaaaccatgaatgtggcttccagcggccactccagatctgatttgagcgtgaccatcactcaagcctcgtatgtgaccctgattcctggctccagcgatggtatcagcctgcactccagcacccatgggcccaactccaccatctctccaccctcatgcatgactctaatcctgggttccaatgagactctgagcctggactccagcctcctgttcagcgacacctccaccttgacgctgagcagtcagcaggatgatgccaaggacaacagcatccacactgtgcccctggaggagaatctggagagttggagtgagatggccagcattaaggtgggccagttcccgctgggattccccatctccaaccccgcaggcaaggacgccgtgaccttgcaaggcatccctgagggagcctttgatgaagtgacctcatgcctggtgaaggtgccagagaagacagaaggtggcaacaacatggctctggttgagaatgtcaccacccttcagaagagccaggatctgctggaggcagaaggagaaaagaagaccatgataaagaagattatgccacacccagcccaccctgggcatgcgggagaggtcggagctggtgaacgtgtgtgcgcacagcgtgttctccctgccctccgtgcaggcgatgcaggagaaggacgaggccaaggctgagaccatccaggctctttaccatcagaccctggaggccctgcagacactgctcaaagccctctttatcgaggaccccactcctgctgggctgaagagcatcttggaggccctggggccttggatgaactctgggaaggcccatgagcgagcacgggctgtgaacaccaatgtctctgtgttgaaccacatgcttctaactctgcctttctttattgcaatacaaacagatgcccttggggttcccggcgctggggcttctgctggggagactcatccttcncattggggatcctgatgaggagattggctgtgaggctctggacggcatcatcatcctctacactattctggagctccaaaaacgagccagagataaggaagagaccaacaaaaaggagctatatgagagcaacaagcatttcctggggccctacaaccctgtgagcccgtgccagaacattctgcgggtgatcgaggaatttggagacttcctggggccccagcagataaaggacctgctgctggccgccctggaagggctgaaaggcagctcagaggctccagggaaggactccagggagatgatgcagctggcctcggaggtcatgctcagctcggtgctggagtggtaccgccacagggcgctggaggtgatcccagaaatcatgcaaggcatctacatgcagctgagccacatccaggagcctcgggcccgccaggtggccctgctgcccgtctccctcctggctagctccttcatgaccgaggttgtggtggccctgctcatgtgccccctcccactgaacaggcagccagcggcctgtgcgagctcctgtccgtcaacagctgcatgggccgtgtgaggcgcatctaccctcagctgctcctggccctgctcattcaggtccattaccacatcggcctcaacctgcctggctgcgtggctcctcccaaggacaccaagaagggtgcacagccctctcccttcgtacctgtgcgctgggtggtgaaagtggtgaaaaccctgctactgaggatgggctgctcttatgagaccacgtttctggaggaccagggtggctgggagctcatggagcaggtggagagccaccaccgcggagtggccttgctggcaagggccatggtgcagtactcctgccaggagctgtgccgcatcctctacctgctcatcccgctcctggagcgaggcgacgagaagcacaggatcacggccaccgccttcttcgtggagctcctccagatggagcaggtgcgccggatccccgaggaatactctctggggcggatggcagaaggcctgagccaccacgaccccatcatgaaggtgctgtccattcgaggcctggtcatcctggcccgcaggtctgagaagaccgccaaggtgaaggccctcctgccctccatggtgaagggcctgaagaacatggatgggatgctggtggtggaagcggtccacaacctcaaggctgtcttcaaggggcgggaccagaagctgatggacagtgcggtctatgtggagatgctgcagatcctgctgccgcacttcagcgacgcacgagaggacgtgcgctcctcctgcatcaacctgtatgggaaggtggtccagaagcttcgggcaccacgcactcaggccatggaggagcagctggtcagcaccttggtgcccctactgctgaccatgcaggagggcaactccaaggtaagccagaagtgtgtgaagaccctgttacgctgttcttacttcatggcttgggagttgccaaaaagagcttatagccggaagccctgggacaaccaacagcagacagtggccaaaatttgcaagtgccttgtgaacacccaccgagacagcgccttcatattcctcagccagagcctggagtatgccaagaactcacgggcctccctccggaagtgctcagtcatgttcatagggtccctggtcccctgcatggagagcataatgacagaagatcgtctgaatgaagtgaaagctgctctggataacttgagacatgacccagaagcatcagtgtgcatctacgcagcccaggtccaggaccacatcctggccagctgctggcagaactcctggctgccgcacgggaactcatgggtgtgttactcagccaccacccaccgctggagccccagctgtgagaacctgcccacttcccaccagcggcgctcctggatcatgcaggcactgggctcctggaagatgtccttgaagaagtgacgtccctgagccccaaaccctcctcagggtggttgagttccagccatgctccctataaatgtcatgtggcttacctctccatct

SEQ ID NO: 431427 - DNA, 4278 bp, Homo sapiens
  misc_feature (2214)..(2214): n is a, c, g, or t
ggcctgggctggggaagcctaggtaagctgaggggcagctctgggaaagtcctaggggtgggggcagtctccacagcctccacaagggagttaccaccttcccgcacttctgggtacaagtctcctgctctggctgtattccacagttagaacttcatatctttggcttagagctgaattttctgttaccatgtggatgctccaggtgaagtgcggagcttgttaacagacgtgcatgcctggcctgtggactgtgcagtaagtgttgaaaaaggcactcttccctgacttgatttctttctgcatctcctcccaggggcccgctcctgcttaaaaacaccatgcatgcagactgctgctgggaatgtgacagttggctgttggagagaagggggcactggcattgagagacctccagactggacatggccctgagtccaggggctaacctggtcttccatgaagacccaaagatgacaccaagtcccccctcctgtggggccccgggattagggtctggtaccatccctcagccccacccagacatggctcaggtgcctatgttgaatctgctcccaagtcctggcttggctctcgttccagatcttaatgattctttgagtccagtctcaggggaggcctcaggcctggtgtctgaaaacacccccagacctgatgacagcagagctatcgctccagcctccctccagatcaccagttcttgttctggtgaagccctggacctggattccaaggatgtctcaaggcctgactcacaggggcgcctctgtccagcctcaaaccccattctgagccctagctctactgaggcccctcgtctgagctctgggaaccaccctcagtcaaattctgaagatgccttcaagtgcctctcaagtaagattttcaagttgggtcagagaaactccaacccttctaggcatgaattaaacccatttataaggcaccgttccagagaaggtctggttctgggccactgcatctctaggccaagctcaaaagcactccttattccaacctcaaactcttctctggaccttgactccaatccattgctcaacatgggctcaagaaacacctccaagctgaacctgaatgtagctccagattctcatgggaccctaatcccagacacaaatgagaccatcactttggcttcacataatatctctgagtctgtttcaaaaggagcctttagtaccacctggagcacaagttcaaaggaaaccatgaatgtggcttccagcggccactccagatctgatttgagcgtgaccatcactcaagcctcgtatgtgaccctgattcctggctccagcgatggtatcagcctgcactccagcacccatgggcccaactccaccatctctccaccctcatgcatgactctaatcctgggttccaatgagactctgagcctggactccagcctcctgttcagcgacacctccaccttgacgctgagcagtcagcaggatgatgccaaggacaacagcatccacactgtgcccctggaggagaatctggagagttggagtgagatggccagcattaaggtgggccagttcccgctgggattccccatctccaaccccgcaggcaaggacgccgtgaccttgcaaggcatccctgagggagcctttgatgaagtgacctcatgcctggtgaaggtgccagagaagacagaaggtggcaacaacatggctctggttgagaatgtcaccacccttcagaagagccaggatctgctggaggcagaaggagaaaagaagaccatgataaagaagattatgccacacccagcccaccctgggcatgcgggagaggtcggagctggtgaacgtgtgtgcgcacagcgtgttctccctgccctccgtgcaggcgatgcaggagaaggacgaggccaaggctgagaccatccaggctctttaccatcagaccctggaggccctgcagacactgctcaaagccctctttatcgaggaccccactcctgctgggctgaagagcatcttggaggccctggggccttggatgaactctgggaaggcccatgagcgagcacgggctgtgaacaccaatgtctctgtgttgaaccacatgcttctaactctgcctttctttattgcaatacaaacagatgcccttggggttcccggcgctggggcttctgctggggagactcatccttcncattggggatcctgatgaggagattggctgtgaggctctggacggcatcatcatcctctacactattctggagctccaaaaacgagccagagataaggaagagaccaacaaaaaggagctatatgagagcaacaagcatttcctggggccctacaaccctgtgagcccgtgccagaacattctgcgggtgatcgaggaatttggagacttcctggggccccagcagataaaggacctgctgctggccgccctggaagggctgaaaggcagctcagaggctccagggaaggactccagggagatgatgcagctggcctcggaggtcatgctcagctcggtgctggagtggtaccgccacagggcgctggaggtgatcccagaaatcatgcaaggcatctacatgcagctgagccacatccaggagcctcgggcccgccaggtggccctgctgcccgtctccctcctggctagctccttcatgaccgaggttgtggtggccctgctcatgtgccccctcccactgaacaggcagccagcggcctgtgcgagctcctgtccgtcaacagctgcatgggccgtgtgaggcgcatctaccctcagctgctcctggccctgctcattcaggtccattaccacatcggcctcaacctgcctggctgcgtggctcctcccaaggacaccaagaagggtgcacagccctctcccttcgtacctgtgcgctgggtggtgaaagtggtgaaaaccctgctactgaggatgggctgctcttatgagaccacgtttctggaggaccagggtggctgggagctcatggagcaggtggagagccaccaccgcggagtggccttgctggcaagggccatggtgcagtactcctgccaggagctgtgccgcatcctctacctgctcatcccgctcctggagcgaggcgacgagaagcacaggatcacggccaccgccttcttcgtggagctcctccagatggagcaggtgcgccggatccccgaggaatactctctggggcggatggcagaaggcctgagccaccacgaccccatcatgaaggtgctgtccattcgaggcctggtcatcctggcccgcaggtctgagaagaccgccaaggtgaaggccctcctgccctccatggtgaagggcctgaagaacatggatgggatgctggtggtggaagcggtccacaacctcaaggctgtcttcaaggggcgggaccagaagctgatggacagtgcggtctatgtggagatgctgcagatcctgctgccgcacttcagcgacgcacgagaggacgtgcgctcctcctgcatcaacctgtatgggaaggtggtccagaagcttcgggcaccacgcactcaggccatggaggagcagctggtcagcaccttggtgcccctactgctgaccatgcaggagggcaactccaaggtaagccagaagtgtgtgaagaccctgttacgctgttcttacttcatggcttgggagttgccaaaaagagcttatagccggaagccctgggacaaccaacagcagacagtggccaaaatttgcaagtgccttgtgaacacccaccgagacagcgccttcatattcctcagccagagcctggagtatgccaagaactcacgggcctccctccggaagtgctcagtcatgttcatagggtccctggtcccctgcatggagagcataatgacagaagatcgtctgaatgaagtgaaagctgctctggataacttgagacatgacccagaagcatcagtgtgcatctacgcagcccaggtccaggaccacatcctggccagctgctggcagaactcctggctgccgcacgggaactcatgggtgtgttactcagccaccacccaccgctggagccccagctgtgagaacctgcccacttcccaccagcggcgctcctggatcatgcaggcactgggctcctggaagatgtccttgaagaagtgacgtccctgagccccaaaccctcctcagggtggttgagttccagccatgctccctataaatgtcatgtggcttacctctccatct

SEQ ID NO: 431428 - DNA, 4312 bp, Homo sapiens
  misc_feature (2109)..(2109): n is a, c, g, or t
ggcctgggctggggaagcctaggtaagctgaggggcagctctgggaaagtcctaggggtgggggcagtctccacagcctccacaagggagttaccaccttcccgcacttctgggtacaagtctcctgctctggctgtattccacagttagaacttcatatctttggcttagagctgaattttctgttaccatgtggatgctccaggtgaaggggcccgctcctgcttaaaaacaccatgcatgcagactgctgctgggaatgtgacagttggctgttggagagaagggggcactggcattgagagacctccagactggacatggccctgagtccaggggctaacctggtcttccatgaagacccaaagatgacaccaagtcccccctcctgtggggccccgggattagggtctggtaccatccctcagccccacccagacatggctcaggtgcctatgttgaatctgctcccaagtcctggcttggctctcgttccagatcttaatgattctttgagtccagtctcaggggaggcctcaggcctggtgtctgaaaacacccccagacctgatgacagcagagctatcgctccagcctccctccagatcaccagttcttgttctggtgaagccctggacctggattccaaggatgtctcaaggcctgactcacaggggcgcctctgtccagcctcaaaccccattctgagccctagctctactgaggcccctcgtctgagctctgggaaccaccctcagtcaaattctgaagatgccttcaagtgcctctcaagtaagattttcaagttgggtcagagaaactccaacccttctaggcatgaattaaacccatttataaggcaccgttccagagaaggtctggttctgggccactgcatctctaggccaagctcaaaagcactccttattccaacctcaaactcttctctggaccttgactccaatccattgctcaacatgggctcaagaaacacctccaagctgaacctgaatgtagctccagattctcatgggaccctaatcccagacacaaatgagaccatcactttggcttcacataatatctctgagtctgtttcaaaaggagcctttagtaccacctggagcacaagttcaaaggaaaccatgaatgtggcttccagcggccactccagatctgatttgagcgtgaccatcactcaagcctcgtatgtgaccctgattcctggctccagcgatggtatcagcctgcactccagcacccatgggcccaactccaccatctctccaccctcatgcatgactctaatcctgggttccaatgagactctgagcctggactccagcctcctgttcagcgacacctccaccttgacgctgagcagtcagcaggatgatgccaaggacaacagcatccacactgtgcccctggaggagaatctggagagttggagtgagatggccagcattaaggtgggccagttcccgctgggattccccatctccaaccccgcaggcaaggacgccgtgaccttgcaaggcatccctgagggagcctttgatgaagtgacctcatgcctggtgaaggtgccagagaagacagaaggtggcaacaacatggctctggttgagaatgtcaccacccttcagaagagccaggatctgctggaggcagaaggagaaaagaagaccatgataaagaagattatgccacacccagcccaccctgggcatgcgggagaggtcggagctggtgaacgtgtgtgcgcacagcgtgttctccctgccctccgtgcaggcgatgcaggagaaggacgaggccaaggctgagaccatccaggctctttaccatcagaccctggaggccctgcagacactgctcaaagccctctttatcgaggaccccactcctgctgggctgaagagcatcttggaggccctggggccttggatgaactctgggaaggcccatgagcgagcacgggctgtgaacaccaatgtctctgtgttgaaccacatgcttctaactctgcctttctttattgcaatacaaacagatgcccttggggttcccggcgctggggcttctgctggggagactcatccttcncattggggatcctgatgaggagattggctgtgaggctctggacggcatcatcatcctctacactattctggagctccaaaaacgagccagagataaggaagagaccaacaaaaaggagctatatgagagcaacaagcatttcctggggccctacaaccctgtgagcccgtgccagaacattctgcgggtgatcgaggaatttggagacttcctggggccccagcagataaaggacctgctgctggccgccctggaagggctgaaaggcagctcagaggctccagggaaggactccagggagatgatgcagctggcctcggaggtcatgctcagctcggtgctggagtggtaccgccacagggcgctggaggtgatcccagaaatcatgcaaggcatctacatgcagctgagccacatccaggagcctcgggcccgccaggtggccctgctgcccgtctccctcctggctagctccttcatgaccgaggttgtggtggccctgctcatgtgccccctcccactgaacagcaatggagcagagatgtggaggcagctgatactgtgtaagcccagctgtgatgtccgagacctcctggatctgctcctgggcagcctgaaggagaagcccgtcaccaaggagggccgggcttccatcgtgcccctggcggcagccagcggcctgtgcgagctcctgtccgtcaacagctgcatgggccgtgtgaggcgcatctaccctcagctgctcctggccctgctcattcaggtccattaccacatcggcctcaacctgcctggctgcgtggctcctcccaaggacaccaagaagggtgcacagccctctcccttcgtacctgtgcgctgggtggtgaaagtggtgaaaaccctgctactgaggatgggctgctcttatgagaccacgtttctggaggaccagggtggctgggagctcatggagcaggtggagagccaccaccgcggagtggccttgctggcaagggccatggtgcagtactcctgccaggagctgtgccgcatcctctacctgctcatcccgctcctggagcgaggcgacgagaagcacaggatcacggccaccgccttcttcgtggagctcctccagatggagcaggtgcgccggatccccgaggaatactctctggggcggatggcagaaggcctgagccaccacgaccccatcatgaaggtgctgtccattcgaggcctggtcatcctggcccgcaggtctgagaagaccgccaaggtgaaggccctcctgccctccatggtgaagggcctgaagaacatggatgggatgctggtggtggaagcggtccacaacctcaaggctgtcttcaaggggcgggaccagaagctgatggacagtgcggtctatgtggagatgctgcagatcctgctgccgcacttcagcgacgcacgagaggacgtgcgctcctcctgcatcaacctgtatgggaaggtggtccagaagcttcgggcaccacgcactcaggccatggaggagcagctggtcagcaccttggtgcccctactgctgaccatgcaggagggcaactccaaggtaagccagaagtgtgtgaagaccctgttacgctgttcttacttcatggcttgggagttgccaaaaagagcttatagccggaagccctgggacaaccaacagcagacagtggccaaaatttgcaagtgccttgtgaacacccaccgagacagcgccttcatattcctcagccagagcctggagtatgccaagaactcacgggcctccctccggaagtgctcagtcatgttcatagggtccctggtcccctgcatggagagcataatgacagaagatcgtctgaatgaagtgaaagctgctctggataacttgagacatgacccagaagcatcagtgtgcatctacgcagcccaggtccaggaccacatcctggccagctgctggcagaactcctggctgccgcacgggaactcatgggtgtgttactcagccaccacccaccgctggagccccagctgtgagaacctgcccacttcccaccagcggcgctcctggatcatgcaggcactgggctcctggaagatgtccttgaagaagtgacgtccctgagccccaaaccctcctcagggtggttgagttccagccatgctccctataaatgtcatgtggcttacctctccatct

SEQ ID NO: 431429 - DNA, 4506 bp, Homo sapiens
  misc_feature (2109)..(2109): n is a, c, g, or t
ggcctgggctggggaagcctaggtaagctgaggggcagctctgggaaagtcctaggggtgggggcagtctccacagcctccacaagggagttaccaccttcccgcacttctgggtacaagtctcctgctctggctgtattccacagttagaacttcatatctttggcttagagctgaattttctgttaccatgtggatgctccaggtgaaggggcccgctcctgcttaaaaacaccatgcatgcagactgctgctgggaatgtgacagttggctgttggagagaagggggcactggcattgagagacctccagactggacatggccctgagtccaggggctaacctggtcttccatgaagacccaaagatgacaccaagtcccccctcctgtggggccccgggattagggtctggtaccatccctcagccccacccagacatggctcaggtgcctatgttgaatctgctcccaagtcctggcttggctctcgttccagatcttaatgattctttgagtccagtctcaggggaggcctcaggcctggtgtctgaaaacacccccagacctgatgacagcagagctatcgctccagcctccctccagatcaccagttcttgttctggtgaagccctggacctggattccaaggatgtctcaaggcctgactcacaggggcgcctctgtccagcctcaaaccccattctgagccctagctctactgaggcccctcgtctgagctctgggaaccaccctcagtcaaattctgaagatgccttcaagtgcctctcaagtaagattttcaagttgggtcagagaaactccaacccttctaggcatgaattaaacccatttataaggcaccgttccagagaaggtctggttctgggccactgcatctctaggccaagctcaaaagcactccttattccaacctcaaactcttctctggaccttgactccaatccattgctcaacatgggctcaagaaacacctccaagctgaacctgaatgtagctccagattctcatgggaccctaatcccagacacaaatgagaccatcactttggcttcacataatatctctgagtctgtttcaaaaggagcctttagtaccacctggagcacaagttcaaaggaaaccatgaatgtggcttccagcggccactccagatctgatttgagcgtgaccatcactcaagcctcgtatgtgaccctgattcctggctccagcgatggtatcagcctgcactccagcacccatgggcccaactccaccatctctccaccctcatgcatgactctaatcctgggttccaatgagactctgagcctggactccagcctcctgttcagcgacacctccaccttgacgctgagcagtcagcaggatgatgccaaggacaacagcatccacactgtgcccctggaggagaatctggagagttggagtgagatggccagcattaaggtgggccagttcccgctgggattccccatctccaaccccgcaggcaaggacgccgtgaccttgcaaggcatccctgagggagcctttgatgaagtgacctcatgcctggtgaaggtgccagagaagacagaaggtggcaacaacatggctctggttgagaatgtcaccacccttcagaagagccaggatctgctggaggcagaaggagaaaagaagaccatgataaagaagattatgccacacccagcccaccctgggcatgcgggagaggtcggagctggtgaacgtgtgtgcgcacagcgtgttctccctgccctccgtgcaggcgatgcaggagaaggacgaggccaaggctgagaccatccaggctctttaccatcagaccctggaggccctgcagacactgctcaaagccctctttatcgaggaccccactcctgctgggctgaagagcatcttggaggccctggggccttggatgaactctgggaaggcccatgagcgagcacgggctgtgaacaccaatgtctctgtgttgaaccacatgcttctaactctgcctttctttattgcaatacaaacagatgcccttggggttcccggcgctggggcttctgctggggagactcatccttcncattggggatcctgatgaggagattggctgtgaggctctggacggcatcatcatcctctacactattctggagctccaaaaacgagccagagataaggaagagaccaacaaaaaggagctatatgagagcaacaagcatttcctggggccctacaaccctgtgagcccgtgccagaacattctgcgggtgatcgaggaatttggagacttcctggggccccagcagataaaggacctgctgctggccgccctggaagggctgaaaggcagctcagaggctccagggaaggactccagggagatgatgcagctggcctcggaggtcatgctcagctcggtgctggagtggtaccgccacagggcgctggaggtgatcccagaaatcatgcaaggcatctacatgcagctgagccacatccaggagcctcgggcccgccaggtggccctgctgcccgtctccctcctggctagctccttcatgaccgaggttgtggtggccctgctcatgtgccccctcccactgaacagcaatggagcagagatgtggaggcagctgatactgtgtaagcccagctgtgatgtccgagacctcctggatctgctcctgggcagcctgaaggagaagcccgtcaccaaggagggccgggcttccatcgtgcccctggcggcagccagcggcctgtgcgagctcctgtccgtcaacagctgcatgggccgtgtgaggcgcatctaccctcagctgctcctggccctgctcattcaggtccattaccacatcggcctcaacctgcctggctgcgtggctcctcccaaggacaccaagaagggtgcacagccctctcccttcgtacctgtgcgctgggtggtgaaagtggtgaaaaccctgctactgaggatgggctgctcttatgagaccacgtttctggaggaccagggtggctgggagctcatggagcaggtggagagccaccaccgcggagtggccttgctggcaagggccatggtgcagtactcctgccaggagctgtgccgcatcctctacctgctcatcccgctcctggagcgaggcgacgagaagcacaggatcacggccaccgccttcttcgtggagcaaccctgcgaagaaggaattgtgatactcatgcttaggatctcatgggaaaggcaacaacaagcagtcacaggggctcggagctggagagtgacacactcagctttgccacatggtgctgatggacatcagacggagacttccagcaatctgttggttttgcaagtctgaagctccgggcagagctgagcctgctcctccagatggagcaggtgcgccggatccccgaggaatactctctggggcggatggcagaaggcctgagccaccacgaccccatcatgaaggtgctgtccattcgaggcctggtcatcctggcccgcaggtctgagaagaccgccaaggtgaaggccctcctgccctccatggtgaagggcctgaagaacatggatgggatgctggtggtggaagcggtccacaacctcaaggctgtcttcaaggggcgggaccagaagctgatggacagtgcggtctatgtggagatgctgcagatcctgctgccgcacttcagcgacgcacgagaggacgtgcgctcctcctgcatcaacctgtatgggaaggtggtccagaagcttcgggcaccacgcactcaggccatggaggagcagctggtcagcaccttggtgcccctactgctgaccatgcaggagggcaactccaaggtaagccagaagtgtgtgaagaccctgttacgctgttcttacttcatggcttgggagttgccaaaaagagcttatagccggaagccctgggacaaccaacagcagacagtggccaaaatttgcaagtgccttgtgaacacccaccgagacagcgccttcatattcctcagccagagcctggagtatgccaagaactcacgggcctccctccggaagtgctcagtcatgttcatagggtccctggtcccctgcatggagagcataatgacagaagatcgtctgaatgaagtgaaagctgctctggataacttgagacatgacccagaagcatcagtgtgcatctacgcagcccaggtccaggaccacatcctggccagctgctggcagaactcctggctgccgcacgggaactcatgggtgtgttactcagccaccacccaccgctggagccccagctgtgagaacctgcccacttcccaccagcggcgctcctggatcatgcaggcactgggctcctggaagatgtccttgaagaagtgacgtccctgagccccaaaccctcctcagggtggttgagttccagccatgctccctataaatgtcatgtggcttacctctccatct

SEQ ID NO: 431430 - DNA, 4595 bp, Homo sapiens
  misc_feature (2109)..(2109): n is a, c, g, or t
ggcctgggctggggaagcctaggtaagctgaggggcagctctgggaaagtcctaggggtgggggcagtctccacagcctccacaagggagttaccaccttcccgcacttctgggtacaagtctcctgctctggctgtattccacagttagaacttcatatctttggcttagagctgaattttctgttaccatgtggatgctccaggtgaaggggcccgctcctgcttaaaaacaccatgcatgcagactgctgctgggaatgtgacagttggctgttggagagaagggggcactggcattgagagacctccagactggacatggccctgagtccaggggctaacctggtcttccatgaagacccaaagatgacaccaagtcccccctcctgtggggccccgggattagggtctggtaccatccctcagccccacccagacatggctcaggtgcctatgttgaatctgctcccaagtcctggcttggctctcgttccagatcttaatgattctttgagtccagtctcaggggaggcctcaggcctggtgtctgaaaacacccccagacctgatgacagcagagctatcgctccagcctccctccagatcaccagttcttgttctggtgaagccctggacctggattccaaggatgtctcaaggcctgactcacaggggcgcctctgtccagcctcaaaccccattctgagccctagctctactgaggcccctcgtctgagctctgggaaccaccctcagtcaaattctgaagatgccttcaagtgcctctcaagtaagattttcaagttgggtcagagaaactccaacccttctaggcatgaattaaacccatttataaggcaccgttccagagaaggtctggttctgggccactgcatctctaggccaagctcaaaagcactccttattccaacctcaaactcttctctggaccttgactccaatccattgctcaacatgggctcaagaaacacctccaagctgaacctgaatgtagctccagattctcatgggaccctaatcccagacacaaatgagaccatcactttggcttcacataatatctctgagtctgtttcaaaaggagcctttagtaccacctggagcacaagttcaaaggaaaccatgaatgtggcttccagcggccactccagatctgatttgagcgtgaccatcactcaagcctcgtatgtgaccctgattcctggctccagcgatggtatcagcctgcactccagcacccatgggcccaactccaccatctctccaccctcatgcatgactctaatcctgggttccaatgagactctgagcctggactccagcctcctgttcagcgacacctccaccttgacgctgagcagtcagcaggatgatgccaaggacaacagcatccacactgtgcccctggaggagaatctggagagttggagtgagatggccagcattaaggtgggccagttcccgctgggattccccatctccaaccccgcaggcaaggacgccgtgaccttgcaaggcatccctgagggagcctttgatgaagtgacctcatgcctggtgaaggtgccagagaagacagaaggtggcaacaacatggctctggttgagaatgtcaccacccttcagaagagccaggatctgctggaggcagaaggagaaaagaagaccatgataaagaagattatgccacacccagcccaccctgggcatgcgggagaggtcggagctggtgaacgtgtgtgcgcacagcgtgttctccctgccctccgtgcaggcgatgcaggagaaggacgaggccaaggctgagaccatccaggctctttaccatcagaccctggaggccctgcagacactgctcaaagccctctttatcgaggaccccactcctgctgggctgaagagcatcttggaggccctggggccttggatgaactctgggaaggcccatgagcgagcacgggctgtgaacaccaatgtctctgtgttgaaccacatgcttctaactctgcctttctttattgcaatacaaacagatgcccttggggttcccggcgctggggcttctgctggggagactcatccttcncattggggatcctgatgaggagattggctgtgaggctctggacggcatcatcatcctctacactattctggagctccaaaaacgagccagagataaggaagagaccaacaaaaaggagctatatgagagcaacaagcatttcctggggccctacaaccctgtgagcccgtgccagaacattctgcgggtgatcgaggaatttggagacttcctggggccccagcagataaaggacctgctgctggccgccctggaagggctgaaaggcagctcagaggctccagggaaggactccagggagatgatgcagctggcctcggaggtcatgctcagctcggtgctggagtggtaccgccacagggcgctggaggtgatcccagaaatcatgcaaggcatctacatgcagctgagccacatccaggagcctcgggcccgccaggtggccctgctgcccgtctccctcctggctagctccttcatgaccgaggttgtggtggccctgctcatgtgccccctcccactgaacagcaatggagcagagatgtggaggcagctgatactgtgtaagcccagctgtgatgtccgagacctcctggatctgctcctgggcagcctgaaggagaagcccgtcaccaaggagggccgggcttccatcgtgcccctggcggcagccagcggcctgtgcgagctcctgtccgtcaacagctgcatgggccgtgtgaggcgcatctaccctcagctgctcctggccctgctcattcaggtccattaccacatcggcctcaacctgcctggctgcgtggctcctcccaaggacaccaagaagggtgcacagccctctcccttcgtacctgtgcgctgggtggtgaaagtggtgaaaaccctgctactgaggatgggctgctcttatgagaccacgtttctggaggaccagggtggctgggagctcatggagcaggtggagagccaccaccgcggagtggccttgctggcaagggccatggtgcagtactcctgccaggagctgtgccgcatcctctacctgctcatcccgctcctggagcgaggcgacgagaagcacaggatcacggccaccgccttcttcgtggagcaaccctgcgaagaaggaattgtgatactcatgcttaggatctcatgggaaaggcaacaacaagcagtcacaggggctcggagctggagagtgacacactcagctttgccacatggtgctgatggacatcagacggagacttccagcaatctgttggttttgcaagtctgaagctccgggcagagctgagcctggtatccaatgtgcaatcccagtgcatgggaggccagggggctgccctgcccccctcagcctgggaagtaatgaccctttgctccctcagctcctccagatggagcaggtgcgccggatccccgaggaatactctctggggcggatggcagaaggcctgagccaccacgaccccatcatgaaggtgctgtccattcgaggcctggtcatcctggcccgcaggtctgagaagaccgccaaggtgaaggccctcctgccctccatggtgaagggcctgaagaacatggatgggatgctggtggtggaagcggtccacaacctcaaggctgtcttcaaggggcgggaccagaagctgatggacagtgcggtctatgtggagatgctgcagatcctgctgccgcacttcagcgacgcacgagaggacgtgcgctcctcctgcatcaacctgtatgggaaggtggtccagaagcttcgggcaccacgcactcaggccatggaggagcagctggtcagcaccttggtgcccctactgctgaccatgcaggagggcaactccaaggtaagccagaagtgtgtgaagaccctgttacgctgttcttacttcatggcttgggagttgccaaaaagagcttatagccggaagccctgggacaaccaacagcagacagtggccaaaatttgcaagtgccttgtgaacacccaccgagacagcgccttcatattcctcagccagagcctggagtatgccaagaactcacgggcctccctccggaagtgctcagtcatgttcatagggtccctggtcccctgcatggagagcataatgacagaagatcgtctgaatgaagtgaaagctgctctggataacttgagacatgacccagaagcatcagtgtgcatctacgcagcccaggtccaggaccacatcctggccagctgctggcagaactcctggctgccgcacgggaactcatgggtgtgttactcagccaccacccaccgctggagccccagctgtgagaacctgcccacttcccaccagcggcgctcctggatcatgcaggcactgggctcctggaagatgtccttgaagaagtgacgtccctgagccccaaaccctcctcagggtggttgagttccagccatgctccctataaatgtcatgtggcttacctctccatct

SEQ ID NO: 431431 - DNA, 4372 bp, Homo sapiens
  misc_feature (2109)..(2109): n is a, c, g, or t
ggcctgggctggggaagcctaggtaagctgaggggcagctctgggaaagtcctaggggtgggggcagtctccacagcctccacaagggagttaccaccttcccgcacttctgggtacaagtctcctgctctggctgtattccacagttagaacttcatatctttggcttagagctgaattttctgttaccatgtggatgctccaggtgaaggggcccgctcctgcttaaaaacaccatgcatgcagactgctgctgggaatgtgacagttggctgttggagagaagggggcactggcattgagagacctccagactggacatggccctgagtccaggggctaacctggtcttccatgaagacccaaagatgacaccaagtcccccctcctgtggggccccgggattagggtctggtaccatccctcagccccacccagacatggctcaggtgcctatgttgaatctgctcccaagtcctggcttggctctcgttccagatcttaatgattctttgagtccagtctcaggggaggcctcaggcctggtgtctgaaaacacccccagacctgatgacagcagagctatcgctccagcctccctccagatcaccagttcttgttctggtgaagccctggacctggattccaaggatgtctcaaggcctgactcacaggggcgcctctgtccagcctcaaaccccattctgagccctagctctactgaggcccctcgtctgagctctgggaaccaccctcagtcaaattctgaagatgccttcaagtgcctctcaagtaagattttcaagttgggtcagagaaactccaacccttctaggcatgaattaaacccatttataaggcaccgttccagagaaggtctggttctgggccactgcatctctaggccaagctcaaaagcactccttattccaacctcaaactcttctctggaccttgactccaatccattgctcaacatgggctcaagaaacacctccaagctgaacctgaatgtagctccagattctcatgggaccctaatcccagacacaaatgagaccatcactttggcttcacataatatctctgagtctgtttcaaaaggagcctttagtaccacctggagcacaagttcaaaggaaaccatgaatgtggcttccagcggccactccagatctgatttgagcgtgaccatcactcaagcctcgtatgtgaccctgattcctggctccagcgatggtatcagcctgcactccagcacccatgggcccaactccaccatctctccaccctcatgcatgactctaatcctgggttccaatgagactctgagcctggactccagcctcctgttcagcgacacctccaccttgacgctgagcagtcagcaggatgatgccaaggacaacagcatccacactgtgcccctggaggagaatctggagagttggagtgagatggccagcattaaggtgggccagttcccgctgggattccccatctccaaccccgcaggcaaggacgccgtgaccttgcaaggcatccctgagggagcctttgatgaagtgacctcatgcctggtgaaggtgccagagaagacagaaggtggcaacaacatggctctggttgagaatgtcaccacccttcagaagagccaggatctgctggaggcagaaggagaaaagaagaccatgataaagaagattatgccacacccagcccaccctgggcatgcgggagaggtcggagctggtgaacgtgtgtgcgcacagcgtgttctccctgccctccgtgcaggcgatgcaggagaaggacgaggccaaggctgagaccatccaggctctttaccatcagaccctggaggccctgcagacactgctcaaagccctctttatcgaggaccccactcctgctgggctgaagagcatcttggaggccctggggccttggatgaactctgggaaggcccatgagcgagcacgggctgtgaacaccaatgtctctgtgttgaaccacatgcttctaactctgcctttctttattgcaatacaaacagatgcccttggggttcccggcgctggggcttctgctggggagactcatccttcncattggggatcctgatgaggagattggctgtgaggctctggacggcatcatcatcctctacactattctggagctccaaaaacgagccagagataaggaagagaccaacaaaaaggagctatatgagagcaacaagcatttcctggggccctacaaccctgtgagcccgtgccagaacattctgcgggtgatcgaggaatttggagacttcctggggccccagcagataaaggacctgctgctggccgccctggaagggctgaaaggcagctcagaggctccagggaaggactccagggagatgatgcagctggcctcggaggtcatgctcagctcggtgctggagtggtaccgccacagggcgctggaggtgatcccagaaatcatgcaaggcatctacatgcagctgagccacatccaggagcctcgggcccgccaggtggccctgctgcccgtctccctcctggctagctccttcatgaccgaggttgtggtggccctgctcatgtgccccctcccactgaacagcaatggagcagagatgtggaggcagctgatactgtgtaagcccagctgtgatgtccgagacctcctggatctgctcctgggcagcctgaaggagaagcccgtcaccaaggagggccgggcttccatcgtgcccctggcggcagccagcggcctgtgcgagctcctgtccgtcaacagctgcatgggccgtgtgaggcgcatctaccctcagctgctcctggccctgctcattcaggtccattaccacatcggcctcaacctgcctggctgcgtggctcctcccaaggacaccaagaagggtgcacagccctctcccttcgtacctgtgcgctgggtggtgaaagtggtgaaaaccctgctactgaggatgggctgctcttatgagaccacgtttctggaggaccagggtggctgggagctcatggagcaggtggagagccaccaccgcggagtggccttgctggcaagggccatggtgcagtactcctgccaggagctgtgccgcatcctctacctgctcatcccgctcctggagcgaggcgacgagaagcacaggatcacggccaccgccttcttcgtggaggaatttttggtgtggcagaggacacagaggacaccccagttataacagggggtgataccactcctccagatggagcaggtgcgccggatccccgaggaatactctctggggcggatggcagaaggcctgagccaccacgaccccatcatgaaggtgctgtccattcgaggcctggtcatcctggcccgcaggtctgagaagaccgccaaggtgaaggccctcctgccctccatggtgaagggcctgaagaacatggatgggatgctggtggtggaagcggtccacaacctcaaggctgtcttcaaggggcgggaccagaagctgatggacagtgcggtctatgtggagatgctgcagatcctgctgccgcacttcagcgacgcacgagaggacgtgcgctcctcctgcatcaacctgtatgggaaggtggtccagaagcttcgggcaccacgcactcaggccatggaggagcagctggtcagcaccttggtgcccctactgctgaccatgcaggagggcaactccaaggtaagccagaagtgtgtgaagaccctgttacgctgttcttacttcatggcttgggagttgccaaaaagagcttatagccggaagccctgggacaaccaacagcagacagtggccaaaatttgcaagtgccttgtgaacacccaccgagacagcgccttcatattcctcagccagagcctggagtatgccaagaactcacgggcctccctccggaagtgctcagtcatgttcatagggtccctggtcccctgcatggagagcataatgacagaagatcgtctgaatgaagtgaaagctgctctggataacttgagacatgacccagaagcatcagtgtgcatctacgcagcccaggtccaggaccacatcctggccagctgctggcagaactcctggctgccgcacgggaactcatgggtgtgttactcagccaccacccaccgctggagccccagctgtgagaacctgcccacttcccaccagcggcgctcctggatcatgcaggcactgggctcctggaagatgtccttgaagaagtgacgtccctgagccccaaaccctcctcagggtggttgagttccagccatgctccctataaatgtcatgtggcttacctctccatct

SEQ ID NO: 431432 - DNA, 4197 bp, Homo sapiens
  misc_feature (2109)..(2109): n is a, c, g, or t
ggcctgggctggggaagcctaggtaagctgaggggcagctctgggaaagtcctaggggtgggggcagtctccacagcctccacaagggagttaccaccttcccgcacttctgggtacaagtctcctgctctggctgtattccacagttagaacttcatatctttggcttagagctgaattttctgttaccatgtggatgctccaggtgaaggggcccgctcctgcttaaaaacaccatgcatgcagactgctgctgggaatgtgacagttggctgttggagagaagggggcactggcattgagagacctccagactggacatggccctgagtccaggggctaacctggtcttccatgaagacccaaagatgacaccaagtcccccctcctgtggggccccgggattagggtctggtaccatccctcagccccacccagacatggctcaggtgcctatgttgaatctgctcccaagtcctggcttggctctcgttccagatcttaatgattctttgagtccagtctcaggggaggcctcaggcctggtgtctgaaaacacccccagacctgatgacagcagagctatcgctccagcctccctccagatcaccagttcttgttctggtgaagccctggacctggattccaaggatgtctcaaggcctgactcacaggggcgcctctgtccagcctcaaaccccattctgagccctagctctactgaggcccctcgtctgagctctgggaaccaccctcagtcaaattctgaagatgccttcaagtgcctctcaagtaagattttcaagttgggtcagagaaactccaacccttctaggcatgaattaaacccatttataaggcaccgttccagagaaggtctggttctgggccactgcatctctaggccaagctcaaaagcactccttattccaacctcaaactcttctctggaccttgactccaatccattgctcaacatgggctcaagaaacacctccaagctgaacctgaatgtagctccagattctcatgggaccctaatcccagacacaaatgagaccatcactttggcttcacataatatctctgagtctgtttcaaaaggagcctttagtaccacctggagcacaagttcaaaggaaaccatgaatgtggcttccagcggccactccagatctgatttgagcgtgaccatcactcaagcctcgtatgtgaccctgattcctggctccagcgatggtatcagcctgcactccagcacccatgggcccaactccaccatctctccaccctcatgcatgactctaatcctgggttccaatgagactctgagcctggactccagcctcctgttcagcgacacctccaccttgacgctgagcagtcagcaggatgatgccaaggacaacagcatccacactgtgcccctggaggagaatctggagagttggagtgagatggccagcattaaggtgggccagttcccgctgggattccccatctccaaccccgcaggcaaggacgccgtgaccttgcaaggcatccctgagggagcctttgatgaagtgacctcatgcctggtgaaggtgccagagaagacagaaggtggcaacaacatggctctggttgagaatgtcaccacccttcagaagagccaggatctgctggaggcagaaggagaaaagaagaccatgataaagaagattatgccacacccagcccaccctgggcatgcgggagaggtcggagctggtgaacgtgtgtgcgcacagcgtgttctccctgccctccgtgcaggcgatgcaggagaaggacgaggccaaggctgagaccatccaggctctttaccatcagaccctggaggccctgcagacactgctcaaagccctctttatcgaggaccccactcctgctgggctgaagagcatcttggaggccctggggccttggatgaactctgggaaggcccatgagcgagcacgggctgtgaacaccaatgtctctgtgttgaaccacatgcttctaactctgcctttctttattgcaatacaaacagatgcccttggggttcccggcgctggggcttctgctggggagactcatccttcncattggggatcctgatgaggagattggctgtgaggctctggacggcatcatcatcctctacactattctggagctccaaaaacgagccagagataaggaagagaccaacaaaaaggagctatatgagagcaacaagcatttcctggggccctacaaccctgtgagcccgtgccagaacattctgcgggtgatcgaggaatttggagacttcctggggccccagcagataaaggacctgctgctggccgccctggaagggctgaaaggcagctcagaggctccagggaaggactccagggagatgatgcagctggcctcggaggtcatgctcagctcggtgctggagtggtaccgccacagggcgctggaggtgatcccagaaatcatgcaaggcatctacatgcagctgagccacatccaggagcctcgggcccgccaggtggccctgctgcccgtctccctcctggctagctccttcatgaccgaggttgtggtggccctgctcatgtgccccctcccactgaacagcaatggagcagagatgtggaggcagctgatactgtgtaagcccagctgtgatgtccgagacctcctggatctgctcctgggcagcctgaaggagaagcccgtcaccaaggagggccgggcttccatcgtgcccctggcggcagccagcggcctgtgcgagctcctgtccgtcaacagctgcatgggccgtgtgaggcgcatctaccctcagctgctcctggccctgctcattcaggtccattaccacatcggcctcaacctgcctggctgcgtggctcctcccaaggacaccaagaagggtgcacagccctctcccttcgtacctgtgcgctgggtggtgaaagtggtgaaaaccctgctactgaggatgggctgctcttatgagaccacgtttctggaggaccagggtggctgggagctcatggagcaggtggagagccaccaccgcggagtggccttgctggcaagctcctccagatggagcaggtgcgccggatccccgaggaatactctctggggcggatggcagaaggcctgagccaccacgaccccatcatgaaggtgctgtccattcgaggcctggtcatcctggcccgcaggtctgagaagaccgccaaggtgaaggccctcctgccctccatggtgaagggcctgaagaacatggatgggatgctggtggtggaagcggtccacaacctcaaggctgtcttcaaggggcgggaccagaagctgatggacagtgcggtctatgtggagatgctgcagatcctgctgccgcacttcagcgacgcacgagaggacgtgcgctcctcctgcatcaacctgtatgggaaggtggtccagaagcttcgggcaccacgcactcaggccatggaggagcagctggtcagcaccttggtgcccctactgctgaccatgcaggagggcaactccaaggtaagccagaagtgtgtgaagaccctgttacgctgttcttacttcatggcttgggagttgccaaaaagagcttatagccggaagccctgggacaaccaacagcagacagtggccaaaatttgcaagtgccttgtgaacacccaccgagacagcgccttcatattcctcagccagagcctggagtatgccaagaactcacgggcctccctccggaagtgctcagtcatgttcatagggtccctggtcccctgcatggagagcataatgacagaagatcgtctgaatgaagtgaaagctgctctggataacttgagacatgacccagaagcatcagtgtgcatctacgcagcccaggtccaggaccacatcctggccagctgctggcagaactcctggctgccgcacgggaactcatgggtgtgttactcagccaccacccaccgctggagccccagctgtgagaacctgcccacttcccaccagcggcgctcctggatcatgcaggcactgggctcctggaagatgtccttgaagaagtgacgtccctgagccccaaaccctcctcagggtggttgagttccagccatgctccctataaatgtcatgtggcttacctctccatct

SEQ ID NO: 431433 - DNA, 3511 bp, Homo sapiens
  misc_feature (2109)..(2109): n is a, c, g, or t
ggcctgggctggggaagcctaggtaagctgaggggcagctctgggaaagtcctaggggtgggggcagtctccacagcctccacaagggagttaccaccttcccgcacttctgggtacaagtctcctgctctggctgtattccacagttagaacttcatatctttggcttagagctgaattttctgttaccatgtggatgctccaggtgaaggggcccgctcctgcttaaaaacaccatgcatgcagactgctgctgggaatgtgacagttggctgttggagagaagggggcactggcattgagagacctccagactggacatggccctgagtccaggggctaacctggtcttccatgaagacccaaagatgacaccaagtcccccctcctgtggggccccgggattagggtctggtaccatccctcagccccacccagacatggctcaggtgcctatgttgaatctgctcccaagtcctggcttggctctcgttccagatcttaatgattctttgagtccagtctcaggggaggcctcaggcctggtgtctgaaaacacccccagacctgatgacagcagagctatcgctccagcctccctccagatcaccagttcttgttctggtgaagccctggacctggattccaaggatgtctcaaggcctgactcacaggggcgcctctgtccagcctcaaaccccattctgagccctagctctactgaggcccctcgtctgagctctgggaaccaccctcagtcaaattctgaagatgccttcaagtgcctctcaagtaagattttcaagttgggtcagagaaactccaacccttctaggcatgaattaaacccatttataaggcaccgttccagagaaggtctggttctgggccactgcatctctaggccaagctcaaaagcactccttattccaacctcaaactcttctctggaccttgactccaatccattgctcaacatgggctcaagaaacacctccaagctgaacctgaatgtagctccagattctcatgggaccctaatcccagacacaaatgagaccatcactttggcttcacataatatctctgagtctgtttcaaaaggagcctttagtaccacctggagcacaagttcaaaggaaaccatgaatgtggcttccagcggccactccagatctgatttgagcgtgaccatcactcaagcctcgtatgtgaccctgattcctggctccagcgatggtatcagcctgcactccagcacccatgggcccaactccaccatctctccaccctcatgcatgactctaatcctgggttccaatgagactctgagcctggactccagcctcctgttcagcgacacctccaccttgacgctgagcagtcagcaggatgatgccaaggacaacagcatccacactgtgcccctggaggagaatctggagagttggagtgagatggccagcattaaggtgggccagttcccgctgggattccccatctccaaccccgcaggcaaggacgccgtgaccttgcaaggcatccctgagggagcctttgatgaagtgacctcatgcctggtgaaggtgccagagaagacagaaggtggcaacaacatggctctggttgagaatgtcaccacccttcagaagagccaggatctgctggaggcagaaggagaaaagaagaccatgataaagaagattatgccacacccagcccaccctgggcatgcgggagaggtcggagctggtgaacgtgtgtgcgcacagcgtgttctccctgccctccgtgcaggcgatgcaggagaaggacgaggccaaggctgagaccatccaggctctttaccatcagaccctggaggccctgcagacactgctcaaagccctctttatcgaggaccccactcctgctgggctgaagagcatcttggaggccctggggccttggatgaactctgggaaggcccatgagcgagcacgggctgtgaacaccaatgtctctgtgttgaaccacatgcttctaactctgcctttctttattgcaatacaaacagatgcccttggggttcccggcgctggggcttctgctggggagactcatccttcncattggggatcctgatgaggagattggctgtgaggctctggacggcatcatcatcctctacactattctggagctccaaaaacgagccagagataaggaagagaccaacaaaaaggagctatatgagagcaacaagcatttcctggggccctacaaccctgtgagcccgtgccagaacattctgcgggtgatcgaggaatttggagacttcctggggccccagcagataaaggacctgctgctggccgccctggaagggctgaaaggcagctcagaggctccagggaaggactccagggagatgatgcagctggcctcggaggtcatgctcagctcggtgctggagtggtaccgccacagggcgctggaggtgatcccagaaatcatgcaaggcatctacatgcagctgagccacatccaggagcctcgggcccgccaggtggccctgctgcccgtctccctcctggctagctccttcatgaccgaggttgtggtggccctgctcatgtgccccctcccactgaacagcaatggagcagagatgtggaggcagctgatactgtgtaagcccagctgtgatgtccgagacctcctggatctgctcctgggcagcctgaaggagaagcccgtcaccaaggagggccgggcttccatcgtgcccctggcggcagccagcggcctgtgcgagctcctgtccgtcaacagctgcatgggccgtgtgaggcgcatctaccctcagctgctcctggccctgctcattcaggtccattaccacatcggcctcaacctgcctggctgcgtggctcctcccaaggacaccaagaagggtgcacagccctctcccttcgtacctgtgcgctgggtggtgaaagtggtgaaaaccctgctactgaggatgggctgctcttatgagaccacgtttctggaggaccagggtggctgggagctcatggagcaggtggagagccaccaccgcggagtggccttgctggcaagggccatggtgcagtactcctgccaggagctgtgccgcatcctctacctgctcatcccgctcctggagcgaggcgacgagaagcacaggatcacggccaccgccttcttcgtggaggtaccaacgggggcagcgggtacacagcgggagctcctcccgggcctcggttcacgtcactggtcatttctcctatgtaaacagtactttatagtttacaaagccttcccatgggcatgacttctcttgactatgatgatcttgttggtctccctccctcccctccctgtctctccaccctttactccattccactcttaaccagactcccctagtgcccagggaaccaccaacctttgctgggcacctctgtgtgtcaggcacgagacatataaatgtgaatttgactct

SEQ ID NO: 431434 - DNA, 3246 bp, Homo sapiens
  misc_feature (1043)..(1043): n is a, c, g, or t
ggcctgggctggggaagcctaggtaagctgaggggcagctctgggaaagtcctaggggtgggggcagtctccacagcctccacaagggagttaccaccttcccgcacttctgggtacaagtctcctgctctggctgtattccacagttagaacttcatatctttggcttagagctgaattttctgttaccatgtggatgctccaggtgaaggagcctttgatgaagtgacctcatgcctggtgaaggtgccagagaagacagaaggtggcaacaacatggctctggacagtcaggcccaacccaggtctgggccatgtggcaggctcaggaggcccaagaagaccagtccagcaggtgaggcacacttgcatctgcaggacttggagatggccagtggggaagactagacaaaccggtggacgtgagtgcgacacagggagtgtggacaaggctgcttgatggacacaatgtggaggaggttgagaatgtcaccacccttcagaagagccaggatctgctggaggcagaaggagaaaagaagaccatgataaagaagattatgaggcagatccaggaggagccactggattctctctcaagctccgtccgcaagcaggccatggagatcctgacccagctgagccacacccagcccaccctgggcatgcgggagaggtcggagctggtgaacgtgtgtgcgcacagcgtgttctccctgccctccgtgcaggcgatgcaggagaaggacgaggccaaggctgagaccatccaggctctttaccatcagaccctggaggccctgcagacactgctcaaagccctctttatcgaggaccccactcctgctgggctgaagagcatcttggaggccctggggccttggatgaactctgggaaggcccatgagcgagcacgggctgtgaacaccaatgtctctgtgttgaaccacatgcttctaactctgcctttctttattgcaatacaaacagatgcccttggggttcccggcgctggggcttctgctggggagactcatccttcncattggggatcctgatgaggagattggctgtgaggctctggacggcatcatcatcctctacactattctggagctccaaaaacgagccagagataaggaagagaccaacaaaaaggagctatatgagagcaacaagcatttcctggggccctacaaccctgtgagcccgtgccagaacattctgcgggtgatcgaggaatttggagacttcctggggccccagcagataaaggacctgctgctggccgccctggaagggctgaaaggcagctcagaggctccagggaaggactccagggagatgatgcagctggcctcggaggtcatgctcagctcggtgctggagtggtaccgccacagggcgctggaggtgatcccagaaatcatgcaaggcatctacatgcagctgagccacatccaggagcctcgggcccgccaggtggccctgctgcccgtctccctcctggctagctccttcatgaccgaggttgtggtggccctgctcatgtgccccctcccactgaacagcaatggagcagagatgtggaggcagctgatactgtgtaagcccagctgtgatgtccgagacctcctggatctgctcctgggcagcctgaaggagaagcccgtcaccaaggagggccgggcttccatcgtgcccctggcggcagccagcggcctgtgcgagctcctgtccgtcaacagctgcatgggccgtgtgaggcgcatctaccctcagctgctcctggccctgctcattcaggtccattaccacatcggcctcaacctgcctggctgcgtggctcctcccaaggacaccaagaagggtgcacagccctctcccttcgtacctgtgcgctgggtggtgaaagtggtgaaaaccctgctactgaggatgggctgctcttatgagaccacgtttctggaggaccagggtggctgggagctcatggagcaggtggagagccaccaccgcggagtggccttgctggcaagggccatggtgcagtactcctgccaggagctgtgccgcatcctctacctgctcatcccgctcctggagcgaggcgacgagaagcacaggatcacggccaccgccttcttcgtggagctcctccagatggagcaggtgcgccggatccccgaggaatactctctggggcggatggcagaaggcctgagccaccacgaccccatcatgaaggtgctgtccattcgaggcctggtcatcctggcccgcaggtctgagaagaccgccaaggtgaaggccctcctgccctccatggtgaagggcctgaagaacatggatgggatgctggtggtggaagcggtccacaacctcaaggctgtcttcaaggggcgggaccagaagctgatggacagtgcggtctatgtggagatgctgcagatcctgctgccgcacttcagcgacgcacgagaggacgtgcgctcctcctgcatcaacctgtatgggaaggtggtccagaagcttcgggcaccacgcactcaggccatggaggagcagctggtcagcaccttggtgcccctactgctgaccatgcaggagggcaactccaaggtaagccagaagtgtgtgaagaccctgttacgctgttcttacttcatggcttgggagttgccaaaaagagcttatagccggaagccctgggacaaccaacagcagacagtggccaaaatttgcaagtgccttgtgaacacccaccgagacagcgccttcatattcctcagccagagcctggagtatgccaagaactcacgggcctccctccggaagtgctcagtcatgttcatagggtccctggtcccctgcatggagagcataatgacagaagatcgtctgaatgaagtgaaagctgctctggataacttgagacatgacccagaagcatcagtgtgcatctacgcagcccaggtccaggaccacatcctggccagctgctggcagaactcctggctgccgcacgggaactcatgggtgtgttactcagccaccacccaccgctggagccccagctgtgagaacctgcccacttcccaccagcggcgctcctggatcatgcaggcactgggctcctggaagatgtccttgaagaagtgacgtccctgagccccaaaccctcctcagggtggttgagttccagccatgctccctataaatgtcatgtggcttacctctccatct

SEQ ID NO: 431435 - DNA, 2498 bp, Homo sapiens
  misc_feature (295)..(295): n is a, c, g, or t
ggcttggtcctcctcccatccacaggctctttaccatcagaccctggaggccctgcagacactgctcaaagccctctttatcgaggaccccactcctgctgggctgaagagcatcttggaggccctggggccttggatgaactctgggaaggcccatgagcgagcacgggctgtgaacaccaatgtctctgtgttgaaccacatgcttctaactctgcctttctttattgcaatacaaacagatgcccttggggttcccggcgctggggcttctgctggggagactcatccttcncattggggatcctgatgaggagattggctgtgaggctctggacggcatcatcatcctctacactattctggagctccaaaaacgagccagagataaggaagagaccaacaaaaaggagctatatgagagcaacaagcatttcctggggccctacaaccctgtgagcccgtgccagaacattctgcgggtgatcgaggaatttggagacttcctggggccccagcagataaaggacctgctgctggccgccctggaagggctgaaaggcagctcagaggctccagggaaggactccagggagatgatgcagctggcctcggaggtcatgctcagctcggtgctggagtggtaccgccacagggcgctggaggtgatcccagaaatcatgcaaggcatctacatgcagctgagccacatccaggagcctcgggcccgccaggtggccctgctgcccgtctccctcctggctagctccttcatgaccgaggttgtggtggccctgctcatgtgccccctcccactgaacagcaatggagcagagatgtggaggcagctgatactgtgtaagcccagctgtgatgtccgagacctcctggatctgctcctgggcagcctgaaggagaagcccgtcaccaaggagggccgggcttccatcgtgcccctggcggcagccagcggcctgtgcgagctcctgtccgtcaacagctgcatgggccgtgtgaggcgcatctaccctcagctgctcctggccctgctcattcaggtccattaccacatcggcctcaacctgcctggctgcgtggctcctcccaaggacaccaagaagggtgcacagccctctcccttcgtacctgtgcgctgggtggtgaaagtggtgaaaaccctgctactgaggatgggctgctcttatgagaccacgtttctggaggaccagggtggctgggagctcatggagcaggtggagagccaccaccgcggagtggccttgctggcaagggccatggtgcagtactcctgccaggagctgtgccgcatcctctacctgctcatcccgctcctggagcgaggcgacgagaagcacaggatcacggccaccgccttcttcgtggagctcctccagatggagcaggtgcgccggatccccgaggaatactctctggggcggatggcagaaggcctgagccaccacgaccccatcatgaaggtgctgtccattcgaggcctggtcatcctggcccgcaggtctgagaagaccgccaaggtgaaggccctcctgccctccatggtgaagggcctgaagaacatggatgggatgctggtggtggaagcggtccacaacctcaaggctgtcttcaaggggcgggaccagaagctgatggacagtgcggtctatgtggagatgctgcagatcctgctgccgcacttcagcgacgcacgagaggacgtgcgctcctcctgcatcaacctgtatgggaaggtggtccagaagcttcgggcaccacgcactcaggccatggaggagcagctggtcagcaccttggtgcccctactgctgaccatgcaggagggcaactccaaggtaagccagaagtgtgtgaagaccctgttacgctgttcttacttcatggcttgggagttgccaaaaagagcttatagccggaagccctgggacaaccaacagcagacagtggccaaaatttgcaagtgccttgtgaacacccaccgagacagcgccttcatattcctcagccagagcctggagtatgccaagaactcacgggcctccctccggaagtgctcagtcatgttcatagggtccctggtcccctgcatggagagcataatgacagaagatcgtctgaatgaagtgaaagctgctctggataacttgagacatgacccagaagcatcagtgtgcatctacgcagcccaggtccaggaccacatcctggccagctgctggcagaactcctggctgccgcacgggaactcatgggtgtgttactcagccaccacccaccgctggagccccagctgtgagaacctgcccacttcccaccagcggcgctcctggatcatgcaggcactgggctcctggaagatgtccttgaagaagtgacgtccctgagccccaaaccctcctcagggtggttgagttccagccatgctccctataaatgtcatgtggcttacctctccatct

SEQ ID NO: 431436 - DNA, 1643 bp, Homo sapiens
ggcctgggctggggaagcctaggtaagctgaggggcagctctgggaaagtcctaggggtgggggcagtctccacagcctccacaagggagttaccaccttcccgcacttctgggtacaagtctcctgctctggctgtattccacagttagaacttcatatctttggcttagagctgaattttctgttaccatgtggatgctccaggtgaaggggcccgctcctgcttaaaaacaccatgcatgcagactgctgctgggaatgtgacagttggctgttggagagaagggggcactggcattgagagacctccagactggacatggccctgagtccaggggctaacctggtcttccatgaagacccaaagatgacaccaagtcccccctcctgtggggccccgggattagggtctggtaccatccctcagccccacccagacatggctcaggtgcctatgttgaatctgctcccaagtcctggcttggctctcgttccagatcttaatgattctttgagtccagtctcaggggaggcctcaggcctggtgtctgaaaacacccccagacctgatgacagcagagctatcgctccagcctccctccagatcaccagttcttgttctggtgaagccctggacctggattccaaggatgtctcaaggcctgactcacaggggcgcctctgtccagcctcaaaccccattctgagccctagctctactgaggcccctcgtctgagctctgggaaccaccctcagtcaaattctgaagatgccttcaagtgcctctcaagtaagattttcaagttgggtcagagaaactccaacccttctaggcatgaattaaacccatttataaggcaccgttccagagaaggtctggttctgggccactgcatctctaggccaagctcaaaagcactccttattccaacctcaaactcttctctggaccttgactccaatccattgctcaacatgggctcaagaaacacctccaagctgaacctgaatgtagctccagattctcatgggaccctaatcccagacacaaatgagaccatcactttggcttcacataatatctctgagtctgtttcaaaaggagcctttagtaccacctggagcacaagttcaaaggaaaccatgaatgtggcttccagcggccactccagatctgatttgagcgtgaccatcactcaagcctcgtatgtgaccctgattcctggctccagcgatggtatcagcctgcactccagcacccatgggcccaactccaccatctctccaccctcatgcatgactctaatcctgggttccaatgagactctgagcctggactccagcctcctgttcagcgacacctccaccttgacgctgagcagtcagcaggatgatgccaaggacaacagcatccacactgtgcccctggaggagaatctggagagttggagtgagatggccagcattaaggtgggccagttcccgctgggattccccatctccaaccccgcaggcaaggacgccgtgaccttgcaaggcatccctgaggatggagtctcactctgttgcccaggctggagtgtaatggcacaatctcggctcactgcaacctccaccttcggggttcaagcaattctcctg

SEQ ID NO: 431437 - DNA, 2125 bp, Homo sapiens
ggcctgggctggggaagcctaggtaagctgaggggcagctctgggaaagtcctaggggtgggggcagtctccacagcctccacaagggagttaccaccttcccgcacttctgggtacaagtctcctgctctggctgtattccacagttagaacttcatatctttggcttagagctgaattttctgttaccatgtggatgctccaggtgaaggggcccgctcctgcttaaaaacaccatgcatgcagactgctgctgggaatgtgacagttggctgttggagagaagggggcactggcattgagagacctccagactggacatggccctgagtccaggggctaacctggtcttccatgaagacccaaagatgacaccaagtcccccctcctgtggggccccgggattagggtctggtaccatccctcagccccacccagacatggctcaggtgcctatgttgaatctgctcccaagtcctggcttggctctcgttccagatcttaatgattctttgagtccagtctcaggggaggcctcaggcctggtgtctgaaaacacccccagacctgatgacagcagagctatcgctccagcctccctccagatcaccagttcttgttctggtgaagccctggacctggattccaaggatgtctcaaggcctgactcacaggggcgcctctgtccagcctcaaaccccattctgagccctagctctactgaggcccctcgtctgagctctgggaaccaccctcagtcaaattctgaagatgccttcaagtgcctctcaagtaagattttcaagttgggtcagagaaactccaacccttctaggcatgaattaaacccatttataaggcaccgttccagagaaggtctggttctgggccactgcatctctaggccaagctcaaaagcactccttattccaacctcaaactcttctctggaccttgactccaatccattgctcaacatgggctcaagaaacacctccaagctgaacctgaatgtagctccagattctcatgggaccctaatcccagacacaaatgagaccatcactttggcttcacataatatctctgagtctgtttcaaaaggagcctttagtaccacctggagcacaagttcaaaggaaaccatgaatgtggcttccagcggccactccagatctgatttgagcgtgaccatcactcaagcctcgtatgtgaccctgattcctggctccagcgatggtatcagcctgcactccagcacccatgggcccaactccaccatctctccaccctcatgcatgactctaatcctgggttccaatgagactctgagcctggactccagcctcctgttcagcgacacctccaccttgacgctgagcagtcagcaggatgatgccaaggacaacagcatccacactgtgcccctggaggagaatctggagagttggagtgagatggccagcattaaggtgggccagttcccgctgggattccccatctccaaccccgcaggcaaggacgccgtgaccttgcaaggcatccctgagggagcctttgatgaagtgacctcatgcctggtgaaggtgccagagaagacagaaggtggcaacaacatggctctggttgagaatgtcaccacccttcagaagagccaggatctgctggaggcagaaggagaaaagaagaccatgataaagaagattatgaggcagatccaggaggagccactggattctctctcaagctccgtccgcaagcaggccatggagatcctgacccagctgagccacacccagcccaccctgggcatgcgggagaggtcggagctggtgaacgtgtgtgcgcacagcgtgttctccctgccctccgtgcaggcgatgcaggagaaggacgaggccaaggctgagaccatccaggctctttaccatcagaccctggaggccctgcagacactgctcaaagccctctttatcgaggaccccactcctgctgggctgaagagcatcttggaggggcccgctcctgcttaaaaacaccatgcatgcagactgctgctgggaatgtgacagttggctgttggagagaagggggcactggcattgagagactccagactggacat

SEQ ID NO: 431438 - DNA, 2142 bp, Homo sapiens
ggcctgggctggggaagcctaggtaagctgaggggcagctctgggaaagtcctaggggtgggggcagtctccacagcctccacaagggagttaccaccttcccgcacttctgggtacaagtctcctgctctggctgtattccacagttagaacttcatatctttggcttagagctgaattttctgttaccatgtggatgctccaggtgaaggggcccgctcctgcttaaaaacaccatgcatgcagactgctgctgggaatgtgacagttggctgttggagagaagggggcactggcattgagagacctccagactggacatggccctgagtccaggggctaacctggtcttccatgaagacccaaagatgacaccaagtcccccctcctgtggggccccgggattagggtctggtaccatccctcagccccacccagacatggctcaggtgcctatgttgaatctgctcccaagtcctggcttggctctcgttccagatcttaatgattctttgagtccagtctcaggggaggcctcaggcctggtgtctgaaaacacccccagacctgatgacagcagagctatcgctccagcctccctccagatcaccagttcttgttctggtgaagccctggacctggattccaaggatgtctcaaggcctgactcacaggggcgcctctgtccagcctcaaaccccattctgagccctagctctactgaggcccctcgtctgagctctgggaaccaccctcagtcaaattctgaagatgccttcaagtgcctctcaagtaagattttcaagttgggtcagagaaactccaacccttctaggcatgaattaaacccatttataaggcaccgttccagagaaggtctggttctgggccactgcatctctaggccaagctcaaaagcactccttattccaacctcaaactcttctctggaccttgactccaatccattgctcaacatgggctcaagaaacacctccaagctgaacctgaatgtagctccagattctcatgggaccctaatcccagacacaaatgagaccatcactttggcttcacataatatctctgagtctgtttcaaaaggagcctttagtaccacctggagcacaagttcaaaggaaaccatgaatgtggcttccagcggccactccagatctgatttgagcgtgaccatcactcaagcctcgtatgtgaccctgattcctggctccagcgatggtatcagcctgcactccagcacccatgggcccaactccaccatctctccaccctcatgcatgactctaatcctgggttccaatgagactctgagcctggactccagcctcctgttcagcgacacctccaccttgacgctgagcagtcagcaggatgatgccaaggacaacagcatccacactgtgcccctggaggagaatctggagagttggagtgagatggccagcattaaggtgggccagttcccgctgggattccccatctccaaccccgcaggcaaggacgccgtgaccttgcaaggcatccctgagggagcctttgatgaagtgacctcatgcctggtgaaggtgccagagaagacagaaggtggcaacaacatggctctggttgagaatgtcaccacccttcagaagagccaggatctgctggaggcagaaggagaaaagaagaccatgataaagaagattatgccacacccagcccaccctgggcatgcgggagaggtcggagctggtgaacgtgtgtgcgcacagcgtgttctccctgccctccgtgcaggcgatgcaggagaaggacgaggccaaggctgagaccatccaggtgaggcgggaccttcccagcagggcctcagggctggcccatgttctgggaggagatatggagctgcatcctccggctcattggtctgtggccttgggcaattcaactgacttctgttggtctgagtaggtacttgataaatggtgaagggatgaatcattcaaataaagacacccagctgggcgcggtggctcacacctgtaatcccagcactttgggaggctgagccgggtggatcacgaggtcaggagactgagaccatcctggctaacacggtgaatccccgtctctactgaaaatata

SEQ ID NO: 431439 - DNA, 619 bp, Homo sapiens
gggcccgctcctgcttaaaaacaccatgcatgcaggtgagctgtccctatgattcccacagggagggtagccccagattgagggtaggggtgctgggaggactggggagttcatccagcagttagattgctgtgttaaggcaggtgtttgacagctgccctatggtctcctccacagagcccacttcacccggaacaagcaaactgttaaggctataggcagctttgccagggttgctgtgagaatctagtgccatgagtactggcagagtagttctagcaacttaggagtttgtctctggtttagagcaccccaatcttgcaaggctcagggctccttgttggtgcacttaggttaccctgtcacatgtggccagctggaagtggggtaactcataaggaggctcttccttccctttttctgccttaaagtagaagagactcctcatttgtctatttgtaagcttccaactgtgtaactggcactgggctaggagctggggttgccccaggggccaaggtatacacagttcttgtcattgcaaagctcatctctagcaagagctagaacactaaatgaattcactggaatgaaatgtgctgagtattttgctagaagt

SEQ ID NO: 431440 - DNA, 2089 bp, Homo sapiens
tccgagacgagcctttccggtgctatgccccggaagcggaagtgcgatcttcgggctgtcagagttggtctgttactcggtggtggcggagtctacggaagccgttttcgcttcacttttcctggctgtagagcgctttccccctggcgggtgagagtgcagagacgaaggtgcgagatgagcactatgttcgcggacactctcctcatcgtttttatctctgtgtgcacggctctgctcgcagagggcataacctgggtcctggtttacaggacagacaagtacaagagactgaaggcagaagtggaaaaacagagtaaaaaattggaaaagaagaaggaaacaataacagagtcagctggtcgacaacagaaaaagaaaatagagagacaagaagagaaactgaagaataacaacagagatctatcaatggttcgaatgaaatccatgtttgctattggcttttgttttactgccctaatgggaatgttcaattccatatttgatggtagagtggtggcaaagcttccttttacccctctttcttacatccaaggactgtctcatcgaaatctgctgggagatgacaccacagactgttccttcattttcctgtatattctctgtactatgtcgattcgacagaacattcagaagattctcggccttgccccttcacgagccgccaccaagcaggcaggtggatttcttggcccaccacctccttctgggaagttctcttgaactcaagaactctttattttctatcattctttctagacacacacacatcagactggcaactgttttgtagcaagagccataggtagccttactacttgggcctctttctagttttgaattatttctaagccttttgggtatgattagagtgaaaatggcagccagcaaacttgatagtgcttttggtcctagatgatttttatcaaataagtggattgattagttaagttcaggtaatgtttatgtaatgaaaaacaaatagcatccttcttgtttcatttacataagtattttctgtgggaccgactctcaaggcactgtgtatgccctgcaagttggctgtctatgagcatttagagatttagaagaaaaatttagtttgtttaacccttgtaactgtttgttttgttgttgtttttttttcaagccaaatacatgacataagatcaataaagaggccaaatttttagctgttttatgtacaaggagagatctgtttcattttgttttgccgtatttctagatataagttttagcatgggccaggaaggactaaaataaaagtttttaaggtactgtactttttgccatacttgactcatatactcaaaatacagagttgtcttggtgtaggaattggaaagcaagagtggaaaggaacgtaataactcgttggagtttaaaaatgagggtcttggcaagtaacactgatgtctgaaaaaaaattaaatataaataaataaataaaaatgagggtcctcagctgttctcttcatatcctattacagtctctcagattcttgtgggggcactcttagatctcccttggagacaaggttatagttatatgttgttaatctcgcagagcttccttttagtcacaatagccttcattttctgccatgccccttcataagggagaaggatgtttgtaccatgatcctccccgcataatctatggaattaggagtcctgtgtggagtcttatcaataaatatgcacattcatcaaatgtctacttaaatgtgagtattctaccagtgagaaaaaacacataattttcaaggtaatcattgttaaaccaacagcaaacttctttcttatcagcaccataaagtccagaagacagtagaaaagtatcttcaaagtgctgaggaaaataagtatcaacttagaattttatgtacaatattggaggcaaaataaagacatgtttagacatacaaaactaagagagttgaattattaaaggttatattccaaggacaaaaaagaggatctgcccaaggtgaaggtatggcatacaagaaacaatggtcaacagagaaataaaatatatggatga

SEQ ID NO: 431441 - DNA, 1324 bp, Homo sapiens
tccgagacgagcctttccggtgctatgccccggaagcggaagtgcgatcttcgggctgtcagagttggtctgttactcggtggtggcggagtctacggaagccgttttcgcttcacttttcctggctgtagagcgctttccccctggcgggtgagagtgcagagacgaaggtgcgagatgagcactatgttcgcggacactctcctcatcgtttttatctctgtgtgcacggctctgctcgcagagggcataacctgggtcctggtttacaggacagacaagtacaagagactgaaggcagaagtggaaaaacagagtaaaaaattggaaaagaagaaggaaacaataacagagtcagctggtcgacaacagaaaaagaaaatagagagacaagaagagaaactgaagaataacaacagagatctatcaatggttcgaatgaaatccatgtttgctattggcttttgttttactgccctaatgggaatgttcaattccatatttgatggtagagtggtggcaaagcttccttttacccctctttcttacatccaaggactgtctcatcgaaatctgctgggagatgacaccacagactgttccttcattttcctgtatattctctgtactatgtcgattcgacagaacattcagaagattctcggccttgccccttcacgagccgccaccaagcaggcaggtggatttcttggcccaccacctccttctgggaagttctcttgaactcaagaactctttattttctatcattctttctagacacacacacatcagactggcaactgttttgtagcaagagccataggtagccttactacttgggcctctttctagttttgaattatttctaagccttttgggtatgattagagtgaaaatggcagccagcaaacttgatagtgcttttggtcctagatgatttttatcaaataagtggattgattagttaagttcaggtaatgtttatgtaatgaaaaacaaatagcatccttcttgtttcatttacataagtattttctgtgggaccgactctcaaggcactgtgtatgccctgcaagttggctgtctatgagcatttagagatttagaagaaaaatttagtttgtttaacccttgtaactgtttgttttgttgttgtttttttttcaagccaaatacatgacataagatcaataaagaggccaaatttttagctgttttatgtacaaggagagatctgtttcattttgttttgccgtatttctagatataagttttagcatgggccaggaaggactaaaataaaagtttttaaggtactgta

SEQ ID NO: 431442 - DNA, 1317 bp, Homo sapiens
agcacagaggaggtggacagctggacagcatcagatggaggacagcacagaggggacagcacagaggatggagcacagaggaggtggacagcacagaggaggtggacaccacagaggaggtggacagcacagaggaggtggacagcacaggttggtctgttactcggtggtggcggagtctacggaagccgttttcgcttcacttttcctggctgtagagcgctttccccctggcgggtgagagtgcagagacgaaggtgcgagatgagcactatgttcgcggacactctcctcatcgtttttatctctgtgtgcacggctctgctcgcagagggcataacctgggtcctggtttacaggacagacaagtacaagagactgaaggcagaagtggaaaaacagagtaaaaaattggaaaagaagaaggaaacaataacagagtcagctggtcgacaacagaaaaagaaaatagagagacaagaagagaaactgaagaataacaacagagatctatcaatggttcgaatgaaatccatgtttgctattggcttttgttttactgccctaatgggaatgttcaattccatatttgatggtagagtggtggcaaagcttccttttacccctctttcttacatccaaggactgtctcatcgaaatctgctgggagatgacaccacagactgttccttcattttcctgtatattctctgtactatgtcgattcgacagaacattcagaagattctcggccttgccccttcacgagccgccaccaagcaggcaggtggatttcttggcccaccacctccttctgggaagttctcttgaactcaagaactctttattttctatcattctttctagacacacacacatcagactggcaactgttttgtagcaagagccataggtagccttactacttgggcctctttctagttttgaattatttctaagccttttgggtatgattagagtgaaaatggcagccagcaaacttgatagtgcttttggtcctagatgatttttatcaaataagtggattgattagttaagttcaggtaatgtttatgtaatgaaaaacaaatagcatccttcttgtttcatttacataagtattttctgtgggaccgactctcaaggcactgtgtatgccctgcaagttggctgtctatgagcatttagagatttagaagaaaaatttagtttgtttaacccttgtaactgtttgttttgttgttgtttttttttcaagccaaatacatgacataagatcaataaagaggccaaatttttagctgttttatgtacaag

SEQ ID NO: 431443 - DNA, 1491 bp, Homo sapiens
tccgagacgagcctttccggtgctatgccccggaagcggaagtgcgatcttcgggctgtcagagttggtctgttactcggtggtggcggagtctacggaagccgttttcgcttcacttttcctggctgtagagcgctttccccctggcgggtgagagtgcagagacgaaggtgcgagatgagcactatgttcgcggacactctcctcatcgtttttatctctgtgtgcacggctctgctcgcagagggcataacctgggtcctggtttacaggacagacaagtacaagagactgaaggcagaagtggaaaaacagagtaaaaaattggaaaagaagaaggaaacaataacagagtcagctggtcgacaacagaaaaagaaaatagagagacaagaagagaaactgaagaataacaacagagatctatcaatggttcgaatgaaatccatgtttgctattggcttttgttttactgccctaatgggaatgttcaattccatatttgatggtagagtggtggcaaagcttccttttacccctctttcttacatccaaggactgtctcatcgaaatctgctgggagatgacaccacagactgttccttcattttcctgtatattctctgtactatgtcgattcgacagaacattcagaagattctcggccttgccccttcacgagccgccaccaagcaggcaggtggatttcttggcccaccacctccttctgggaagttctcttgaactcaagaactctttattttctatcattctttctagacacacacacatcagactggcaactgttttgtagcaagagccataggtagccttactacttgggcctctttctagttttgaattatttctaagccttttgggtatgattagagtgaaaatggcagccagcaaacttgatagtgcttttggtcctagatgatttttatcaaataagtggattgattagttaagttcaggtaatgtttatgtaatgaaaaacaaatagcatccttcttgtttcatttacataagtattttctgtgggaccgactctcaaggcactgtgtatgccctgcaagttggctgtctatgagcatttagagatttagaagaaaaatttagtttgtttaacccttgtaactgtttgttttgttgttgtttttttttcaagccaaatacatgacataagatcaataaagaggccaaatttttagctgttttatgtacaagcacaccacgccaacaacccccgcggcctcctctctcggctgcgcaaagccgctcatgcactgcccctggccatgctgctccctggcccagtctcctgtccagggaggattcccggccccatataggggccgttcattcacaccagtacgactcctccccgcgccaccctcccccgcccccccccccgcccccccccccccctccgccccctccccctccccccacgctttccctcccccctcctctcctcctccgcctccc

SEQ ID NO: 431444 - DNA, 1512 bp, Homo sapiens
attctcataatcgcccacgagcttacatcctcattactattctgcctagcaaactccaactacgaaagcggcatcttcccgatgaagatgccgttttcggggcggtgatgtagagggtgatggtagatgtggcgggttttaggggctctttggtgaagagttttatggcgtcagcgtagggttgtagtagcccataggggcctacaacgttggggcctttgcgtagttgtatatagcctagaatttttcgttcggtaagcattaggaatgccattgcgattagaatgggtacaatgaggagtaggaggttggccatgggtatgttgttaagaagaggaattgaacctctgcgaaaacggcatcttcgtcggccgatgaagatgccgttttcgcttcacttttcctggctgtagagcgctttccccctggcgggtgagagtgcagagacgaaggtgcgagatgagcactatgttcgcggacactctcctcatcgtttttatctctgtgtgcacggctctgctcgcagagggcataacctgggtcctggtttacaggacagacaagtacaagagactgaaggcagaagtggaaaaacagagtaaaaaattggaaaagaagaaggaaacaataacagagtcagctggtcgacaacagaaaaagaaaatagagagacaagaagagaaactgaagaataacaacagagatctatcaatggttcgaatgaaatccatgtttgctattggcttttgttttactgccctaatgggaatgttcaattccatatttgatggtagagtggtggcaaagcttccttttacccctctttcttacatccaaggactgtctcatcgaaatctgctgggagatgacaccacagactgttccttcattttcctgtatattctctgtactatgtcgattcgacagaacattcagaagattctcggccttgccccttcacgagccgccaccaagcaggcaggtggatttcttggcccaccacctccttctgggaagttctcttgaactcaagaactctttattttctatcattctttctagacacacacacatcagactggcaactgttttgtagcaagagccataggtagccttactacttgggcctctttctagttttgaattatttctaagccttttgggtatgattagagtgaaaatggcagccagcaaacttgatagtgcttttggtcctagatgatttttatcaaataagtggattgattagttaagttcaggtaatgtttatgtaatgaaaaacaaatagcatccttcttgtttcatttacataagtattttctgtgggaccgactctcaaggcactgtgtatgccctgcaagttggctgtctatgagcatttagagatttagaagaaaaatttagtttgtttaacccttgtaactgtttgttttgttgttgtttttttttcaagccaaatacatgacataagatcaataaagaggccaaatttttagctgttttatgtacaag

SEQ ID NO: 431445 - DNA, 1153 bp, Homo sapiens
tccgagacgagcctttccggtgctatgccccggaagcggaagtgcgatcttcgggctgtcagagttggtctgttactcggtggtggcggagtctacggaagccgttttcgcttcacttttcctggctgtagagcgctttccccctggcgggtgagagtgcagagacgaaggcataacctgggtcctggtttacaggacagacaagtacaagagactgaaggcagaagtggaaaaacagagtaaaaaattggaaaagaagaaggaaacaataacagagtcagctggtcgacaacagaaaaagaaaatagagagacaagaagagaaactgaagaataacaacagagatctatcaatggttcgaatgaaatccatgtttgctattggcttttgttttactgccctaatgggaatgttcaattccatatttgatggtagagtggtggcaaagcttccttttacccctctttcttacatccaaggactgtctcatcgaaatctgctgggagatgacaccacagactgttccttcattttcctgtatattctctgtactatgtcgattcgacagaacattcagaagattctcggccttgccccttcacgagccgccaccaagcaggcaggtggatttcttggcccaccacctccttctgggaagttctcttgaactcaagaactctttattttctatcattctttctagacacacacacatcagactggcaactgttttgtagcaagagccataggtagccttactacttgggcctctttctagttttgaattatttctaagccttttgggtatgattagagtgaaaatggcagccagcaaacttgatagtgcttttggtcctagatgatttttatcaaataagtggattgattagttaagttcaggtaatgtttatgtaatgaaaaacaaatagcatccttcttgtttcatttacataagtattttctgtgggaccgactctcaaggcactgtgtatgccctgcaagttggctgtctatgagcatttagagatttagaagaaaaatttagtttgtttaacccttgtaactgtttgttttgttgttgtttttttttcaagccaaatacatgacataagatcaataaagaggccaaatttttagctgttttatgtacaag

SEQ ID NO: 431446 - DNA, 1517 bp, Homo sapiens
agcacagaggaggtggacagctggacagcatcagatggaggacagcacagaggggacagcacagaggatggagcacagaggaggtggacagcacagaggaggtggacaccacagaggaggtggacagcacagaggaggtggacagcacaggttggtctgttactcggtggtggcggagtctacggaagccgttttcgcttcacttttcctggctgtagagcgctttccccctggcgggtgagagtgcagagacgaaggtgcgagatgagcactatgttcgcggacactctcctcatcgtttttatctctgtgtgcacggctctgctcgcagagggtgagagcgggtatttctcagacgtttgatcagtccccgggaggaagggccccggggtcccctgtgccaccaggggaaagatcgcgagccttacttgcttgagaggctcatctactccacttcagggaatctctgggcaactcgtgaacaggagcaggaggggagtatggagtcgattgccgagttttctttggtctcaggcataacctgggtcctggtttacaggacagacaagtacaagagactgaaggcagaagtggaaaaacagagtaaaaaattggaaaagaagaaggaaacaataacagagtcagctggtcgacaacagaaaaagaaaatagagagacaagaagagaaactgaagaataacaacagagatctatcaatggttcgaatgaaatccatgtttgctattggcttttgttttactgccctaatgggaatgttcaattccatatttgatggtagagtggtggcaaagcttccttttacccctctttcttacatccaaggactgtctcatcgaaatctgctgggagatgacaccacagactgttccttcattttcctgtatattctctgtactatgtcgattcgacagaacattcagaagattctcggccttgccccttcacgagccgccaccaagcaggcaggtggatttcttggcccaccacctccttctgggaagttctcttgaactcaagaactctttattttctatcattctttctagacacacacacatcagactggcaactgttttgtagcaagagccataggtagccttactacttgggcctctttctagttttgaattatttctaagccttttgggtatgattagagtgaaaatggcagccagcaaacttgatagtgcttttggtcctagatgatttttatcaaataagtggattgattagttaagttcaggtaatgtttatgtaatgaaaaacaaatagcatccttcttgtttcatttacataagtattttctgtgggaccgactctcaaggcactgtgtatgccctgcaagttggctgtctatgagcatttagagatttagaagaaaaatttagtttgtttaacccttgtaactgtttgttttgttgttgtttttttttcaagccaaatacatgacataagatcaataaagaggccaaatttttagctgttttatgtacaag

SEQ ID NO: 431447 - DNA, 1367 bp, Homo sapiens
tccgagacgagcctttccggtgctatgccccggaagcggaagtgcgatcttcgggctgtcagagttggtctgttactcggtggtggcggagtctacggaagccgttttcgcttcacttttcctggctgtagagcgctttccccctggcgggtgagagtgcagagacgaaggtgcgagatgagcactatgttcgcggacactctcctcatcgtttttatctctgtgtgcacggctctgctcgcagagggcataacctgggtcctggtttacaggacagacaagtacaagagactgaaggcagaagtggaaaaacagagtaaaaaattggaaaagaagaaggaaacaataacagagtcagctggtcgacaacagaaaaagaaaatagacagagtctcaccctatcgcccaggctggagcacagtgacgcgttcatggcccactgcagcctcaaactcctgggctcaagtaatcctcccactgtagcctcccaagtagctgggactacaggggcacaccatcacgagagacaagaagagaaactgaagaataacaacagagatctatcaatggttcgaatgaaatccatgtttgctattggcttttgttttactgccctaatgggaatgttcaattccatatttgatggtagagtggtggcaaagcttccttttacccctctttcttacatccaaggactgtctcatcgaaatctgctgggagatgacaccacagactgttccttcattttcctgtatattctctgtactatgtcgattcgacagaacattcagaagattctcggccttgccccttcacgagccgccaccaagcaggcaggtggatttcttggcccaccacctccttctgggaagttctcttgaactcaagaactctttattttctatcattctttctagacacacacacatcagactggcaactgttttgtagcaagagccataggtagccttactacttgggcctctttctagttttgaattatttctaagccttttgggtatgattagagtgaaaatggcagccagcaaacttgatagtgcttttggtcctagatgatttttatcaaataagtggattgattagttaagttcaggtaatgtttatgtaatgaaaaacaaatagcatccttcttgtttcatttacataagtattttctgtgggaccgactctcaaggcactgtgtatgccctgcaagttggctgtctatgagcatttagagatttagaagaaaaatttagtttgtttaacccttgtaactgtttgttttgttgttgtttttttttcaagccaaatacatgacataagatcaataaagaggccaaatttttagctgttttatgtacaag

SEQ ID NO: 431448 - DNA, 1851 bp, Homo sapiens
  misc_feature (75)..(75): n is a, c, g, or t
  misc_feature (207)..(207): n is a, c, g, or t
  misc_feature (217)..(217): n is a, c, g, or t
ttgtcgcagtctagctggtgtttctctcatttcgttcttgtgtgctctgtttgtgtttcgtgcgcggagctgtgngttgtttgttgtgctgttatggttgtgttgtcgcgttgttgtctgcgttgtgctgttgcttctgcttgtctacggttgtgcgtgctttgtttgttgtgtctttgctttccggtattgatttagcggaccccnccagtgtaangattgtatttaatctattaccctcgccgtgaggactttttgtgccccgatgcgtgtgatgcgtgggggttgtcacactgctatcgaccgcctgtttttttgtcgtctctgggcgtgatttatttttcgtggttggtgttggtcgtcctatgttttccgctcccccatgtggtggtgtcttttctccgtcaaagtatgcgggcgtgtgctgctgtttgtttcctgtcctcgcgtgtgtttttttatcgcgccccggtcgtctgttttttttatataagtcctcttttttgtgggggcgcctctttgtctttgataataagagggtggtgtgttatcaatttggtccccccccggtttttttgcccccccccccatttttttttttttttgtttttttttttttttttttttttttttttttttttttttttttttttttttttttttttttttttttttttttttttgttggtctgttactcggtggtggcggagtctacggaagccgttttcgcttcacttttcctggctgtagagcgctttccccctggcgggtgagagtgcagagacgaaggtgcgagatgagcactatgttcgcggacactctcctcatcgtttttatctctgtgtgcacggctctgctcgcagagggcataacctgggtcctggtttacaggacagacaagtacaagagactgaaggcagaagtggaaaaacagagtaaaaaattggaaaagaagaaggaaacaataacagagtcagctggtcgacaacagaaaaagaaaataggttcgaatgaaatccatgtttgctattggcttttgttttactgccctaatgggaatgttcaattccatatttgatggtagagtggtggcaaagcttccttttacccctctttcttacatccaaggactgtctcatcgaaatctgctgggagatgacaccacagactgttccttcattttcctgtatattctctgtactatgtcgattcgacagaacattcagaagattctcggccttgccccttcacgagccgccaccaagcaggcaggtggatttcttggcccaccacctccttctgggaagttctcttgaactcaagaactctttattttctatcattctttctagacacacacacatcagactggcaactgttttgtagcaagagccataggtagccttactacttgggcctctttctagttttgaattatttctaagccttttgggtatgattagagtgaaaatggcagccagcaaacttgatagtgcttttggtcctagatgatttttatcaaataagtggattgattagttaagttcaggtaatgtttatgtaatgaaaaacaaatagcatccttcttgtttcatttacataagtattttctgtgggaccgactctcaaggcactgtgtatgccctgcaagttggctgtctatgagcatttagagatttagaagaaaaatttacaagccaaatacatgacataagatcaataaagaggccaaatttttagctgttttatgtacaaggagagatctgtttcattttgttttgccgtatttctagatataagttttagcatgggccaggaaggactaaaataaaagtttttaaggtactgta

SEQ ID NO: 431449 - DNA, 1016 bp, Homo sapiens
tccgagacgagcctttccggtgctatgccccggaagcggaagtgcgatcttcgggctgtcagagttggtctgttactcggtggtggcggagtctacggaagccgttttcgcttcacttttcctggctgtagagcgctttccccctggcgggtgagagtgcagagacgaaggtgcgagatgagcactatgttcgcggacactctcctcatcgtttttatctctgtgtgcacggctctgctcgcagagggcataacctgggtcctggtttacaggacagacaagtacaagagactgaaggcagaagtggaaaaacagagtaaaaaattggaaaagaagaaggaaacaataacagagtcagctggtcgacaacagaaaaagaaaatagagagacaagaagagaaactgaagaataacaacagagatctatcaatggttcgaatgaaatccatgtttgctattggcttttgttttactgccctaatgggaatgttcaattccatatttgatggtagagtggtggcaaagcttccttttacccctctttcttacatccaaggactgtctcatcgaaatctgctgggagatgacaccacagactgttccttcattttcctgtatattctctgtactatgtcgattcgacagaacattcagaagattctcggccttgccccttcaacgaacctggtcgacaacagaagaagaaaatacgagagacaagaagagaaactgaagaataactacagagatctatcaatggttcgaatgaaatccatgtttgctattggcttttgttttactgccctaatgggaacgatctattcgatattcgatctgagactggtggccaagctctcccagtaccactctagaggacaccccatgactctatacttctgaatcgcgattgtgagcagatctatccaccgatctacgcagtcctttgccgagaaaattgcgcttaggacctccatgcgtcggcaccaggctacgagctctctgcctgccccttcaat

SEQ ID NO: 431450 - DNA, 142 bp, Homo sapiens
tttttttttttttcttttagatttgatggtagagtggtggcaaagcttccttttacccctctttcttacatccaaggactgtctcatcgaaatctgctgggagatgacaccacagactgttccttcattttcctgtatattc

SEQ ID NO: 431451 - DNA, 1230 bp, Homo sapiens
tccgagacgagcctttccggtgctatgccccggaagcggaagtgcgatcttcgggctgtcagagttggtctgttactcggtggtggcggagtctacggaagccgttttcgcttcacttttcctggctgtagagcgctttccccctggcgggtgagagtgcagagacgaaggtgcgagatgagcactatgttcgcggacactctcctcatcgtttttatctctgtgtgcacggctctgctcgcagagggcataacctgggtcctggtttacaggacagacaagtacaagagactgaaggcagaagtggaaaaacagagtaaaaaattggaaaagaagaaggaaacaataacagagtcagctggtcgacaacagaaaaagaaaatagagagacaagaagagaaactgaagaataacaacagagatctatcaatggttcgaatgaaatccatgtttgctattggcttttgttttactgccctaatgggaatgttcaattccatatttgatggtagagtggtggcaaagcttccttttacccctctttcttacatccaaggactgtctcatcgaaatctgctgggagatgacaccacagactgttccttcattttcctgtatattctctgtactatgtcgattcgacagaacattcagaagattctcggccttgccccttcacgagccgccaccaagcaggcaggtggatttcttggcccaccacctccttctgggaagttctcttgaactcaagaactctttattttctatcattctttctagacacacacacatcagactggcaactgttttgtagcaagagccataggtagccttactacttgggcctctttctagttttgaattatttctaagccttttgggtatgattagagtgaaaatggcagccagcaaacttgatagtgcttttggtcctagatgatttttatcaaataagtggattgattagttaagttcaggtaatgtttatgtaatgaaaaacaaatagcatccttcttgtttcatttacataagtattttctgtgggaccgactctcaaggcactgtgtatgccctgcaagttggctgtctatgagcatttagagatttagaagaaaaatttagtttgtttaacccttgtaactgtttgttttgttgttgtttttttttcaagccaaatacatgacataagatcaataaagaggccaaatttttagctgttttatgtacaag

SEQ ID NO: 431452 - DNA, 1850 bp, Homo sapiens
  misc_feature (75)..(75): n is a, c, g, or t
  misc_feature (207)..(207): n is a, c, g, or t
  misc_feature (217)..(217): n is a, c, g, or t
ttgtcgcagtctagctggtgtttctctcatttcgttcttgtgtgctctgtttgtgtttcgtgcgcggagctgtgngttgtttgttgtgctgttatggttgtgttgtcgcgttgttgtctgcgttgtgctgttgcttctgcttgtctacggttgtgcgtgctttgtttgttgtgtctttgctttccggtattgatttagcggaccccnccagtgtaangattgtatttaatctattaccctcgccgtgaggactttttgtgccccgatgcgtgtgatgcgtgggggttgtcacactgctatcgaccgcctgtttttttgtcgtctctgggcgtgatttatttttcgtggttggtgttggtcgtcctatgttttccgctcccccatgtggtggtgtcttttctccgtcaaagtatgcgggcgtgtgctgctgtttgtttcctgtcctcgcgtgtgtttttttatcgcgccccggtcgtctgttttttttatataagtcctcttttttgtgggggcgcctctttgtctttgataataagagggtggtgtgttatcaatttggtccccccccggtttttttgcccccccccccatttttttttttttttgtttttttttttttttttttttttttttttttttttttttttttttttttttttttttttttttttttttttttttttgttggtctgttactcggtggtggcggagtctacggaagccgttttcgcttcacttttcctggctgtagagcgctttccccctggcgggtgagagtgcagagacgaaggtgcgagatgagcactatgttcgcggacactctcctcatcgtttttatctctgtgtgcacggctctgctcgcagagggcataacctgggtcctggtttacaggacagacaagtacaagagactgaaggcagaagtggaaaaacagagtaaaaaattggaaaagaagaaggaaacaataacagagtcagctggtcgacaacagaaaaagaaaatagagagacaagaagagaaactgaagaataacaacagagatctatcaatggttcgaatgaaatccatgtttgctattggcttttgttttactgccctaatgggaatgttcaattccatatttgatggtagagtggtggcaaagcttccttttacccctctttcttacatccaaggactgtctcatcgaaatctgctgggagatgacaccacagactgttccttcattttcctgtatattctctgtactatgtcgattcgacagaacattcagaagattctcggccttgccccttcacgagccgccaccaagcaggcaggtggatttcttggcccaccacctccttctgggaagttctcttgaactcaagaactctttattttctatcattctttctagacacacacacatcagactggcaactgttttgtagcaagagccataggtagccttactacttgggcctctttctagttttgaattatttctaagccttttgggtatgattagagtgaaaatggcagccagcaaacttgatagtgcttttggtcctagatgatttttatcaaataagtggattgattagttaagttcaggtaatgtttatgtaatgaaaaacaaatagcatccttcttgtttcatttacataagtattttctgtgggaccgactctcaaggcactgtgtatgccctgcaagttggctgtctatgagcatttagagatttagaagaaaaatttagtttgtttaacccttgtaactgtttgttttgttgttgtttttttttcaagccaaatacatgacataagatcaataaagaggccaaatttttagctgttttatgtacaag

SEQ ID NO: 431453 - DNA, 1490 bp, Homo sapiens
tccgagacgagcctttccggtgctatgccccggaagcggaagtgcgatcttcgggctgtcagagttggtctgttactcggtggtggcggagtctacggaagccgttttcgcttcacttttcctggctgtagagcgctttccccctggcgggtgagagtgcagagacgaaggtgcgagatgagcactatgttcgcggacactctcctcatcgtttttatctctgtgtgcacggctctgctcgcagagggcataacctgggtcctggtttacaggacagacaagtacaagagactgaaggcagaagtggaaaaacagagtaaaaaattggaaaagaagaaggaaacaataacagagtcagctggtcgacaacagaaaaagaaaatagagagacaagaagagaaactgaagaataacaacagagatctatcaatggttcgaatgaaatccatgtttgctattggcttttgttttactgccctaatgggaatgttcaattccatatttgatggtagagtggtggcaaagcttccttttacccctctttcttacatccaaggactgtctcatcgaaatctgctgggagatgacaccacagactgttccttcattttcctgtatattctctgtactatgtcgattcgacagaacattcagaagattctcggccttgccccttcacgagccgccaccaagcaggcaggtggatttcttggcccaccacctccttctgggaagttctcttgaactcaagaactctttattttctatcattctttctagacacacacacatcagactggcaactgttttgtagcaagagccataggtagccttactacttgggcctctttctagttttgaattatttctaagccttttgggtatgattagagtgaaaatggcagccagcaaacttgatagtgcttttggtcctagatgatttttatcaaataagtggattgattagttaagttcaggtaatgtttatgtaatgaaaaacaaatagcatccttcttgtttcatttacataagtattttctgtgggaccgactctcaaggcactgtgtatgccctgcaagttggctgtctatgagcatttagagatttagaagaaaaatttagtttgtttaacccttgtaactgtttgttttgttgttgtttttttttcaagccaaatacatgacataagatcaataaagaggccaaatttttagctgttttatgtacaaggagagatctgtttcattttgttttgccgtatttctagatataagttttagcatgggccaggaaggactaaaataaaagtttttaaggtactgtactttttgccatacttgactcatatactcaaaatacagagttgtcttggtgtaggaattggaaagcaagagtggaaaggaacgtaataactcgttggagtttaaaaatgagggtcttggcaagtaacactgatgtctgaaaaaaaattaaatataaataaataaata

SEQ ID NO: 431454 - DNA, 1184 bp, Homo sapiens
tccgagacgagcctttccggtgctatgccccggaagcggaagtgcgatcttcgggctgtcagagttggtctgttactcggtggtggcggagtctacggaagccgttttcgcttcacttttcctggctgtagagcgctttccccctggcgggtgagagtgcagagacgaaggtgcgagatgagcactatgttcgcggacactctcctcatcgtttttatctctgtgtgcacggctctgctcgcagagggcataacctgggtcctggtttacaggacagacaagtacaagagactgaaggcagaagtggaaaaacagagtaaaaaattggaaaagaagaaggaaacaataacagagtcagctggtcgacaacagaaaaagaaaatagagagacaagaagagaaactgaagaataacaacagagatctatcaatggttcgaatgaaatccatgtttgctattggcttttgttttactgccctaatgggaatgttcaattccatatttgatggtagagtggtggcaaagcttccttttacccctctttcttacatccaaggactgtctcatcgaaatctgctgggagatgacaccacagactgttccttcattttcctgtatattctctgtactatgtcgattcgacagaacattcagaagattctcggccttgccccttcacgagccgccaccaagcaggcaggtggatttcttggcccaccacctccttctgggaagttctcttgaactcaagaactctttattttctatcattctttctagacacacacacatcagactggcaactgttttgtagcaagagccataggtagccttactacttgggcctctttctagttttgaattatttctaagccttttgggtatgattagagtgaaaatggcagccagcaaacttgatagtgcttttggtcctagatgatttttatcaaataagtggattgattagttaagttcaggtaatgtttatgtaatgaaaaacaaatagcatccttcttgtttcatttacataagtattttctgtgggaccgactctcaaggcactgtgtatgccctgcaagttggctgtctatgagcatttagagatttagaagaaaaatttacaagccaaatacatgacataagatcaataaagaggccaaatttttagctgttttatgtacaag

SEQ ID NO: 431455 - DNA, 1098 bp, Homo sapiens
aggaggagccgtgtgccctggcactgagcggccgcggggtgcgagatgagcactatgttcgcggacactctcctcatcgtttttatctctgtgtgcacggctctgctcgcagagggcataacctgggtcctggtttacaggacagacaagtacaagagactgaaggcagaagtggaaaaacagagtaaaaaattggaaaagaagaaggaaacaataacagagtcagctggtcgacaacagaaaaagaaaatagagagacaagaagagaaactgaagaataacaacagagatctatcaatggttcgaatgaaatccatgtttgctattggcttttgttttactgccctaatgggaatgttcaattccatatttgatggtagagtggtggcaaagcttccttttacccctctttcttacatccaaggactgtctcatcgaaatctgctgggagatgacaccacagactgttccttcattttcctgtatattctctgtactatgtcgattcgacagaacattcagaagattctcggccttgccccttcacgagccgccaccaagcaggcaggtggatttcttggcccaccacctccttctgggaagttctcttgaactcaagaactctttattttctatcattctttctagacacacacacatcagactggcaactgttttgtagcaagagccataggtagccttactacttgggcctctttctagttttgaattatttctaagccttttgggtatgattagagtgaaaatggcagccagcaaacttgatagtgcttttggtcctagatgatttttatcaaataagtggattgattagttaagttcaggtaatgtttatgtaatgaaaaacaaatagcatccttcttgtttcatttacataagtattttctgtgggaccgactctcaaggcactgtgtatgccctgcaagttggctgtctatgagcatttagagatttagaagaaaaatttagtttgtttaacccttgtaactgtttgttttgttgttgtttttttttcaagccaaatacatgacataagatcaataaagaggccaaatttttagctgttttatgtacaag

SEQ ID NO: 431456 - DNA, 1749 bp, Homo sapiens
  misc_feature (75)..(75): n is a, c, g, or t
  misc_feature (207)..(207): n is a, c, g, or t
  misc_feature (217)..(217): n is a, c, g, or t
ttgtcgcagtctagctggtgtttctctcatttcgttcttgtgtgctctgtttgtgtttcgtgcgcggagctgtgngttgtttgttgtgctgttatggttgtgttgtcgcgttgttgtctgcgttgtgctgttgcttctgcttgtctacggttgtgcgtgctttgtttgttgtgtctttgctttccggtattgatttagcggaccccnccagtgtaangattgtatttaatctattaccctcgccgtgaggactttttgtgccccgatgcgtgtgatgcgtgggggttgtcacactgctatcgaccgcctgtttttttgtcgtctctgggcgtgatttatttttcgtggttggtgttggtcgtcctatgttttccgctcccccatgtggtggtgtcttttctccgtcaaagtatgcgggcgtgtgctgctgtttgtttcctgtcctcgcgtgtgtttttttatcgcgccccggtcgtctgttttttttatataagtcctcttttttgtgggggcgcctctttgtctttgataataagagggtggtgtgttatcaatttggtccccccccggtttttttgcccccccccccatttttttttttttttgtttttttttttttttttttttttttttttttttttttttttttttttttttttttttttttttttttttttttttttgttggtctgttactcggtggtggcggagtctacggaagccgttttcgcttcacttttcctggctgtagagcgctttccccctggcgggtgagagtgcagagacgaagggacagacaagtacaagagactgaaggcagaagtggaaaaacagagtaaaaaattggaaaagaagaaggaaacaataacagagtcagctggtcgacaacagaaaaagaaaatagagagacaagaagagaaactgaagaataacaacagagatctatcaatggttcgaatgaaatccatgtttgctattggcttttgttttactgccctaatgggaatgttcaattccatatttgatggtagagtggtggcaaagcttccttttacccctctttcttacatccaaggactgtctcatcgaaatctgctgggagatgacaccacagactgttccttcattttcctgtatattctctgtactatgtcgattcgacagaacattcagaagattctcggccttgccccttcacgagccgccaccaagcaggcaggtggatttcttggcccaccacctccttctgggaagttctcttgaactcaagaactctttattttctatcattctttctagacacacacacatcagactggcaactgttttgtagcaagagccataggtagccttactacttgggcctctttctagttttgaattatttctaagccttttgggtatgattagagtgaaaatggcagccagcaaacttgatagtgcttttggtcctagatgatttttatcaaataagtggattgattagttaagttcaggtaatgtttatgtaatgaaaaacaaatagcatccttcttgtttcatttacataagtattttctgtgggaccgactctcaaggcactgtgtatgccctgcaagttggctgtctatgagcatttagagatttagaagaaaaatttagtttgtttaacccttgtaactgtttgttttgttgttgtttttttttcaagccaaatacatgacataagatcaataaagaggccaaatttttagctgttttatgtacaag

SEQ ID NO: 431457 - DNA, 1803 bp, Homo sapiens
  misc_feature (75)..(75): n is a, c, g, or t
  misc_feature (207)..(207): n is a, c, g, or t
  misc_feature (217)..(217): n is a, c, g, or t
ttgtcgcagtctagctggtgtttctctcatttcgttcttgtgtgctctgtttgtgtttcgtgcgcggagctgtgngttgtttgttgtgctgttatggttgtgttgtcgcgttgttgtctgcgttgtgctgttgcttctgcttgtctacggttgtgcgtgctttgtttgttgtgtctttgctttccggtattgatttagcggaccccnccagtgtaangattgtatttaatctattaccctcgccgtgaggactttttgtgccccgatgcgtgtgatgcgtgggggttgtcacactgctatcgaccgcctgtttttttgtcgtctctgggcgtgatttatttttcgtggttggtgttggtcgtcctatgttttccgctcccccatgtggtggtgtcttttctccgtcaaagtatgcgggcgtgtgctgctgtttgtttcctgtcctcgcgtgtgtttttttatcgcgccccggtcgtctgttttttttatataagtcctcttttttgtgggggcgcctctttgtctttgataataagagggtggtgtgttatcaatttggtccccccccggtttttttgcccccccccccatttttttttttttttgtttttttttttttttttttttttttttttttttttttttttttttttttttttttttttttttttttttttttttttgttggtctgttactcggtggtggcggagtctacggaagccgttttcgcttcacttttcctggctgtagagcgctttccccctggcgggtgagagtgcagagacgaaggtgcgagatgagcactatgttcgcggacactctcctcatcgtttttatctctgtgtgcacggctctgctcgcagagggcataacctgggtcctggtttacaggacagacaagtacaagagactgaaggcagaagtggaaaaacagagtaaaaaattggaaaagaagaaggaaacaataacagagtcagctggtcgacaacagaaaaagaaaataggttcgaatgaaatccatgtttgctattggcttttgttttactgccctaatgggaatgttcaattccatatttgatggtagagtggtggcaaagcttccttttacccctctttcttacatccaaggactgtctcatcgaaatctgctgggagatgacaccacagactgttccttcattttcctgtatattctctgtactatgtcgattcgacagaacattcagaagattctcggccttgccccttcacgagccgccaccaagcaggcaggtggatttcttggcccaccacctccttctgggaagttctcttgaactcaagaactctttattttctatcattctttctagacacacacacatcagactggcaactgttttgtagcaagagccataggtagccttactacttgggcctctttctagttttgaattatttctaagccttttgggtatgattagagtgaaaatggcagccagcaaacttgatagtgcttttggtcctagatgatttttatcaaataagtggattgattagttaagttcaggtaatgtttatgtaatgaaaaacaaatagcatccttcttgtttcatttacataagtattttctgtgggaccgactctcaaggcactgtgtatgccctgcaagttggctgtctatgagcatttagagatttagaagaaaaatttagtttgtttaacccttgtaactgtttgttttgttgttgtttttttttcaagccaaatacatgacataagatcaataaagaggccaaatttttagctgttttatgtacaag

SEQ ID NO: 431458 - DNA, 386 bp, Homo sapiens
cagtgtttagtctgagaatttttgcatgttggttaattgtggccattctttaatttaaagttaaaactataatcttaggtagaaaaacttttttataagaagtattatttgaccacttcaggtatacattcaatactgggtaaaaatttcagacctatctcaggaacacagaaatatttggtgtcctgataagcactttctagactattgatgtggccaggaatttggaaagacgacacacacacacacacacacaacacaatggcactgattttggtacaaaatcagtgccattggtgtgtgtgtacgtaactatatacatatgtgtgtgtgtgtatatatataatgtgtcataaccgtaaacaataaacaatatcaagataaat

SEQ ID NO: 431459 - DNA, 1808 bp, Homo sapiens
gtgaccggccaacactgagtgttgtctcgctctggcgtcagagccgtcgtggctcgttccattctcggcggtggtacctgctcccggtggccctgaggacgtgtgggccaggggcggccccgaaattaggaagcggagggggagcagtctgcaggtctgcggggctaagtgtcgcggcggcgcacctcgcgtcaagaatccggaggaggagactgcaaggataggcccaggagtaatggagtccaaagaggaactagcggcaaacaatctcaacggggaaaatgcccaacaagaaaacgaaggaggggagcaggcccccacgcagaatgaagaagaatcccgccatttgggagggggtgaaggccagaagcctggaggaaatatcaggcgggggcgagttaggcgacttgtccctaattttcgatgggccatacctaataggcatattgagcacaatgaagcgagagatgatgtagaaaggtttgtagggcagatgatggaaatcaagagaaagactagggaacagcagatgaggcactatatgcgcttccaaactcctgaacctgacaaccattatgacttttgcctcataccttgaatcctaaaagttttcgctgaggttaatgtgaacactgctttacaagcttgtatttttgtgatttactttttctgtaagccttttggtgtttacacttaccagtttctaatggaaattagaattctaattgaatattgttttgtctcagcctaaaagttacggtcagcatggcaattcacctattttaggaaaaatactcttttcataatatgaaatgcataaagcagttcaaaaagcagtctgtattccatcatcttcctttttcattccagtccttatttttgtaagtattacttttcctcctccggctacctggactcaaaatctcagttgtctttgacagtttttttcttgtccctgaccaaaaaagaatgatcatacccagaattcaatgtttgatattttaagaatgtatgttctagtgtttttcagagtgagtctaccatctgtataaaaacaccttgggggcaggcaggggcatttaaaaatgtaggacctatcgtccagactcacagagtggggctccagaatctccatttttaacaaactctcttaagtaattctgatgtgtaccaaaatcagtgccattggtgtgtgtgtacgtaactatatacatatgtgtgtgtgtgtatatatataatgtgtcataaccgtaaacaataaacaatatcaagataaataaaaaaaaaaaaaaaaaaaaaaaaaaaaaaaaaaaaaaaaaaaaaaaaaaggggggggcccccaaaaaaaatctccccgagggggggccacatgatgcgcgtcacccaaggtttcgcgggcagcaacaggggccccaaaagggagggctcgactaaaacagcgtgacagagggggcacgaggccaaaaaccgcgccggcaaacgggggacaacaagtgccgccaaagccgcggggaaccacccacggagaaggagcgcaccccctcaaccagcgggagggagagacaacactccggggcgggaaaaagaaccccaagagagagagaatacagcgagcccctcgagacggaaaaaacaataacaacacccccaccgactgaggagaaaatcagggcggacaacaacaaaagcgaagcaaagaaagcggcgacggacgagaaagaaaaacgggaccccaacgggaaagcagcacaacaacaacaaaacaagttatcacaccgggggcccccacagaaaaaaaaacgagggag

SEQ ID NO: 431460 - DNA, 1195 bp, Homo sapiens
gtgaccggccaacactgagtgttgtctcgctctggcgtcagagccgtcgtggctcgttccattctcggcggtggtacctgctcccggtggccctgaggacgtgtgggccaggggcggccccgaaattaggaagcggagggggagcaggagtaatggagtccaaagaggaactagcggcaaacaatctcaacggggaaaatgcccaacaagaaaacgaaggaggggagcaggcccccacgcagaatgaagaagaatcccgccatttgggagggggtgaaggccagaagcctggaggaaatatcaggcgggggcgagttaggcgacttgtccctaattttcgatgggccatacctaataggcatattgagcacaatgaagcgagagatgatgtagaaaggtttgtagggcagatgatggaaatcaagagaaagactagggaacagcagatgaggcactatatgcgcttccaaactcctgaacctgacaaccattatgacttttgcctcataccttgaatcctaaaagttttcgctgaggttaatgtgaacactgctttacaagcttgtatttttgtgatttactttttctgtaagccttttggtgtttacacttaccagtttctaatggaaattagaattctaattgaatattgttttgtctcagcctaaaagttacggtcagcatggcaattcacctattttaggaaaaatactcttttcataatatgaaatgcataaagcagttcaaaaagcagtctgtattccatcatcttcctttttcattccagtccttatttttgtaagtattacttttcctcctccggctacctggactcaaaatctcagttgtctttgacagtttttttcttgtccctgaccaaaaaagaatgatcatacccagaattcaatgtttgatattttaagaatgtatgttctagtgtttttcagagtgagtctaccatctgtataaaaacaccttgggggcaggcaggggcatttaaaaatgtaggacctatcgtccagactcacagagtggggctccagaatctccatttttaacaaactctcttaagtaattctgatgtgtaccaaaatcagtgccattggtgtgtgtgtacgtaactatatacatatgtgtgtgtgtgtatatatataatgtgtcataaccgtaaacaataaacaatatcaagataaat

SEQ ID NO: 431461 - DNA, 623 bp, Homo sapiens
gtgaccggccaacactgagtgttgtctcgctctggcgtcagagccgtcgtggctcgttccattctcggcggtggtacctgctcccggtggccctgaggacgtgtgggccaggggcggccccgaaattaggaagcggagggggagcagtctgcaggtctgcggggctaagtgtcgcggcggcgcacctcgcgtcaagaatccggaggaggagactgcaaggataggcccaggagtaatggagtccaaagaggaactagcggcaaacaatctcagttgtctttgacagtttttttcttgtccctgaccaaaaaagaatgatcatacccagaattcaatgtttgatattttaagaatgtatgttctagtgtttttcagagtgagtctaccatctgtataaaaacaccttgggggcaggcaggggcatttaaaaatgtaggacctatcgtccagactcacagagtggggctccagaatctccatttttaacaaactctcttaagtaattctgatgtgtaccaaaatcagtgccattggtgtgtgtgtacgtaactatatacatatgtgtgtgtgtgtatatatataatgtgtcataaccgtaaacaataaacaatatcaagataaat

SEQ ID NO: 431462 - DNA, 810 bp, Homo sapiens
gtgaccggccaacactgagtgttgtctcgctctggcgtcagagccgtcgtggctcgttccattctcggcggtggtacctgctcccggtggccctgaggacgtgtgggccaggggcggccccgaaattaggaagcggagggggagcagtctgcaggtctgcggggctaagtgtcgcggcggcgcacctcgcgtcaagaatccggaggaggagactgcaaggataggcccaggagtaatggagtccaaagaggaactagcggcaaacaatctcaacggggaaaatgcccaacaagaaaacgaaggaggggagcaggcccccacgcagaatgaagaagaatcccgccatttgggagggggtgaaggccagaagcctggaggaaatatcaggcgggggcgagttaggcgacttgtccctaattttcgatgggccatacctaataggcatattgagcacaatgaagcgagagatgatgtagaaaggtttgtagggcagatgatggaaatcaagagaaagactagggaacagcagatgaggcactatatgcgcttccaaactcctgaacctgacaaccattatgacttttgcctcataccttgaatcctaaaagttttcgctgaggttaatgtgaacactgctttacaagcttgtatttttgtgatttactttttctgtaagccttttggtgtttacacttaccagtcatggttatggccagtcgaagtctttgttgaatcagttcggtccatttccagacgcttgcatgtcacgcacgatcgagtctatgtaggattacccatgggcgatactct

SEQ ID NO: 431463 - DNA, 1278 bp, Homo sapiens
gtgaccggccaacactgagtgttgtctcgctctggcgtcagagccgtcgtggctcgttccattctcggcggtggtacctgctcccggtggccctgaggacgtgtgggccaggggcggccccgaaattaggaagcggagggggagcagtctgcaggtctgcggggctaagtgtcgcggcggcgcacctcgcgtcaagaatccggaggaggagactgcaaggataggcccaggagtaatggagtccaaagaggaactagcggcaaacaatctcaacggggaaaatgcccaacaagaaaacgaaggaggggagcaggcccccacgcagaatgaagaagaatcccgccatttgggagggggtgaaggccagaagcctggaggaaatatcaggcgggggcgagttaggcgacttgtccctaattttcgatgggccatacctaataggcatattgagcacaatgaagcgagagatgatgtagaaaggtttgtagggcagatgatggaaatcaagagaaagactagggaacagcagatgaggcactatatgcgcttccaaactcctgaacctgacaaccattatgacttttgcctcataccttgaatcctaaaagttttcgctgaggttaatgtgaacactgctttacaagcttgtatttttgtgatttactttttctgtaagccttttggtgtttacacttaccagtttctaatggaaattagaattctaattgaatattgttttgtctcagcctaaaagttacggtcagcatggcaattcacctattttaggaaaaatactcttttcataatatgaaatgcataaagcagttcaaaaagcagtctgtattccatcatcttcctttttcattccagtccttatttttgtaagtattacttttcctcctccggctacctggactcaaaatctcagttgtctttgacagtttttttcttgtccctgaccaaaaaagaatgatcatacccagaattcaatgtttgatattttaagaatgtatgttctagtgtttttcagagtgagtctaccatctgtataaaaacaccttgggggcaggcaggggcatttaaaaatgtaggacctatcgtccagactcacagagtggggctccagaatctccatttttaacaaactctcttaagtaattctgatgtgtaccaaaatcagtgccattggtgtgtgtgtacgtaactatatacatatgtgtgtgtgtgtatatatataatgtgtcataaccgtaaacaataaacaatatcaagataaat

SEQ ID NO: 431464 - DNA, 2105 bp, Homo sapiens
gtgaccggccaacactgagtgttgtctcgctctggcgtcagagccgtcgtggctcgttccattctcggcggtggtacctgctcccggtggccctgaggacgtgtgggccaggggcggccccgaaattaggaagcggagggggagcaggtaaggaacccggcggggggtccctggggttggtgtgagggagtggctccggcctgcggatgcccaccccgggggagccgtgcggagaagcaatcggtccgcgatgcagcccccgggccccgcggcgggcccgcgagccttccttgagcggagaggtgcccggcccggagggagccggcggtcctggggctacgacccttcggaaacacctgcctacgccatcagcgcaagcttttccgacacccctgccccgcacttcttggtgcagaaaatggtggtcagcttgcggggcggggcggctgaggcggggggcgagggtggcgaggagggccagggccagggccagggccagggcctcggggcggggcggggaaggggccggatggcggtagttcctagctagcgttctgctgcagcagcccccacttcccccaccccggcagtctgcaggtctgcggggctaagtgtcgcggcggcgcacctcgcgtcaagaatccggaggaggagactgcaaggataggcccaggtcggtgcgagggtcggtggtgaggcgggggccggaacgtgaggaaagcccagtctgagaccctaatccatgccttcaccctcgcccccctctaccccatgcaaccctccccttcccacacgccatcctcgtcctccattttgctgcctgcggaagcctggagatggatctacagggaaaatggtgggctttgcggaagggaggggctcggattgagggcaccccacagggcatactggcttctcaggtggaaaaaaatgaaatgttagagtataaagtcaagtccagggctctgaattttaaaaggtgcctagtagggcctctgtcctcagtgcttatcagtccaccaagaattcagcccattttctctctcttgtctcctaggagtaatggagtccaaagaggaactagcggcaaacaatctcaacggggaaaatgcccaacaagaaaacgaaggaggggagcaggcccccacgcagaatgaagaagaatcccgccatttgggagggggtgaaggccagaagcctggaggaaatatcaggcgggggcgagttaggcgacttgtccctaattttcgatgggccatacctaataggcatattgagcacaatgaagcgagagatgatgtagaaaggtttgtagggcagatgatggaaatcaagagaaagactagggaacagcagatgaggcactatatgcgcttccaaactcctgaacctgacaaccattatgacttttgcctcataccttgaatcctaaaagttttcgctgaggttaatgtgaacactgctttacaagcttgtatttttgtgatttactttttctgtaagccttttggtgtttacacttaccagtttctaatggaaattagaattctaattgaatattgttttgtctcagcctaaaagttacggtcagcatggcaattcacctattttaggaaaaatactcttttcataatatgaaatgcataaagcagttcaaaaagcagtctgtattccatcatcttcctttttcattccagtccttatttttgtaagtattacttttcctcctccggctacctggactcaaaatctcagttgtctttgacagtttttttcttgtccctgaccaaaaaagaatgatcatacccagaattcaatgtttgatattttaagaatgtatgttctagtgtttttcagagtgagtctaccatctgtataaaaacaccttgggggcaggcaggggcatttaaaaatgtaggacctatcgtccagactcacagagtggggctccagaatctccatttttaacaaactctcttaagtaattctgatgtgtaccaaaatcagtgccattggtgtgtgtgtacgtaactatatacatatgtgtgtgtgtgtatatatataatgtgtcataaccgtaaacaataaacaatatcaagataaat

SEQ ID NO: 431465 - DNA, 1093 bp, Homo sapiens
  misc_feature (20)..(20): n is a, c, g, or t
tgcgtcagaggacctagaangacggagacgcaaagataggcccaggagtaatggagtccaaagaggaactagcggcaaacaatctcaacggggaaaatgcccaacaagaaaacgaaggaggggagcaggcccccacgcagaatgaagaagaatcccgccatttgggagggggtgaaggccagaagcctggaggaaatatcaggcgggggcgagttaggcgacttgtccctaattttcgatgggccatacctaataggcatattgagcacaatgaagcgagagatgatgtagaaaggtttgtagggcagatgatggaaatcaagagaaagactagggaacagcagatgaggcactatatgcgcttccaaactcctgaacctgacaaccattatgacttttgcctcataccttgaatcctaaaagttttcgctgaggttaatgtgaacactgctttacaagcttgtatttttgtgatttactttttctgtaagccttttggtgtttacacttaccagtttctaatggaaattagaattctaattgaatattgttttgtctcagcctaaaagttacggtcagcatggcaattcacctattttaggaaaaatactcttttcataatatgaaatgcataaagcagttcaaaaagcagtctgtattccatcatcttcctttttcattccagtccttatttttgtaagtattacttttcctcctccggctacctggactcaaaatctcagttgtctttgacagtttttttcttgtccctgaccaaaaaagaatgatcatacccagaattcaatgtttgatattttaagaatgtatgttctagtgtttttcagagtgagtctaccatctgtataaaaacaccttgggggcaggcaggggcatttaaaaatgtaggacctatcgtccagactcacagagtggggctccagaatctccatttttaacaaactctcttaagtaattctgatgtgtaccaaaatcagtgccattggtgtgtgtgtacgtaactatatacatatgtgtgtgtgtgtatatatataatgtgtcataaccgtaaacaataaacaatatcaagataaat

SEQ ID NO: 431466 - DNA, 1047 bp, Homo sapiens
gattaaactcgagatacagctttttgcagtatggtgggttggttttggtgtaacgtcttcaacatgtcgcactggctatcaaagaataagaaaattattgagtatgagtgtgttttataaactttctgagtttttcagatgtcttaatatttttaatagaacttaataaaatgtctagattgaaaaaaaataatttcaaagttttgacagaaactgctaagcaaaatttttaagcaaactgctttaaataattttcattataaaaaatgttttatattctgaaatgagaattactatactttgaggttgcaatgaatttcacataaatggcaaagtataaccaaaaaaaatctcatgacattgttcaccacttttgccattcttggacccaaggctggaaaacattttcagacactgtgctttatcctgaaaggatttggtgaaaagggatctctgaggtgaatatctgctctgcttggcctttgagagaaggggagtgggcaaggctggtcttgggcaaattacttccacctccctttttgcccctgcttcagctccaggggagctggaaatgcacaggaggagtcagaagacctgggttcgagtcctggctctgccacttactacctatgtgactttgggaggaagaaggcacctacgatcaaactctggagttccgtaggggaggtgatggccagccaagacgatccactcggccaacccaacagttttaccaaccaccccgggctcggaactaataggaaaagtagactctttgtgaagaaacgagccagtgactgaaacaccctggtggaaacctgttgacagaccttccactttctcttcagaataagtagctgtggtggatattattatttgaagaaagaaaaaacagattttagggtggaaaaaacagtcaactcacacaaagaatggaaaaaaatactgagttaaattaagcaaataccttttacaagtgaaaggaagaatttttcttctgccgtcaataaaaccattgtgctattactattattgtttaaaacaaat

SEQ ID NO: 431467 - DNA, 2567 bp, Homo sapiens
acccgtcagtctcctcaggccttatcctgccctctctgaggtggccgcctgtgggcgctgcaaacgccacacttttgctctacgaagaacctcctcgcgactttccaaggtatctttcagatgaaggcattgaagcttgcacaagctctccagacaaagtcaatgtaaatgacatcatcctgattgctctcaatatctgagaacaattggcaagaaattcctccccagtgacatcaatagtggaaaggtagaaaagctcgaaggtccatgtgttttgcaaattcaaaaaattcgcaatgttgctgcaccaaaggataatgaagaatctcaggctgcaccaaggatgctgcgattacagatgactgatggtcatataagttgcacagcagtagaatttagttatatgtcaaaaataagcctgaacacaccacctggaactaaagttaagctctcaggcattgttgacataaaaaatggattcctgctcttgaatgactctaacaccacagttcttggtggtgaagtggaacaccttattgagaaatgggagttacagagaagcttatcaaaacacaatagaagcaatattggaactgaaggtggaccaccgccttttgtgccttttggacagaagtgtgtatctcatgtccaagtggatagcagagaacttgatcgaagaaaaacattgcaagttacaatgcctgtcaaacctacaaatgataatgatgaatttgaaaagcaaaggacggctgctattgctgaagttgcaaagagcaaggaaaccaagacatttggaggaggtggtggtggtgctagaagtaatctcaatatgaatgctgctggtaaccgaaatagggaagttttacagaaagaaaagtcaaccaaatcagagggaaaacatgaaggtgtctatagagaactggttgatgagaaagctctgaagcacataacggaaatgggcttcagtaaggaagcatcgaggcaagctcttatggataatggcaacaacttagaagcagcactgaacgtacttcttacaagcaataaacagaaacctgttatgggtcctcctctgagaggtagaggaaaaggcagggggcgaataagatctgaagatgaagaggacctgggaaatgcaaggccatcagcaccaagcacattatttgatttcttggaatctaaaatgggaactttgaatgtggaagaacctaaatcacagccacagcagcttcatcagggacaatacagatcatcaaatactgagcaaaatggagtaaaagataataatcatctgagacatcctcctcgaaatgataccaggcagccaagaaatgaaaaaccgcctcgttttcaaagagactcccaaaattcaaagtcagttttagaaggcagtggattacctagaaatagaggttctgaaagaccaagtacttcttcagtatctgaagtatgggctgaagacagaatcaaatgtgatagaccgtattctagatatgacagaactaaagatacttcatatcctttaggttctcagcatagtgatggtgcttttaaaaaaagagataactctatgcaaagcagatcaggaaaaggtccctcctttgcagaggcaaaagaaaatccacttcctcaaggatctgtagattataataatcaaaaacgtggaaaaagagaaagccaaacatctattcctgattatttttatgacaggaaatcacaaacaataaataatgaagctttcagtggtataaaaattgaaaaacattttaatgtaaatactgattatcagaatccagttcgaagtaatagtttcattggtgttccaaatggagaagtagaaatgccactgaaaggaagacgaataggacctattaagccagcaggacctgtcacagctgtaccctgtgatgataaaatattttacaatagtgggcccaaacgaagatctgggccaattaagccagaaaaaatactagaatcatctattcctatggagtatgcaaaaatgtggaaacctggagatgaatgttttgcactttattgggaagacaacaagttttaccgggcagaagttgaagccctccattcttcgggtatgacagcagttgttaaattcattgactacggaaactatgaagaggtgctactgagcaatatcaagcccattcaaacagaggcatgggaggaagaaggcacctacgatcaaactctggagttccgtaggggaggtgatggccagccaagacgatccactcggccaacccaacagttttaccaaccaccccgggctcggaactaataggaaaagtagactctttgtgaagaaacgagccagtgactgaaacaccctggtggaaacctgttgacagaccttccactttctcttcagaataagtagctgtggtggatattattatttgaagaaagaaaaaacagattttagggtggaaaaaacagtcaactcacacaaagaatggaaaaaaatactgagttaaattaagcaaataccttttacaagtgaaaggaagaatttttcttctgccgtcaataaaaccattgtgctatta

SEQ ID NO: 431468 - DNA, 1026 bp, Homo sapiens
gattaaactcgagatacagctttttgcagtatggtgggttggttttggtgtaacgtcttcaacatgtcgcactggctatcaaagaataagaaaattattgagtatgagtgtgttttataaactttctgagtttttcagatgtcttaatatttttaatagaacttaataaaatgtctagattgaaaaaaaataatttcaaagttttgacagaaactgctaagcaaaatttttaagcaaactgctttaaataattttcattataaaaaatgttttatattctgaaatgagaattactatactttgaggttgcaatgaatttcacataaatggcaaagtataaccaaaaaaaatctcatgacattgttcaccacttttgccattcttggacccaaggctggaaaacattttcagacactgtgctttatcctgaaaggatttggtgaaaagggatctctgaggtgaatatctgctctgcttggcctttgagagaaggggagtgggcaaggctggtcttgggcaaattacttccacctccctttttgcccctgcttcagctccaggggagctggaaatgcacaggaggagtcagaagacctgggttcgagtcctggctctgccacttactacctatgtgactttgggaggaagaaggcacctacgatcaaactctggagttccgtaggggaggtgatggccagccaagacgatccactcggccaacccaacagttttaccaaccaccccgggctcggaactaataggaaaagtagactctttgtgaagaaacgagccagtgactgaaacaccctggtggaaacctgttgacagaccttccactttctcttcagaataagtagctgtggtggatattattatttgaagaaagaaaaaacagattttagggtggaaaaaacagtcaactcacacaaagaatggaaaaaaatactgagttaaattaagcaaataccttttacaagtgaaaggaagaatttttcttctgccgtcaataaaaccattgtgctatta

SEQ ID NO: 431469 - DNA, 428 bp, Homo sapiens
gccattttgaacatgtaaaatcactactctttgcaaataggaggaggaagaaggcacctacgatcaaactctggagttccgtaggggaggtgatggccagccaagacgatccactcggccaacccaacagttttaccaaccaccccgggctcggaactaataggaaaagtagactctttgtgaagaaacgagccagtgactgaaacaccctggtggaaacctgttgacagaccttccactttctcttcagaataagtagctgtggtggatattattatttgaagaaagaaaaaacagattttagggtggaaaaaacagtcaactcacacaaagaatggaaaaaaatactgagttaaattaagcaaataccttttacaagtgaaaggaagaatttttcttctgccgtcaataaaaccattgtgctatta

SEQ ID NO: 431470 - DNA, 459 bp, Homo sapiens
  misc_feature (67)..(67): n is a, c, g, or t
tgtatagagtgttgtcttcgggggaaccccatccccccgcagctggaacctctggccccgctcaggngacagaggaggaagaaggcacctacgatcaaactctggagttccgtaggggaggtgatggccagccaagacgatccactcggccaacccaacagttttaccaaccaccccgggctcggaactaataggaaaagtagactctttgtgaagaaacgagccagtgactgaaacaccctggtggaaacctgttgacagaccttccactttctcttcagaataagtagctgtggtggatattattatttgaagaaagaaaaaacagattttagggtggaaaaaacagtcaactcacacaaagaatggaaaaaaatactgagttaaattaagcaaataccttttacaagtgaaaggaagaatttttcttctgccgtcaataaaaccattgtgctatta

SEQ ID NO: 431471 - DNA, 438 bp, Homo sapiens
tggatagttaaaaagttttagagattgttagaacaaaaggaagagcttgaggggaggaagaaggcacctacgatcaaactctggagttccgtaggggaggtgatggccagccaagacgatccactcggccaacccaacagttttaccaaccaccccgggctcggaactaataggaaaagtagactctttgtgaagaaacgagccagtgactgaaacaccctggtggaaacctgttgacagaccttccactttctcttcagaataagtagctgtggtggatattattatttgaagaaagaaaaaacagattttagggtggaaaaaacagtcaactcacacaaagaatggaaaaaaatactgagttaaattaagcaaataccttttacaagtgaaaggaagaatttttcttctgccgtcaataaaaccattgtgctatta

SEQ ID NO: 431472 - DNA, 470 bp, Homo sapiens
  misc_feature (470)..(470): n is a, c, g, or t
gccattttgaacatgtaaaatcactactctttgcaaataggaggaggaagaaggcacctacgatcaaactctggagttccgtaggggaggtgatggccagccaagacgatccactcggccaacccaacagttttaccaaccaccccgggctcggaactaataggaaaagtagactctttgtgaagaaacgagccagtgactgaaacaccctggtggaaacctgttgacagaccttccactttctcttcagaataagtagctgtggtggatattattatttgaagaaagaaaaaacagattttagggtggaaaaaacagtcaactcacacaaagaatggaaaaaaatactgagttaaattaagcaaataccttttacaagtgaaaggaagaatttttcttctgccgtcaataaaaccattgtgctattattggcctcgttggcctcagcggtggagctctgcggccggaan

SEQ ID NO: 431473 - DNA, 383 bp, Homo sapiens
  misc_feature (1)..(1): n is a, c, g, or t
ncttgtgtaccggccctacgctttactgtcgaacccgaggggaggtgatggccagccaagacgatccactcggccaacccaacagttttaccaaccaccccgggctcggaactaataggaaaagtagactctttgtgaagaaacgagccagtgactgaaacaccctggtggaaacctgttgacagaccttccactttctcttcagaataagtagctgtggtggatattattatttgaagaaagaaaaaacagattttagggtggaaaaaacagtcaactcacacaaagaatggaaaaaaatactgagttaaattaagcaaataccttttacaagtgaaaggaagaatttttcttctgccgtcaataaaaccattgtgctatta

SEQ ID NO: 431474 - DNA, 298 bp, Homo sapiens
gtcgtgcgtcactgactctcttaatttccaccgctacagtagactctttgtgaagaaacgagccagtgactgaaacaccctggtggaaacctgttgacagaccttccactttctcttcagaataagtagctgtggtggatattattatttgaagaaagaaaaaacagattttagggtggaaaaaacagtcaactcacacaaagaatggaaaaaaatactgagttaaattaagcaaataccttttacaagtgaaaggaagaatttttcttctgccgtcaataaaaccattgtgctatta

SEQ ID NO: 431475 - DNA, 521 bp, Homo sapiens
agcaataaatggtataacagtggcagagatgtactttaacaaagtctaaaaaaaaaatttattttcaaaaaaattttgcttttttctttcatattgctttataaagattgtttacaaattagcagtatccaaaattctagttaagatctatttatacaaacacttcacatttacagataagtttcagcagaaatgtatcttgacaaagtatggaaaagttaatttgaggcttcaatttcattttcttcatttctttttaaagtagactctttgtgaagaaacgagccagtgactgaaacaccctggtggaaacctgttgacagaccttccactttctcttcagaataagtagctgtggtggatattattatttgaagaaagaaaaaacagattttagggtggaaaaaacagtcaactcacacaaagaatggaaaaaaatactgagttaaattaagcaaataccttttacaagtgaaaggaagaatttttcttctgccgtcaataaaaccattgtgctatta

SEQ ID NO: 431476 - DNA, 396 bp, Homo sapiens
cccccacagatccccttcccccaaccctccacacacatatacttcctcattgtggtgagagaactggattccacttgagccaaatactaaggacagcttcagtgacagagcaggagatacctaggaatcagggctagtagactctttgtgaagaaacgagccagtgactgaaacaccctggtggaaacctgttgacagaccttccactttctcttcagaataagtagctgtggtggatattattatttgaagaaagaaaaaacagattttagggtggaaaaaacagtcaactcacacaaagaatggaaaaaaatactgagttaaattaagcaaataccttttacaagtgaaaggaagaatttttcttctgccgtcaataaaaccattgtgctatta

SEQ ID NO: 431477 - DNA, 319 bp, Homo sapiens
  misc_feature (8)..(9): n is a, c, g, or t
  misc_feature (20)..(20): n is a, c, g, or t
  misc_feature (27)..(27): n is a, c, g, or t
  misc_feature (51)..(51): n is a, c, g, or t
  misc_feature (58)..(58): n is a, c, g, or t
accagtcnncccccccccantttaccncccccccggcctcccaactaatangaaaagnaatagactctttgtgaagaaacgagccagtgactgaaacaccctggtggaaacctgttgacagaccttccactttctcttcagaataagtagctgtggtggatattattatttgaagaaagaaaaaacagattttagggtggaaaaaacagtcaactcacacaaagaatggaaaaaaatactgagttaaattaagcaaataccttttacaagtgaaaggaagaatttttcttctgccgtcaataaaaccattgtgctatta

SEQ ID NO: 431478 - DNA, 393 bp, Homo sapiens
  misc_feature (354)..(354): n is a, c, g, or t
  misc_feature (358)..(358): n is a, c, g, or t
catcaatgtcaggaaaatgatcactgtaaagataactgttacagaactccatgatgccagcagaacaggcagcagtagactctttgtgaagaaacgagccagtgactgaaacaccctggtggaaacctgttgacagaccttccactttctcttcagaataagtagctgtggtggatattattatttgaagaaagaaaaaacagattttagggtggaaaaaacagtcaactcacacaaagaatggaaaaaaatactgagttaaattaagcaaataccttttacaagtgaaaggaagaatttttcttctgccgtcaataaaaccattgtgctattagatgcgccaagctttttttntttnttttttgtgtctttttctctcttaggcgggagtgc

SEQ ID NO: 431479 - DNA, 876 bp, Homo sapiens
  misc_feature (791)..(791): n is a, c, g, or t
  misc_feature (866)..(866): n is a, c, g, or t
  misc_feature (876)..(876): n is a, c, g, or t
ccccccgccacccgacacacaaaacggggacgccgcggtgaatcccgctccttaaaacacttatgggggaccaggaggaagaaggcacctacgatcaaactctggagttccgtaggggaggtgatggccagccaagacgatccactcggccaacccaacagttttaccaaccaccccgggctcggaactaataggaaaagtagactctttgtgaagaaacgagccagtgactgaaacaccctggtggaaacctgttgacagaccttccactttctcttcagaataagtagctgtggtggatattattatttgaagaaagaaaaaacagattttagggtggaaaaaacagtcaactcacacaaagaatggaaaaaaatactgagttaaattaagcaaataccttttacaagtgaaaggaagaatttttcttctgccgtcaataaaaccattgtgctattaaaaaaaaaaacacacaacaccaaaaaaaaaaccagaaagcagaaagctcggcccacccacccccctcgcgcaacacctcccagcactcctccccgtccggcctcacgcagaccgacacggcgcgcccccctgcgccccacagggccgacgcctgctgcgccccttcctttttctctgggggcccccctcccatgattcccccgcccatcacgcccgtccgtcacacagccccgacgtccgcatcgggcatgttccttacttccgtccacccgcgggcccacccccgccgtccccatccactcgcccgcccttcctccatccacccacactcntcctaccgcaccgccctcaacatcgccatcatcttctcacgaggaccgactcttcgctcgcctctcccactccantccgtgcccn

SEQ ID NO: 431480 - DNA, 349 bp, Homo sapiens
  misc_feature (299)..(299): n is a, c, g, or t
gtcgtgcgtcactgactctcttaatttccaccgctacagtagactctttgtgaagaaacgagccagtgactgaaacaccctggtggaaacctgttgacagaccttccactttctcttcagaataagtagctgtggtggatattattatttgaagaaagaaaaaacagattttagggtggaaaaaacagtcaactcacacaaagaatggaaaaaaatactgagttaaattaagcaaataccttttacaagtgaaaggaagaatttttcttctgccgtcaataaaaccattgtgctattantgatgcgaaagggtactcctttcttataaaaactacaggtaaaacgaagg

SEQ ID NO: 431481 - DNA, 2963 bp, Homo sapiens
acccgtcagtctcctcaggccttatcctgccctctctgaggtggccgcctgtgggcgctgcaaacgccacacttttgctctacgaagaacctcctcgcgactttccaaggtgtgcaactcagaaaagcgccccccaaaacaagtaaaagccttcggggaagaggcaaagtccctgaaccgtcctgactccagccaccagccggtgtttggtggatcaggtcccggagctccgcagcctgggagccccacaccaggccggcccctacggccgctcagaaaacgcggcgagcggaacccgcacgcggaagcgccggccgcactgagcatgcccagttgcagagccgaccagaggagttttttcttttcttttctttttttttttttaaggggggggggtctcaagtaggaggcctccccatcacccccaccccagccccccaccacccccggcctaagcagctaccatggcccaggtggccggcgcggcgttgtcccaggcgggttggtatctttcagatgaaggcattgaagcttgcacaagctctccagacaaagtcaatgtaaatgacatcatcctgattgctctcaatatctgagaacaattggcaagaaattcctccccagtgacatcaatagtggaaaggtagaaaagctcgaaggtccatgtgttttgcaaattcaaaaaattcgcaatgttgctgcaccaaaggataatgaagaatctcaggctgcaccaaggatgctgcgattacagatgactgatggtcatataagttgcacagcagtagaatttagttatatgtcaaaaataagcctgaacacaccacctggaactaaagttaagctctcaggcattgttgacataaaaaatggattcctgctcttgaatgactctaacaccacagttcttggtggtgaagtggaacaccttattgagaaatgggagttacagagaagcttatcaaaacacaatagaagcaatattggaactgaaggtggaccaccgccttttgtgccttttggacagaagtgtgtatctcatgtccaagtggatagcagagaacttgatcgaagaaaaacattgcaagttacaatgcctgtcaaacctacaaatgataatgatgaatttgaaaagcaaaggacggctgctattgctgaagttgcaaagagcaaggaaaccaagacatttggaggaggtggtggtggtgctagaagtaatctcaatatgaatgctgctggtaaccgaaatagggaagttttacagaaagaaaagtcaaccaaatcagagggaaaacatgaaggtgtctatagagaactggttgatgagaaagctctgaagcacataacggaaatgggcttcagtaaggaagcatcgaggcaagctcttatggataatggcaacaacttagaagcagcactgaacgtacttcttacaagcaataaacagaaacctgttatgggtcctcctctgagaggtagaggaaaaggcagggggcgaataagatctgaagatgaagaggacctgggaaatgcaaggccatcagcaccaagcacattatttgatttcttggaatctaaaatgggaactttgaatgtggaagaacctaaatcacagccacagcagcttcatcagggacaatacagatcatcaaatactgagcaaaatggagtaaaagataataatcatctgagacatcctcctcgaaatgataccaggcagccaagaaatgaaaaaccgcctcgttttcaaagagactcccaaaattcaaagtcagttttagaaggcagtggattacctagaaatagaggttctgaaagaccaagtacttcttcagtatctgaagtatgggctgaagacagaatcaaatgtgatagaccgtattctagatatgacagaactaaagatacttcatatcctttaggttctcagcatagtgatggtgcttttaaaaaaagagataactctatgcaaagcagatcaggaaaaggtccctcctttgcagaggcaaaagaaaatccacttcctcaaggatctgtagattataataatcaaaaacgtggaaaaagagaaagccaaacatctattcctgattatttttatgacaggaaatcacaaacaataaataatgaagctttcagtggtataaaaattgaaaaacattttaatgtaaatactgattatcagaatccagttcgaagtaatagtttcattggtgttccaaatggagaagtagaaatgccactgaaaggaagacgaataggacctattaagccagcaggacctgtcacagctgtaccctgtgatgataaaatattttacaatagtgggcccaaacgaagatctgggccaattaagccagaaaaaatactagaatcatctattcctatggagtatgcaaaaatgtggaaacctggagatgaatgttttgcactttattgggaagacaacaagttttaccgggcagaagttgaagccctccattcttcgggtatgacagcagttgttaaattcattgactacggaaactatgaagaggtgctactgagcaatatcaagcccattcaaacagaggcatgggaggaagaaggcacctacgatcaaactctggagttccgtaggggaggtgatggccagccaagacgatccactcggccaacccaacagttttaccaaccaccccgggctcggaactaataggaaaagtagactctttgtgaagaaacgagccagtgactgaaacaccctggtggaaacctgttgacagaccttccactttctcttcagaataagtagctgtggtggatattattatttgaagaaagaaaaaacagattttagggtggaaaaaacagtcaactcacacaaagaatggaaaaaaatactgagttaaattaagcaaataccttttacaagtgaaaggaagaatttttcttctgccgtcaataaaaccattgtgctatta

SEQ ID NO: 431482 - DNA, 2503 bp, Homo sapiens
agcggatgtatatgccaagtgacttctgaacacgacgtgaagacagtatctttcagatgaaggcattgaagcttgcacaagctctccagacaaagtcaatgtaaatgacatcatcctgattgctctcaatatctgagaacaattggcaagaaattcctccccagtgacatcaatagtggaaaggtagaaaagctcgaaggtccatgtgttttgcaaattcaaaaaattcgcaatgttgctgcaccaaaggataatgaagaatctcaggctgcaccaaggatgctgcgattacagatgactgatggtcatataagttgcacagcagtagaatttagttatatgtcaaaaataagcctgaacacaccacctggaactaaagttaagctctcaggcattgttgacataaaaaatggattcctgctcttgaatgactctaacaccacagttcttggtggtgaagtggaacaccttattgagaaatgggagttacagagaagcttatcaaaacacaatagaagcaatattggaactgaaggtggaccaccgccttttgtgccttttggacagaagtgtgtatctcatgtccaagtggatagcagagaacttgatcgaagaaaaacattgcaagttacaatgcctgtcaaacctacaaatgataatgatgaatttgaaaagcaaaggacggctgctattgctgaagttgcaaagagcaaggaaaccaagacatttggaggaggtggtggtggtgctagaagtaatctcaatatgaatgctgctggtaaccgaaatagggaagttttacagaaagaaaagtcaaccaaatcagagggaaaacatgaaggtgtctatagagaactggttgatgagaaagctctgaagcacataacggaaatgggcttcagtaaggaagcatcgaggcaagctcttatggataatggcaacaacttagaagcagcactgaacgtacttcttacaagcaataaacagaaacctgttatgggtcctcctctgagaggtagaggaaaaggcagggggcgaataagatctgaagatgaagaggacctgggaaatgcaaggccatcagcaccaagcacattatttgatttcttggaatctaaaatgggaactttgaatgtggaagaacctaaatcacagccacagcagcttcatcagggacaatacagatcatcaaatactgagcaaaatggagtaaaagataataatcatctgagacatcctcctcgaaatgataccaggcagccaagaaatgaaaaaccgcctcgttttcaaagagactcccaaaattcaaagtcagttttagaaggcagtggattacctagaaatagaggttctgaaagaccaagtacttcttcagtatctgaagtatgggctgaagacagaatcaaatgtgatagaccgtattctagatatgacagaactaaagatacttcatatcctttaggttctcagcatagtgatggtgcttttaaaaaaagagataactctatgcaaagcagatcaggaaaaggtccctcctttgcagaggcaaaagaaaatccacttcctcaaggatctgtagattataataatcaaaaacgtggaaaaagagaaagccaaacatctattcctgattatttttatgacaggaaatcacaaacaataaataatgaagctttcagtggtataaaaattgaaaaacattttaatgtaaatactgattatcagaatccagttcgaagtaatagtttcattggtgttccaaatggagaagtagaaatgccactgaaaggaagacgaataggacctattaagccagcaggacctgtcacagctgtaccctgtgatgataaaatattttacaatagtgggcccaaacgaagatctgggccaattaagccagaaaaaatactagaatcatctattcctatggagtatgcaaaaatgtggaaacctggagatgaatgttttgcactttattgggaagacaacaagttttaccgggcagaagttgaagccctccattcttcgggtatgacagcagttgttaaattcattgactacggaaactatgaagaggtgctactgagcaatatcaagcccattcaaacagaggcatgggaggaagaaggcacctacgatcaaactctggagttccgtaggggaggtgatggccagccaagacgatccactcggccaacccaacagttttaccaaccaccccgggctcggaactaataggaaaagtagactctttgtgaagaaacgagccagtgactgaaacaccctggtggaaacctgttgacagaccttccactttctcttcagaataagtagctgtggtggatattattatttgaagaaagaaaaaacagattttagggtggaaaaaacagtcaactcacacaaagaatggaaaaaaatactgagttaaattaagcaaataccttttacaagtgaaaggaagaatttttcttctgccgtcaataaaaccattgtgctatta

SEQ ID NO: 431483 - DNA, 2478 bp, Homo sapiens
catttattttattttaacaggtatctttcagatgaaggcattgaagcttgcacaagctctccagacaaagtcaatgtaaatgacatcatcctgattgctctcaatatctgagaacaattggcaagaaattcctccccagtgacatcaatagtggaaaggtagaaaagctcgaaggtccatgtgttttgcaaattcaaaaaattcgcaatgttgctgcaccaaaggataatgaagaatctcaggctgcaccaaggatgctgcgattacagatgactgatggtcatataagttgcacagcagtagaatttagttatatgtcaaaaataagcctgaacacaccacctggaactaaagttaagctctcaggcattgttgacataaaaaatggattcctgctcttgaatgactctaacaccacagttcttggtggtgaagtggaacaccttattgagaaatgggagttacagagaagcttatcaaaacacaatagaagcaatattggaactgaaggtggaccaccgccttttgtgccttttggacagaagtgtgtatctcatgtccaagtggatagcagagaacttgatcgaagaaaaacattgcaagttacaatgcctgtcaaacctacaaatgataatgatgaatttgaaaagcaaaggacggctgctattgctgaagttgcaaagagcaaggaaaccaagacatttggaggaggtggtggtggtgctagaagtaatctcaatatgaatgctgctggtaaccgaaatagggaagttttacagaaagaaaagtcaaccaaatcagagggaaaacatgaaggtgtctatagagaactggttgatgagaaagctctgaagcacataacggaaatgggcttcagtaaggaagcatcgaggcaagctcttatggataatggcaacaacttagaagcagcactgaacgtacttcttacaagcaataaacagaaacctgttatgggtcctcctctgagaggtagaggaaaaggcagggggcgaataagatctgaagatgaagaggacctgggaaatgcaaggccatcagcaccaagcacattatttgatttcttggaatctaaaatgggaactttgaatgtggaagaacctaaatcacagccacagcagcttcatcagggacaatacagatcatcaaatactgagcaaaatggagtaaaagataataatcatctgagacatcctcctcgaaatgataccaggcagccaagaaatgaaaaaccgcctcgttttcaaagagactcccaaaattcaaagtcagttttagaaggcagtggattacctagaaatagaggttctgaaagaccaagtacttcttcagtatctgaagtatgggctgaagacagaatcaaatgtgatagaccgtattctagatatgacagaactaaagatacttcatatcctttaggttctcagcatagtgatggtgcttttaaaaaaagagataactctatgcaaagcagatcaggaaaaggtccctcctttgcagaggcaaaagaaaatccacttcctcaaggatctgtagattataataatcaaaaacgtggaaaaagagaaagccaaacatctattcctgattatttttatgacaggaaatcacaaacaataaataatgaagctttcagtggtataaaaattgaaaaacattttaatgtaaatactgattatcagaatccagttcgaagtaatagtttcattggtgttccaaatggagaagtagaaatgccactgaaaggaagacgaataggacctattaagccagcaggacctgtcacagctgtaccctgtgatgataaaatattttacaatagtgggcccaaacgaagatctgggccaattaagccagaaaaaatactagaatcatctattcctatggagtatgcaaaaatgtggaaacctggagatgaatgttttgcactttattgggaagacaacaagttttaccgggcagaagttgaagccctccattcttcgggtatgacagcagttgttaaattcattgactacggaaactatgaagaggtgctactgagcaatatcaagcccattcaaacagaggcatgggaggaagaaggcacctacgatcaaactctggagttccgtaggggaggtgatggccagccaagacgatccactcggccaacccaacagttttaccaaccaccccgggctcggaactaataggaaaagtagactctttgtgaagaaacgagccagtgactgaaacaccctggtggaaacctgttgacagaccttccactttctcttcagaataagtagctgtggtggatattattatttgaagaaagaaaaaacagattttagggtggaaaaaacagtcaactcacacaaagaatggaaaaaaatactgagttaaattaagcaaataccttttacaagtgaaaggaagaatttttcttctgccgtcaataaaaccattgtgctatta

SEQ ID NO: 431484 - DNA, 2620 bp, Homo sapiens
catatgtcaaaaataagcctaaacacaccaccgggaacaccagttaagctcgcacggccttgttgacctacgcaaatggattccagctctatgaatgactctaacaccacagttcttggcggtgaagtggaacaccttatcgagaaatgggggttaccgagagtatctttcagatgaaggcattgaagcttgcacaagctctccagacaaagtcaatgtaaatgacatcatcctgattgctctcaatatctgagaacaattggcaagaaattcctccccagtgacatcaatagtggaaaggtagaaaagctcgaaggtccatgtgttttgcaaattcaaaaaattcgcaatgttgctgcaccaaaggataatgaagaatctcaggctgcaccaaggatgctgcgattacagatgactgatggtcatataagttgcacagcagtagaatttagttatatgtcaaaaataagcctgaacacaccacctggaactaaagttaagctctcaggcattgttgacataaaaaatggattcctgctcttgaatgactctaacaccacagttcttggtggtgaagtggaacaccttattgagaaatgggagttacagagaagcttatcaaaacacaatagaagcaatattggaactgaaggtggaccaccgccttttgtgccttttggacagaagtgtgtatctcatgtccaagtggatagcagagaacttgatcgaagaaaaacattgcaagttacaatgcctgtcaaacctacaaatgataatgatgaatttgaaaagcaaaggacggctgctattgctgaagttgcaaagagcaaggaaaccaagacatttggaggaggtggtggtggtgctagaagtaatctcaatatgaatgctgctggtaaccgaaatagggaagttttacagaaagaaaagtcaaccaaatcagagggaaaacatgaaggtgtctatagagaactggttgatgagaaagctctgaagcacataacggaaatgggcttcagtaaggaagcatcgaggcaagctcttatggataatggcaacaacttagaagcagcactgaacgtacttcttacaagcaataaacagaaacctgttatgggtcctcctctgagaggtagaggaaaaggcagggggcgaataagatctgaagatgaagaggacctgggaaatgcaaggccatcagcaccaagcacattatttgatttcttggaatctaaaatgggaactttgaatgtggaagaacctaaatcacagccacagcagcttcatcagggacaatacagatcatcaaatactgagcaaaatggagtaaaagataataatcatctgagacatcctcctcgaaatgataccaggcagccaagaaatgaaaaaccgcctcgttttcaaagagactcccaaaattcaaagtcagttttagaaggcagtggattacctagaaatagaggttctgaaagaccaagtacttcttcagtatctgaagtatgggctgaagacagaatcaaatgtgatagaccgtattctagatatgacagaactaaagatacttcatatcctttaggttctcagcatagtgatggtgcttttaaaaaaagagataactctatgcaaagcagatcaggaaaaggtccctcctttgcagaggcaaaagaaaatccacttcctcaaggatctgtagattataataatcaaaaacgtggaaaaagagaaagccaaacatctattcctgattatttttatgacaggaaatcacaaacaataaataatgaagctttcagtggtataaaaattgaaaaacattttaatgtaaatactgattatcagaatccagttcgaagtaatagtttcattggtgttccaaatggagaagtagaaatgccactgaaaggaagacgaataggacctattaagccagcaggacctgtcacagctgtaccctgtgatgataaaatattttacaatagtgggcccaaacgaagatctgggccaattaagccagaaaaaatactagaatcatctattcctatggagtatgcaaaaatgtggaaacctggagatgaatgttttgcactttattgggaagacaacaagttttaccgggcagaagttgaagccctccattcttcgggtatgacagcagttgttaaattcattgactacggaaactatgaagaggtgctactgagcaatatcaagcccattcaaacagaggcatgggaggaagaaggcacctacgatcaaactctggagttccgtaggggaggtgatggccagccaagacgatccactcggccaacccaacagttttaccaaccaccccgggctcggaactaataggaaaagtagactctttgtgaagaaacgagccagtgactgaaacaccctggtggaaacctgttgacagaccttccactttctcttcagaataagtagctgtggtggatattattatttgaagaaagaaaaaacagattttagggtggaaaaaacagtcaactcacacaaagaatggaaaaaaatactgagttaaattaagcaaataccttttacaagtgaaaggaagaatttttcttctgccgtcaataaaaccattgtgctatta

SEQ ID NO: 431485 - DNA, 2428 bp, Homo sapiens
  misc_feature (22)..(22): n is a, c, g, or t
  misc_feature (28)..(28): n is a, c, g, or t
  misc_feature (39)..(39): n is a, c, g, or t
  misc_feature (43)..(44): n is a, c, g, or t
  misc_feature (52)..(52): n is a, c, g, or t
  misc_feature (69)..(69): n is a, c, g, or t
aaaaaaaataaaaaataaaaanaaaatnaaaataaaaanaaannaaaaatanaatttaacaatactganacaatgttcagaattcctccccatgacacaatagtggaaaggtagaaactcgaaggtccatgtgttttgcaaattcaaaaaattcgcaatgttgctgcaccaaaggataatgaagaatctcaggctgcaccaaggatgctgcgattacagatgactgatggtcatataagttgcacagcagtagaatttagttatatgtcaaaaataagcctgaacacaccacctggaactaaagttaagctctcaggcattgttgacataaaaaatggattcctgctcttgaatgactctaacaccacagttcttggtggtgaagtggaacaccttattgagaaatgggagttacagagaagcttatcaaaacacaatagaagcaatattggaactgaaggtggaccaccgccttttgtgccttttggacagaagtgtgtatctcatgtccaagtggatagcagagaacttgatcgaagaaaaacattgcaagttacaatgcctgtcaaacctacaaatgataatgatgaatttgaaaagcaaaggacggctgctattgctgaagttgcaaagagcaaggaaaccaagacatttggaggaggtggtggtggtgctagaagtaatctcaatatgaatgctgctggtaaccgaaatagggaagttttacagaaagaaaagtcaaccaaatcagagggaaaacatgaaggtgtctatagagaactggttgatgagaaagctctgaagcacataacggaaatgggcttcagtaaggaagcatcgaggcaagctcttatggataatggcaacaacttagaagcagcactgaacgtacttcttacaagcaataaacagaaacctgttatgggtcctcctctgagaggtagaggaaaaggcagggggcgaataagatctgaagatgaagaggacctgggaaatgcaaggccatcagcaccaagcacattatttgatttcttggaatctaaaatgggaactttgaatgtggaagaacctaaatcacagccacagcagcttcatcagggacaatacagatcatcaaatactgagcaaaatggagtaaaagataataatcatctgagacatcctcctcgaaatgataccaggcagccaagaaatgaaaaaccgcctcgttttcaaagagactcccaaaattcaaagtcagttttagaaggcagtggattacctagaaatagaggttctgaaagaccaagtacttcttcagtatctgaagtatgggctgaagacagaatcaaatgtgatagaccgtattctagatatgacagaactaaagatacttcatatcctttaggttctcagcatagtgatggtgcttttaaaaaaagagataactctatgcaaagcagatcaggaaaaggtccctcctttgcagaggcaaaagaaaatccacttcctcaaggatctgtagattataataatcaaaaacgtggaaaaagagaaagccaaacatctattcctgattatttttatgacaggaaatcacaaacaataaataatgaagctttcagtggtataaaaattgaaaaacattttaatgtaaatactgattatcagaatccagttcgaagtaatagtttcattggtgttccaaatggagaagtagaaatgccactgaaaggaagacgaataggacctattaagccagcaggacctgtcacagctgtaccctgtgatgataaaatattttacaatagtgggcccaaacgaagatctgggccaattaagccagaaaaaatactagaatcatctattcctatggagtatgcaaaaatgtggaaacctggagatgaatgttttgcactttattgggaagacaacaagttttaccgggcagaagttgaagccctccattcttcgggtatgacagcagttgttaaattcattgactacggaaactatgaagaggtgctactgagcaatatcaagcccattcaaacagaggcatgggaggaagaaggcacctacgatcaaactctggagttccgtaggggaggtgatggccagccaagacgatccactcggccaacccaacagttttaccaaccaccccgggctcggaactaataggaaaagtagactctttgtgaagaaacgagccagtgactgaaacaccctggtggaaacctgttgacagaccttccactttctcttcagaataagtagctgtggtggatattattatttgaagaaagaaaaaacagattttagggtggaaaaaacagtcaactcacacaaagaatggaaaaaaatactgagttaaattaagcaaataccttttacaagtgaaaggaagaatttttcttctgccgtcaataaaaccattgtgctatta

SEQ ID NO: 431486 - DNA, 2570 bp, Homo sapiens
acccgtcagtctcctcaggccttatcctgccctctctgaggtggccgcctgtgggcgctgcaaacgccacacttttgctctacgaagaacctcctcgcgactttccaaggtatctttcagatgaaggcattgaagcttgcacaagctctccagacaaagtcaatgtaaatgacatcatcctgattgctctcaatctcgaaggtccatgtgttttgcaaattcaaaaaattcgcaatgttgctgcaccaaaggataatgaagaatctcaggctgcaccaaggatgctgcgattacagatgactgatggtcatataagttgcacagcagtagaatttagttatatgtcaaaaataagcctgaacacaccacctggaactaaagttaagctctcaggcattgttgacataaaaaatggattcctgctcttgaatgactctaacaccacagttcttggtggtgaagtggaacaccttattgagaaatgggagttacagagaagcttatcaaaacacaatagaagcaatattggaactgaaggtggaccaccgccttttgtgccttttggacagtttggaagaagaaatagccaagataaaagaaagtgtgaagtcctatggtgtgatccatgttgatgaagtgtgtatctcatgtccaagtggatagcagagaacttgatcgaagaaaaacattgcaagttacaatgcctgtcaaacctacaaatgataatgatgaatttgaaaagcaaaggacggctgctattgctgaagttgcaaagagcaaggaaaccaagacatttggaggaggtggtggtggtgctagaagtaatctcaatatgaatgctgctggtaaccgaaatagggaagttttacagaaagaaaagtcaaccaaatcagagggaaaacatgaaggtgtctatagagaactggttgatgagaaagctctgaagcacataacggaaatgggcttcagtaaggaagcatcgaggcaagctcttatggataatggcaacaacttagaagcagcactgaacgtacttcttacaagcaataaacagaaacctgttatgggtcctcctctgagaggtagaggaaaaggcagggggcgaataagatctgaagatgaagaggacctgggaaatgcaaggccatcagcaccaagcacattatttgatttcttggaatctaaaatgggaactttgaatgtggaagaacctaaatcacagccacagcagcttcatcagggacaatacagatcatcaaatactgagcaaaatggagtaaaagataataatcatctgagacatcctcctcgaaatgataccaggcagccaagaaatgaaaaaccgcctcgttttcaaagagactcccaaaattcaaagtcagttttagaaggcagtggattacctagaaatagaggttctgaaagaccaagtacttcttcagtatctgaagtatgggctgaagacagaatcaaatgtgatagaccgtattctagatatgacagaactaaagatacttcatatcctttaggttctcagcatagtgatggtgcttttaaaaaaagagataactctatgcaaagcagatcaggaaaaggtccctcctttgcagaggcaaaagaaaatccacttcctcaaggatctgtagattataataatcaaaaacgtggaaaaagagaaagccaaacatctattcctgattatttttatgacaggaaatcacaaacaataaataatgaagctttcagtggtataaaaattgaaaaacattttaatgtaaatactgattatcagaatccagttcgaagtaatagtttcattggtgttccaaatggagaagtagaaatgccactgaaaggaagacgaataggacctattaagccagcaggacctgtcacagctgtaccctgtgatgataaaatattttacaatagtgggcccaaacgaagatctgggccaattaagccagaaaaaatactagaatcatctattcctatggagtatgcaaaaatgtggaaacctggagatgaatgttttgcactttattgggaagacaacaagttttaccgggcagaagttgaagccctccattcttcgggtatgacagcagttgttaaattcattgactacggaaactatgaagaggtgctactgagcaatatcaagcccattcaaacagaggcatgggaggaagaaggcacctacgatcaaactctggagttccgtaggggaggtgatggccagccaagacgatccactcggccaacccaacagttttaccaaccaccccgggctcggaactaataggaaaagtagactctttgtgaagaaacgagccagtgactgaaacaccctggtggaaacctgttgacagaccttccactttctcttcagaataagtagctgtggtggatattattatttgaagaaagaaaaaacagattttagggtggaaaaaacagtcaactcacacaaagaatggaaaaaaatactgagttaaattaagcaaataccttttacaagtgaaaggaagaatttttcttctgccgtcaataaaaccattgtgctatta

SEQ ID NO: 431487 - DNA, 566 bp, Homo sapiens
  misc_feature (26)..(26): n is a, c, g, or t
  misc_feature (29)..(29): n is a, c, g, or t
  misc_feature (42)..(43): n is a, c, g, or t
ggacggaggggccgctagggcgcganagnattaggttagganngggggttgcggattttaccgggcagaagttgaagccctccattcttcgggtatgacagcagttgttaaattcattgactacggaaactatgaagaggtgctactgagcaatatcaagcccattcaaacagaggcatgggaggaagaaggcacctacgatcaaactctggagttccgtaggggaggtgatggccagccaagacgatccactcggccaacccaacagttttaccaaccaccccgggctcggaactaataggaaaagtagactctttgtgaagaaacgagccagtgactgaaacaccctggtggaaacctgttgacagaccttccactttctcttcagaataagtagctgtggtggatattattatttgaagaaagaaaaaacagattttagggtggaaaaaacagtcaactcacacaaagaatggaaaaaaatactgagttaaattaagcaaataccttttacaagtgaaaggaagaatttttcttctgccgtcaataaaaccattgtgctatta

SEQ ID NO: 431488 - DNA, 930 bp, Homo sapiens
gattaaactcgagatacagctttttgcagtatggtgggttggttttggtgtaacgtcttcaacatgtcgcactggctatcaaagaataagaaaattattgagtatgagtgtgttttataaactttctgagtttttcagatgtcttaatatttttaatagaacttaataaaatgtctagattgaaaaaaaataatttcaaagttttgacagaaactgctaagcaaaatttttaagcaaactgctttaaataattttcattataaaaaatgttttatattctgaaatgagaattactatactttgaggttgcaatgaatttcacataaatggcaaagtataaccaaaaaaaatctcatgacattgttcaccacttttgccattcttggacccaaggctggaaaacattttcagacactgtgctttatcctgaaaggatttggtgaaaagggatctctgagctccaggggagctggaaatgcacaggaggagtcagaagacctgggttcgagtcctggctctgccacttactacctatgtgactttgggaggaagaaggcacctacgatcaaactctggagttccgtaggggaggtgatggccagccaagacgatccactcggccaacccaacagttttaccaaccaccccgggctcggaactaataggaaaagtagactctttgtgaagaaacgagccagtgactgaaacaccctggtggaaacctgttgacagaccttccactttctcttcagaataagtagctgtggtggatattattatttgaagaaagaaaaaacagattttagggtggaaaaaacagtcaactcacacaaagaatggaaaaaaatactgagttaaattaagcaaataccttttacaagtgaaaggaagaatttttcttctgccgtcaataaaaccattgtgctatta

SEQ ID NO: 431489 - DNA, 2626 bp, Homo sapiens
  misc_feature (2587)..(2587): n is a, c, g, or t
  misc_feature (2591)..(2591): n is a, c, g, or t
acccgtcagtctcctcaggccttatcctgccctctctgaggtggccgcctgtgggcgctgcaaacgccacacttttgctctacgaagaacctcctcgcgactttccaaggtatctttcagatgaaggcattgaagcttgcacaagctctccagacaaagtcaatgtaaatgacatcatcctgattgctctcaatatctgagaacaattggcaagaaattcctccccagtgacatcaatagtggaaaggtagaaaagctcgaaggtccatgtgttttgcaaattcaaaaaattcgcaatgttgctgcaccaaaggataatgaagaatctcaggctgcaccaaggatgctgcgattacagatgactgatggtcatataagttgcacagcagtagaatttagttatatgtcaaaaataagcctgaacacaccacctggaactaaagttaagctctcaggcattgttgacataaaaaatggattcctgctcttgaatgactctaacaccacagttcttggtggtgaagtggaacaccttattgagaaatgggagttacagagaagcttatcaaaacacaatagaagcaatattggaactgaaggtggaccaccgccttttgtgccttttggacagaagtgtgtatctcatgtccaagtggatagcagagaacttgatcgaagaaaaacattgcaagttacaatgcctgtcaaacctacaaatgataatgatgaatttgaaaagcaaaggacggctgctattgctgaagttgcaaagagcaaggaaaccaagacatttggaggaggtggtggtggtgctagaagtaatctcaatatgaatgctgctggtaaccgaaatagggaagttttacagaaagaaaagtcaaccaaatcagagggaaaacatgaaggtgtctatagagaactggttgatgagaaagctctgaagcacataacggaaatgggcttcagtaaggaagcatcgaggcaagctcttatggataatggcaacaacttagaagcagcactgaacgtacttcttacaagcaataaacagaaacctgttatgggtcctcctctgagaggtagaggaaaaggcagggggcgaataagatctgaagatgaagaggacctgggaaatgcaaggccatcagcaccaagcacattatttgatttcttggaatctaaaatgggaactttgaatgtggaagaacctaaatcacagccacagcagcttcatcagggacaatacagatcatcaaatactgagcaaaatggagtaaaagataataatcatctgagacatcctcctcgaaatgataccaggcagccaagaaatgaaaaaccgcctcgttttcaaagagactcccaaaattcaaagtcagttttagaaggcagtggattacctagaaatagaggttctgaaagaccaagtacttcttcagtatctgaagtatgggctgaagacagaatcaaatgtgatagaccgtattctagatatgacagaactaaagatacttcatatcctttaggttctcagcatagtgatggtgcttttaaaaaaagagataactctatgcaaagcagatcaggaaaaggtccctcctttgcagaggcaaaagaaaatccacttcctcaaggatctgtagattataataatcaaaaacgtggaaaaagagaaagccaaacatctattcctgattatttttatgacaggaaatcacaaacaataaataatgaagctttcagtggtataaaaattgaaaaacattttaatgtaaatactgattatcagaatccagttcgaagtaatagtttcattggtgttccaaatggagaagtagaaatgccactgaaaggaagacgaataggacctattaagccagcaggacctgtcacagctgtaccctgtgatgataaaatattttacaatagtgggcccaaacgaagatctgggccaattaagccagaaaaaatactagaatcatctattcctatggagtatgcaaaaatgtggaaacctggagatgaatgttttgcactttattgggaagacaacaagttttaccgggcagaagttgaagccctccattcttcgggtatgacagcagttgttaaattcattgactacggaaactatgaagaggtgctactgagcaatatcaagcccattcaaacagaggcatgggaggaagaaggcacctacgatcaaactctggagttccgtaggggaggtgatggccagccaagacgatccactcggccaacccaacagttttaccaaccaccccgggctcggaactaataggaaaagtagactctttgtgaagaaacgagccagtgactgaaacaccctggtggaaacctgttgacagaccttccactttctcttcagaataagtagctgtggtggatattattatttgaagaaagaaaaaacagattttagggtggaaaaaacagtcaactcacacaaagaatggaaaaaaatactgagttaaattaagcaaataccttttacaagtgaaaggaagaatttttcttctgccgtcaataaaaccattgtgctattagatgcgccaagctttttttntttnttttttgtgtctttttctctcttaggcgggagtgc

SEQ ID NO: 431490 - DNA, 454 bp, Homo sapiens
attttatttccgctttccggcgccgcggcgtcagcgtttgtgtgcaacattgtgcgttcagaggtataggaggaagaaggcacctacgatcaaactctggagttccgtaggggaggtgatggccagccaagacgatccactcggccaacccaacagttttaccaaccaccccgggctcggaactaataggaaaagtagactctttgtgaagaaacgagccagtgactgaaacaccctggtggaaacctgttgacagaccttccactttctcttcagaataagtagctgtggtggatattattatttgaagaaagaaaaaacagattttagggtggaaaaaacagtcaactcacacaaagaatggaaaaaaatactgagttaaattaagcaaataccttttacaagtgaaaggaagaatttttcttctgccgtcaataaaaccattgtgctatta

SEQ ID NO: 431491 - DNA, 447 bp, Homo sapiens
gtggggggggacaccgtttattaggtgaagggcgggggggcggggcgccggtggaattcagggaggaagaaggcacctacgatcaaactctggagttccgtaggggaggtgatggccagccaagacgatccactcggccaacccaacagttttaccaaccaccccgggctcggaactaataggaaaagtagactctttgtgaagaaacgagccagtgactgaaacaccctggtggaaacctgttgacagaccttccactttctcttcagaataagtagctgtggtggatattattatttgaagaaagaaaaaacagattttagggtggaaaaaacagtcaactcacacaaagaatggaaaaaaatactgagttaaattaagcaaataccttttacaagtgaaaggaagaatttttcttctgccgtcaataaaaccattgtgctatta

SEQ ID NO: 431492 - DNA, 459 bp, Homo sapiens
ccccccgccacccgacacacaaaacggggacgccgcggtgaatcccgctccttaaaacacttatgggggaccaggaggaagaaggcacctacgatcaaactctggagttccgtaggggaggtgatggccagccaagacgatccactcggccaacccaacagttttaccaaccaccccgggctcggaactaataggaaaagtagactctttgtgaagaaacgagccagtgactgaaacaccctggtggaaacctgttgacagaccttccactttctcttcagaataagtagctgtggtggatattattatttgaagaaagaaaaaacagattttagggtggaaaaaacagtcaactcacacaaagaatggaaaaaaatactgagttaaattaagcaaataccttttacaagtgaaaggaagaatttttcttctgccgtcaataaaaccattgtgctatta

SEQ ID NO: 431493 - DNA, 2609 bp, Homo sapiens
  misc_feature (2609)..(2609): n is a, c, g, or t
acccgtcagtctcctcaggccttatcctgccctctctgaggtggccgcctgtgggcgctgcaaacgccacacttttgctctacgaagaacctcctcgcgactttccaaggtatctttcagatgaaggcattgaagcttgcacaagctctccagacaaagtcaatgtaaatgacatcatcctgattgctctcaatatctgagaacaattggcaagaaattcctccccagtgacatcaatagtggaaaggtagaaaagctcgaaggtccatgtgttttgcaaattcaaaaaattcgcaatgttgctgcaccaaaggataatgaagaatctcaggctgcaccaaggatgctgcgattacagatgactgatggtcatataagttgcacagcagtagaatttagttatatgtcaaaaataagcctgaacacaccacctggaactaaagttaagctctcaggcattgttgacataaaaaatggattcctgctcttgaatgactctaacaccacagttcttggtggtgaagtggaacaccttattgagaaatgggagttacagagaagcttatcaaaacacaatagaagcaatattggaactgaaggtggaccaccgccttttgtgccttttggacagaagtgtgtatctcatgtccaagtggatagcagagaacttgatcgaagaaaaacattgcaagttacaatgcctgtcaaacctacaaatgataatgatgaatttgaaaagcaaaggacggctgctattgctgaagttgcaaagagcaaggaaaccaagacatttggaggaggtggtggtggtgctagaagtaatctcaatatgaatgctgctggtaaccgaaatagggaagttttacagaaagaaaagtcaaccaaatcagagggaaaacatgaaggtgtctatagagaactggttgatgagaaagctctgaagcacataacggaaatgggcttcagtaaggaagcatcgaggcaagctcttatggataatggcaacaacttagaagcagcactgaacgtacttcttacaagcaataaacagaaacctgttatgggtcctcctctgagaggtagaggaaaaggcagggggcgaataagatctgaagatgaagaggacctgggaaatgcaaggccatcagcaccaagcacattatttgatttcttggaatctaaaatgggaactttgaatgtggaagaacctaaatcacagccacagcagcttcatcagggacaatacagatcatcaaatactgagcaaaatggagtaaaagataataatcatctgagacatcctcctcgaaatgataccaggcagccaagaaatgaaaaaccgcctcgttttcaaagagactcccaaaattcaaagtcagttttagaaggcagtggattacctagaaatagaggttctgaaagaccaagtacttcttcagtatctgaagtatgggctgaagacagaatcaaatgtgatagaccgtattctagatatgacagaactaaagatacttcatatcctttaggttctcagcatagtgatggtgcttttaaaaaaagagataactctatgcaaagcagatcaggaaaaggtccctcctttgcagaggcaaaagaaaatccacttcctcaaggatctgtagattataataatcaaaaacgtggaaaaagagaaagccaaacatctattcctgattatttttatgacaggaaatcacaaacaataaataatgaagctttcagtggtataaaaattgaaaaacattttaatgtaaatactgattatcagaatccagttcgaagtaatagtttcattggtgttccaaatggagaagtagaaatgccactgaaaggaagacgaataggacctattaagccagcaggacctgtcacagctgtaccctgtgatgataaaatattttacaatagtgggcccaaacgaagatctgggccaattaagccagaaaaaatactagaatcatctattcctatggagtatgcaaaaatgtggaaacctggagatgaatgttttgcactttattgggaagacaacaagttttaccgggcagaagttgaagccctccattcttcgggtatgacagcagttgttaaattcattgactacggaaactatgaagaggtgctactgagcaatatcaagcccattcaaacagaggcatgggaggaagaaggcacctacgatcaaactctggagttccgtaggggaggtgatggccagccaagacgatccactcggccaacccaacagttttaccaaccaccccgggctcggaactaataggaaaagtagactctttgtgaagaaacgagccagtgactgaaacaccctggtggaaacctgttgacagaccttccactttctcttcagaataagtagctgtggtggatattattatttgaagaaagaaaaaacagattttagggtggaaaaaacagtcaactcacacaaagaatggaaaaaaatactgagttaaattaagcaaataccttttacaagtgaaaggaagaatttttcttctgccgtcaataaaaccattgtgctattattggcctcgttggcctcagcggtggagctctgcggccggaan

SEQ ID NO: 431494 - DNA, 2595 bp, Homo sapiens
  misc_feature (2568)..(2568): n is a, c, g, or t
  misc_feature (2575)..(2575): n is a, c, g, or t
acccgtcagtctcctcaggccttatcctgccctctctgaggtggccgcctgtgggcgctgcaaacgccacacttttgctctacgaagaacctcctcgcgactttccaaggtatctttcagatgaaggcattgaagcttgcacaagctctccagacaaagtcaatgtaaatgacatcatcctgattgctctcaatatctgagaacaattggcaagaaattcctccccagtgacatcaatagtggaaaggtagaaaagctcgaaggtccatgtgttttgcaaattcaaaaaattcgcaatgttgctgcaccaaaggataatgaagaatctcaggctgcaccaaggatgctgcgattacagatgactgatggtcatataagttgcacagcagtagaatttagttatatgtcaaaaataagcctgaacacaccacctggaactaaagttaagctctcaggcattgttgacataaaaaatggattcctgctcttgaatgactctaacaccacagttcttggtggtgaagtggaacaccttattgagaaatgggagttacagagaagcttatcaaaacacaatagaagcaatattggaactgaaggtggaccaccgccttttgtgccttttggacagaagtgtgtatctcatgtccaagtggatagcagagaacttgatcgaagaaaaacattgcaagttacaatgcctgtcaaacctacaaatgataatgatgaatttgaaaagcaaaggacggctgctattgctgaagttgcaaagagcaaggaaaccaagacatttggaggaggtggtggtggtgctagaagtaatctcaatatgaatgctgctggtaaccgaaatagggaagttttacagaaagaaaagtcaaccaaatcagagggaaaacatgaaggtgtctatagagaactggttgatgagaaagctctgaagcacataacggaaatgggcttcagtaaggaagcatcgaggcaagctcttatggataatggcaacaacttagaagcagcactgaacgtacttcttacaagcaataaacagaaacctgttatgggtcctcctctgagaggtagaggaaaaggcagggggcgaataagatctgaagatgaagaggacctgggaaatgcaaggccatcagcaccaagcacattatttgatttcttggaatctaaaatgggaactttgaatgtggaagaacctaaatcacagccacagcagcttcatcagggacaatacagatcatcaaatactgagcaaaatggagtaaaagataataatcatctgagacatcctcctcgaaatgataccaggcagccaagaaatgaaaaaccgcctcgttttcaaagagactcccaaaattcaaagtcagttttagaaggcagtggattacctagaaatagaggttctgaaagaccaagtacttcttcagtatctgaagtatgggctgaagacagaatcaaatgtgatagaccgtattctagatatgacagaactaaagatacttcatatcctttaggttctcagcatagtgatggtgcttttaaaaaaagagataactctatgcaaagcagatcaggaaaaggtccctcctttgcagaggcaaaagaaaatccacttcctcaaggatctgtagattataataatcaaaaacgtggaaaaagagaaagccaaacatctattcctgattatttttatgacaggaaatcacaaacaataaataatgaagctttcagtggtataaaaattgaaaaacattttaatgtaaatactgattatcagaatccagttcgaagtaatagtttcattggtgttccaaatggagaagtagaaatgccactgaaaggaagacgaataggacctattaagccagcaggacctgtcacagctgtaccctgtgatgataaaatattttacaatagtgggcccaaacgaagatctgggccaattaagccagaaaaaatactagaatcatctattcctatggagtatgcaaaaatgtggaaacctggagatgaatgttttgcactttattgggaagacaacaagttttaccgggcagaagttgaagccctccattcttcgggtatgacagcagttgttaaattcattgactacggaaactatgaagaggtgctactgagcaatatcaagcccattcaaacagaggcatgggaggaagaaggcacctacgatcaaactctggagttccgtaggggaggtgatggccagccaagacgatccactcggccaacccaacagttttaccaaccaccccgggctcggaactaataggaaaagtagactctttgtgaagaaacgagccagtgactgaaacaccctggtggaaacctgttgacagaccttccactttctcttcagaataagtagctgtggtggatattattatttgaagaaagaaaaaacagattttagggtggaaaaaacagtcaactcacacaaagaatggaaaaaaatactgagttaaattaagcaaataccttttacaagtgaaaggaagaatttttcttctgccgtcaataaaaccattgtgctattangatgcgnccggaagcctgtcttcatac

SEQ ID NO: 431495 - DNA, 2984 bp, Homo sapiens
  misc_feature (2899)..(2899): n is a, c, g, or t
  misc_feature (2974)..(2974): n is a, c, g, or t
  misc_feature (2984)..(2984): n is a, c, g, or t
acccgtcagtctcctcaggccttatcctgccctctctgaggtggccgcctgtgggcgctgcaaacgccacacttttgctctacgaagaacctcctcgcgactttccaaggtatctttcagatgaaggcattgaagcttgcacaagctctccagacaaagtcaatgtaaatgacatcatcctgattgctctcaatatctgagaacaattggcaagaaattcctccccagtgacatcaatagtggaaaggtagaaaagctcgaaggtccatgtgttttgcaaattcaaaaaattcgcaatgttgctgcaccaaaggataatgaagaatctcaggctgcaccaaggatgctgcgattacagatgactgatggtcatataagttgcacagcagtagaatttagttatatgtcaaaaataagcctgaacacaccacctggaactaaagttaagctctcaggcattgttgacataaaaaatggattcctgctcttgaatgactctaacaccacagttcttggtggtgaagtggaacaccttattgagaaatgggagttacagagaagcttatcaaaacacaatagaagcaatattggaactgaaggtggaccaccgccttttgtgccttttggacagaagtgtgtatctcatgtccaagtggatagcagagaacttgatcgaagaaaaacattgcaagttacaatgcctgtcaaacctacaaatgataatgatgaatttgaaaagcaaaggacggctgctattgctgaagttgcaaagagcaaggaaaccaagacatttggaggaggtggtggtggtgctagaagtaatctcaatatgaatgctgctggtaaccgaaatagggaagttttacagaaagaaaagtcaaccaaatcagagggaaaacatgaaggtgtctatagagaactggttgatgagaaagctctgaagcacataacggaaatgggcttcagtaaggaagcatcgaggcaagctcttatggataatggcaacaacttagaagcagcactgaacgtacttcttacaagcaataaacagaaacctgttatgggtcctcctctgagaggtagaggaaaaggcagggggcgaataagatctgaagatgaagaggacctgggaaatgcaaggccatcagcaccaagcacattatttgatttcttggaatctaaaatgggaactttgaatgtggaagaacctaaatcacagccacagcagcttcatcagggacaatacagatcatcaaatactgagcaaaatggagtaaaagataataatcatctgagacatcctcctcgaaatgataccaggcagccaagaaatgaaaaaccgcctcgttttcaaagagactcccaaaattcaaagtcagttttagaaggcagtggattacctagaaatagaggttctgaaagaccaagtacttcttcagtatctgaagtatgggctgaagacagaatcaaatgtgatagaccgtattctagatatgacagaactaaagatacttcatatcctttaggttctcagcatagtgatggtgcttttaaaaaaagagataactctatgcaaagcagatcaggaaaaggtccctcctttgcagaggcaaaagaaaatccacttcctcaaggatctgtagattataataatcaaaaacgtggaaaaagagaaagccaaacatctattcctgattatttttatgacaggaaatcacaaacaataaataatgaagctttcagtggtataaaaattgaaaaacattttaatgtaaatactgattatcagaatccagttcgaagtaatagtttcattggtgttccaaatggagaagtagaaatgccactgaaaggaagacgaataggacctattaagccagcaggacctgtcacagctgtaccctgtgatgataaaatattttacaatagtgggcccaaacgaagatctgggccaattaagccagaaaaaatactagaatcatctattcctatggagtatgcaaaaatgtggaaacctggagatgaatgttttgcactttattgggaagacaacaagttttaccgggcagaagttgaagccctccattcttcgggtatgacagcagttgttaaattcattgactacggaaactatgaagaggtgctactgagcaatatcaagcccattcaaacagaggcatgggaggaagaaggcacctacgatcaaactctggagttccgtaggggaggtgatggccagccaagacgatccactcggccaacccaacagttttaccaaccaccccgggctcggaactaataggaaaagtagactctttgtgaagaaacgagccagtgactgaaacaccctggtggaaacctgttgacagaccttccactttctcttcagaataagtagctgtggtggatattattatttgaagaaagaaaaaacagattttagggtggaaaaaacagtcaactcacacaaagaatggaaaaaaatactgagttaaattaagcaaataccttttacaagtgaaaggaagaatttttcttctgccgtcaataaaaccattgtgctattaaaaaaaaaaacacacaacaccaaaaaaaaaaccagaaagcagaaagctcggcccacccacccccctcgcgcaacacctcccagcactcctccccgtccggcctcacgcagaccgacacggcgcgcccccctgcgccccacagggccgacgcctgctgcgccccttcctttttctctgggggcccccctcccatgattcccccgcccatcacgcccgtccgtcacacagccccgacgtccgcatcgggcatgttccttacttccgtccacccgcgggcccacccccgccgtccccatccactcgcccgcccttcctccatccacccacactcntcctaccgcaccgccctcaacatcgccatcatcttctcacgaggaccgactcttcgctcgcctctcccactccantccgtgcccn

SEQ ID NO: 431496 - DNA, 2618 bp, Homo sapiens
  misc_feature (2568)..(2568): n is a, c, g, or t
acccgtcagtctcctcaggccttatcctgccctctctgaggtggccgcctgtgggcgctgcaaacgccacacttttgctctacgaagaacctcctcgcgactttccaaggtatctttcagatgaaggcattgaagcttgcacaagctctccagacaaagtcaatgtaaatgacatcatcctgattgctctcaatatctgagaacaattggcaagaaattcctccccagtgacatcaatagtggaaaggtagaaaagctcgaaggtccatgtgttttgcaaattcaaaaaattcgcaatgttgctgcaccaaaggataatgaagaatctcaggctgcaccaaggatgctgcgattacagatgactgatggtcatataagttgcacagcagtagaatttagttatatgtcaaaaataagcctgaacacaccacctggaactaaagttaagctctcaggcattgttgacataaaaaatggattcctgctcttgaatgactctaacaccacagttcttggtggtgaagtggaacaccttattgagaaatgggagttacagagaagcttatcaaaacacaatagaagcaatattggaactgaaggtggaccaccgccttttgtgccttttggacagaagtgtgtatctcatgtccaagtggatagcagagaacttgatcgaagaaaaacattgcaagttacaatgcctgtcaaacctacaaatgataatgatgaatttgaaaagcaaaggacggctgctattgctgaagttgcaaagagcaaggaaaccaagacatttggaggaggtggtggtggtgctagaagtaatctcaatatgaatgctgctggtaaccgaaatagggaagttttacagaaagaaaagtcaaccaaatcagagggaaaacatgaaggtgtctatagagaactggttgatgagaaagctctgaagcacataacggaaatgggcttcagtaaggaagcatcgaggcaagctcttatggataatggcaacaacttagaagcagcactgaacgtacttcttacaagcaataaacagaaacctgttatgggtcctcctctgagaggtagaggaaaaggcagggggcgaataagatctgaagatgaagaggacctgggaaatgcaaggccatcagcaccaagcacattatttgatttcttggaatctaaaatgggaactttgaatgtggaagaacctaaatcacagccacagcagcttcatcagggacaatacagatcatcaaatactgagcaaaatggagtaaaagataataatcatctgagacatcctcctcgaaatgataccaggcagccaagaaatgaaaaaccgcctcgttttcaaagagactcccaaaattcaaagtcagttttagaaggcagtggattacctagaaatagaggttctgaaagaccaagtacttcttcagtatctgaagtatgggctgaagacagaatcaaatgtgatagaccgtattctagatatgacagaactaaagatacttcatatcctttaggttctcagcatagtgatggtgcttttaaaaaaagagataactctatgcaaagcagatcaggaaaaggtccctcctttgcagaggcaaaagaaaatccacttcctcaaggatctgtagattataataatcaaaaacgtggaaaaagagaaagccaaacatctattcctgattatttttatgacaggaaatcacaaacaataaataatgaagctttcagtggtataaaaattgaaaaacattttaatgtaaatactgattatcagaatccagttcgaagtaatagtttcattggtgttccaaatggagaagtagaaatgccactgaaaggaagacgaataggacctattaagccagcaggacctgtcacagctgtaccctgtgatgataaaatattttacaatagtgggcccaaacgaagatctgggccaattaagccagaaaaaatactagaatcatctattcctatggagtatgcaaaaatgtggaaacctggagatgaatgttttgcactttattgggaagacaacaagttttaccgggcagaagttgaagccctccattcttcgggtatgacagcagttgttaaattcattgactacggaaactatgaagaggtgctactgagcaatatcaagcccattcaaacagaggcatgggaggaagaaggcacctacgatcaaactctggagttccgtaggggaggtgatggccagccaagacgatccactcggccaacccaacagttttaccaaccaccccgggctcggaactaataggaaaagtagactctttgtgaagaaacgagccagtgactgaaacaccctggtggaaacctgttgacagaccttccactttctcttcagaataagtagctgtggtggatattattatttgaagaaagaaaaaacagattttagggtggaaaaaacagtcaactcacacaaagaatggaaaaaaatactgagttaaattaagcaaataccttttacaagtgaaaggaagaatttttcttctgccgtcaataaaaccattgtgctattantgatgcgaaagggtactcctttcttataaaaactacaggtaaaacgaagg

SEQ ID NO: 431497 - DNA, 1306 bp, Homo sapiens
acccgtcagtctcctcaggccttatcctgccctctctgaggtggccgcctgtgggcgctgcaaacgccacacttttgctctacgaagaacctcctcgcgactttccaaggtgtgcaactcagaaaagcgccccccaaaacaagtaaaagccttcggggaagaggcaaagtccctgaaccgtcctgactccagccaccagccggtgtttggtggatcaggtcccggagctccgcagcctgggagccccacaccaggccggcccctacggccgctcagaaaacgcggcgagcggaacccgcacgcggaagcgccggccgcactgagcatgcccagttgcagagccgaccagaggagttttttcttttcttttctttttttttttttaaggggggggggtctcaagtaggaggcctccccatcacccccaccccagccccccaccacccccggcctaagcagctaccatggcccaggtggccggcgcggcgttgtcccaggcgggttggtatctttcagatgaaggcattgaagcttgcacaagctctccagacaaagtcaatgtaaatgacatcatcctgattgctctcaatatctgagaacaattggcaagaaattcctccccagtgacatcaatagtggaaaggtagaaaagctcgaaggtccatgtgttttgcaaattcaaaaaattcgcaatgttgctgcaccaaaggataatgaagaatctcaggctgcaccaaggatgctgcgattacagatgactgatggtcatataagttgcacagcagtagaatttagttatatgtcaaaaataaggtgattggcactttattttgtgtatttgttacagaatgttgaaggtgctattcaattggaataacttaagaattttgaaaagtaggaatggacccttaattgtgtgttacagtttttcagatgaaattatagagcttttctgcatttctgcttcacctgtataaaaatagttaagaatatatggccaggcgtggtggctcaagcctgtaatcccagcactttgggaggccaagggggacggatcacccaaggtcaggagttcaagaccagcctgaccaatgtggtgaaaccctgtctctacaaaatacaagaattagccaggcatgatggcgggtgccggtaatcccagctacttgggaggctgaggtgggagaatagcttgaacctggtaggcggaggttgcagtgagctgagatcatgccattgcacttcagcctgggtgacagtgggactgtgtctcaaaaatatatatatataaaataaaaataaatta

SEQ ID NO: 431498 - DNA, 2256 bp, Homo sapiens
gagggcgcttccggcacagcggaactccgggtgccggttgaggttgctggtggacctgctctggtggtcttggatgaggccccatgagcgcggcgcccctggtgggctacagcagcagcggctccgaggatgagtccgaggacgggatgcggaccaggccgggggatgggagccaccgtcgtggccagagcccccttcccaggcagagatttccagtacctgacagtgtgctgaacatgttcccgggcaccgaggaggggcctgaagatgacagcacaaaacacgggggacgggtgcgcaccttcccccacgagcgaggcaactgggccacccacgtctatgtaccatatgaagccaaggaggagttcctggatctgcttgatgtgttgctgccccatgcccagacatatgtcccccggctggtaaggatgaaggtgttccacctcagcctgtcccagagtgtggttctgcgccaccactggatcctccccttcgtgcaggctctgaaagcccgtatgacctccttccacagattcttctttactgccaaccaggtaaagatttacaccaatcaagagaaaaccaggacctttattgggcttgaggtcacttcagggcatgcccagttcctggacctggtttcagaggtggacagagtcatggaggaattcaacctcaccactttctaccaggatccttctttccacctcagcctggcctggtgtgtgggtgatgcacgtctccagctggaggggcagtgcctgcaggaactacaggcaatcgtggatgggtttgaagatgctgaggtgctgctgcgcgtgcacactgagcaagtccgctgcaagtctgggaacaagttcttctcgatgcctttgaagtgagcaccagaggccttcctcctccagggccctctgcagaccaggctgagatggaggaacctgctaaaatcgatggagatgcttctagcctcccagtaggaggccccagccatgccttcaacctggcaggaggtgtagccactcctcatcctccctgagtgctgatattctctctctctctttctcttcctcttctttctctctcttctcctctctttctctcctctgtctctcttcctctcctctcttcctctcttctctcttcctctcctctctctcttcctcttctctctcttcccctcctgtctctcctcccctcctctctctcttcctctcctctctcttcctctcctctctctacccctcctgtctctcctcccctcctctctcttcctctcctctctctcttcctctcctctctcttcccttcctgtctctcttcccctcctctctctcttcctgtcctctatctcttcccctcctctatctcttcctctcctctctctcttcctctcctctctctctcttgctttcttctctctctcctgtctcggctgttgtgggttgcaggttgggtgctgctgttgtggtccttcccagaaactgccagtagagggcagcctgggcatcctaatgcttactctggttgttacacaaagaaaatattggggtcactggcgagcccacccacactcaccagaatctccactgtagtccccctaacaaacagcccttcacttcctctcccacttcagcaatttgtattttgatgccattggcctcagatcagagtgttttaaatcatcacgccctggcttatccctggtcgagccaggacacggggtgcttcagtgggtctgtcaccctctctccttgaagcatgttgcttttatttatttacttttactctcaccctgctcctgtaccagcaggggccacttcaaagccaaggtacagggtgataacttgtggtccagcatcagttttctccacttctttctcccactcacccccagcaaggtgcctggggagacttgagcagatgtttcattttggcctggccagtggctgaaagccaggcctccaatgcactgtgacctctggcttccccagcagctttcccagagaggcagaggggccttccacagcccgggttctcctgctgcctcctgcctgctgcagctgcaggcattctgaggggcaacgtggaggaagggccagggatgcatgggattttaattgtttcatcacaccttccccgtggcaaagaaacagtcagtcctcttcaggtgtcttctggatttctggtgatggacagagaaatctttttacagtttcaaattatgttcaacaaataaaaattgcattttttattttg

SEQ ID NO: 431499 - DNA, 1091 bp, Homo sapiens
  misc_feature (4)..(4): n is a, c, g, or t
  misc_feature (63)..(63): n is a, c, g, or t
  misc_feature (78)..(78): n is a, c, g, or t
  misc_feature (90)..(90): n is a, c, g, or t
  misc_feature (94)..(95): n is a, c, g, or t
  misc_feature (98)..(98): n is a, c, g, or t
  misc_feature (100)..(100): n is a, c, g, or t
  misc_feature (147)..(147): n is a, c, g, or t
gggntctccgcgcgttcgtgtttttctccttttttctttttttttccctcttttctccctctntttctttttcttttntctttctttttnaccnnttntntctccctctttttttctctcttttttttcctctctttttttccctcnttttttctccctcctctctctcttcctgtcctctatctcttcccctcctctatctcttcctctcctctctctcttcctctcctctctctctcttgctttcttctctctctcctgtctcggctgttgtgggttgcaggttgggtgctgctgttgtggtccttcccagaaactgccagtagagggcagcctgggcatcctaatgcttactctggttgttacacaaagaaaatattggggtcactggcgagcccacccacactcaccagaatctccactgtagtccccctaacaaacagcccttcacttcctctcccacttcagcaatttgtattttgatgccattggcctcagatcagagtgttttaaatcatcacgccctggcttatccctggtcgagccaggacacggggtgcttcagtgggtctgtcaccctctctccttgaagcatgttgcttttatttatttacttttactctcaccctgctcctgtaccagcaggggccacttcaaagccaaggtacagggtgataacttgtggtccagcatcagttttctccacttctttctcccactcacccccagcaaggtgcctggggagacttgagcagatgtttcattttggcctggccagtggctgaaagccaggcctccaatgcactgtgacctctggcttccccagcagctttcccagagaggcagaggggccttccacagcccgggttctcctgctgcctcctgcctgctgcagctgcaggcattctgaggggcaacgtggaggaagggccagggatgcatgggattttaattgtttcatcacaccttccccgtggcaaagaaacagtcagtcctcttcaggtgtcttctggatttctggtgatggacagagaaatctttttacagtttcaaattatgttcaacaaataaaaattgcattttttattttg

SEQ ID NO: 431500 - DNA, 1764 bp, Homo sapiens
gagggcgcttccggcacagcggaactccgggtgccggttgaggttgctggtggacctgctctggtggtcttggatgaggccccatgagcgcggcgcccctggtgggctacagcagcagcggctccgaggatgagtccgaggacgggatgcggaccaggccgggggatgggagccaccgtcgtggccagagcccccttcccaggcagagatttccagtacctgacagtgtgctgaacatgttcccgggcaccgaggaggggcctgaagatgacagcacaaaacacgggggacgggtgcgcaccttcccccacgagcgaggcaactgggccacccacgtctatgtaccatatgaagccaaggaggagttcctggatctgcttgatgtgttgctgccccatgcccagacatatgtcccccggctggtaaggatgaaggtgttccacctcagcctgtcccagagtgtggttctgcgccaccactggatcctccccttcgtgcaggctctgaaagcccgtatgacctccttccacaggtgccagaagcccatgccagaagcccaacccaaagtggcttaaaccaaagagaaatttataggctggtataactaaaagattcagaggtagcactggctcatgcatgagtggaccggggtgacaagatatcagatggcacctgactgtcaccaccacaggcagactgttcaccatctcagctctgtccccttcctttgtcacaatgacgaagccaccgcatctcccggctaatggtgtaccagcctggaaagacagcctccctctctgattggcttcagcacaagtcacaggaatgactgcctggtctgacccgtctcctgtgtgctttctttgggagtaaagagttaacaggcccttcccccttccacagagagtgcttcccttatcctgcggaagctctgcccctggatgaaggaggagagcggctatgttagtgctgatgactggcacactgcacttgcgctaggaagacagcatgaactgcacccctccagggaagccacggcctgggctcccctgcatacagtggttccttaactgggcacgagtcccttgctgggacttaggaaaactctgcctaaagtccattgcaagaaatactgatccctgtgggatgtatatgtggctggttcccttgctcactgagagactagaaaacagcacctggacccctgggctggttccctctgaggaaaggatctgtgtcatgagtgaagcccgggcaggtgtggtctgttcaactttgatcatctggttgagcctaaggtgaccaagagtgggcggtgcacccctgattctgttgctgtgactgaggaaatgctaagctctgtttggccaggcctgggcagcctgcctctggagtaggggtggagagccatcctgcaacacgaggttaccaggagaaggagttttggttgggcacagacatccagtgtccactccaggatgtttgggagacaccttgagaactcttcctaaaagctgcacttaaccaagctcctggtggttctgtgatcccttacattttctccagaggcagagagttggctgactgacttttgcccttgggcagattgtgaggctctacccagcatgctggtatattatgttccctcagatgggggtgagacccttggcctgggggctgtaaaatgatctgtttctgtgaggagactttccatggtgagattgctagtgtctcagagaataaaggacagaaccagtccaagtc

SEQ ID NO: 431501 - DNA, 2267 bp, Homo sapiens
agatagggcttagtacgaggctggtgtgaattcggccgagggtgccggttgaggttgctggtggacctgctctggtggtcttggatgaggccccatgagcgcggcgcccctggtgggctacagcagcagcggctccgaggatgagtccgaggacgggatgcggaccaggccgggggatgggagccaccgtcgtggccagagcccccttcccaggcagagatttccagtacctgacagtgtgctgaacatgttcccgggcaccgaggaggggcctgaagatgacagcacaaaacacgggggacgggtgcgcaccttcccccacgagcgaggcaactgggccacccacgtctatgtaccatatgaagccaaggaggagttcctggatctgcttgatgtgttgctgccccatgcccagacatatgtcccccggctggtaaggatgaaggtgttccacctcagcctgtcccagagtgtggttctgcgccaccactggatcctccccttcgtgcaggctctgaaagcccgtatgacctccttccacagattcttctttactgccaaccaggtaaagatttacaccaatcaagagaaaaccaggacctttattgggcttgaggtcacttcagggcatgcccagttcctggacctggtttcagaggtggacagagtcatggaggaattcaacctcaccactttctaccaggatccttctttccacctcagcctggcctggtgtgtgggtgatgcacgtctccagctggaggggcagtgcctgcaggaactacaggcaatcgtggatgggtttgaagatgctgaggtgctgctgcgcgtgcacactgagcaagtccgctgcaagtctgggaacaagttcttctcgatgcctttgaagtgagcaccagaggccttcctcctccagggccctctgcagaccaggctgagatggaggaacctgctaaaatcgatggagatgcttctagcctcccagtaggaggccccagccatgccttcaacctggcaggaggtgtagccactcctcatcctccctgagtgctgatattctctctctctctttctcttcctcttctttctctctcttctcctctctttctctcctctgtctctcttcctctcctctcttcctctcttctctcttcctctcctctctctcttcctcttctctctcttcccctcctgtctctcctcccctcctctctctcttcctctcctctctcttcctctcctctctctacccctcctgtctctcctcccctcctctctcttcctctcctctctctcttcctctcctctctcttcccttcctgtctctcttcccctcctctctctcttcctgtcctctatctcttcccctcctctatctcttcctctcctctctctcttcctctcctctctctctcttgctttcttctctctctcctgtctcggctgttgtgggttgcaggttgggtgctgctgttgtggtccttcccagaaactgccagtagagggcagcctgggcatcctaatgcttactctggttgttacacaaagaaaatattggggtcactggcgagcccacccacactcaccagaatctccactgtagtccccctaacaaacagcccttcacttcctctcccacttcagcaatttgtattttgatgccattggcctcagatcagagtgttttaaatcatcacgccctggcttatccctggtcgagccaggacacggggtgcttcagtgggtctgtcaccctctctccttgaagcatgttgcttttatttatttacttttactctcaccctgctcctgtaccagcaggggccacttcaaagccaaggtacagggtgataacttgtggtccagcatcagttttctccacttctttctcccactcacccccagcaaggtgcctggggagacttgagcagatgtttcattttggcctggccagtggctgaaagccaggcctccaatgcactgtgacctctggcttccccagcagctttcccagagaggcagaggggccttccacagcccgggttctcctgctgcctcctgcctgctgcagctgcaggcattctgaggggcaacgtggaggaagggccagggatgcatgggattttaattgtttcatcacaccttccccgtggcaaagaaacagtcagtcctcttcaggtgtcttctggatttctggtgatggacagagaaatctttttacagtttcaaattatgttcaacaaataaaaattgcattttttattttg

SEQ ID NO: 431502 - DNA, 2266 bp, Homo sapiens
ggaccgactatgcataggtcgatgccgggtttaatcaggcctgccggttgaggttgctggtggacctgctctggtggtcttggatgaggccccatgagcgcggcgcccctggtgggctacagcagcagcggctccgaggatgagtccgaggacgggatgcggaccaggccgggggatgggagccaccgtcgtggccagagcccccttcccaggcagagatttccagtacctgacagtgtgctgaacatgttcccgggcaccgaggaggggcctgaagatgacagcacaaaacacgggggacgggtgcgcaccttcccccacgagcgaggcaactgggccacccacgtctatgtaccatatgaagccaaggaggagttcctggatctgcttgatgtgttgctgccccatgcccagacatatgtcccccggctggtaaggatgaaggtgttccacctcagcctgtcccagagtgtggttctgcgccaccactggatcctccccttcgtgcaggctctgaaagcccgtatgacctccttccacagattcttctttactgccaaccaggtaaagatttacaccaatcaagagaaaaccaggacctttattgggcttgaggtcacttcagggcatgcccagttcctggacctggtttcagaggtggacagagtcatggaggaattcaacctcaccactttctaccaggatccttctttccacctcagcctggcctggtgtgtgggtgatgcacgtctccagctggaggggcagtgcctgcaggaactacaggcaatcgtggatgggtttgaagatgctgaggtgctgctgcgcgtgcacactgagcaagtccgctgcaagtctgggaacaagttcttctcgatgcctttgaagtgagcaccagaggccttcctcctccagggccctctgcagaccaggctgagatggaggaacctgctaaaatcgatggagatgcttctagcctcccagtaggaggccccagccatgccttcaacctggcaggaggtgtagccactcctcatcctccctgagtgctgatattctctctctctctttctcttcctcttctttctctctcttctcctctctttctctcctctgtctctcttcctctcctctcttcctctcttctctcttcctctcctctctctcttcctcttctctctcttcccctcctgtctctcctcccctcctctctctcttcctctcctctctcttcctctcctctctctacccctcctgtctctcctcccctcctctctcttcctctcctctctctcttcctctcctctctcttcccttcctgtctctcttcccctcctctctctcttcctgtcctctatctcttcccctcctctatctcttcctctcctctctctcttcctctcctctctctctcttgctttcttctctctctcctgtctcggctgttgtgggttgcaggttgggtgctgctgttgtggtccttcccagaaactgccagtagagggcagcctgggcatcctaatgcttactctggttgttacacaaagaaaatattggggtcactggcgagcccacccacactcaccagaatctccactgtagtccccctaacaaacagcccttcacttcctctcccacttcagcaatttgtattttgatgccattggcctcagatcagagtgttttaaatcatcacgccctggcttatccctggtcgagccaggacacggggtgcttcagtgggtctgtcaccctctctccttgaagcatgttgcttttatttatttacttttactctcaccctgctcctgtaccagcaggggccacttcaaagccaaggtacagggtgataacttgtggtccagcatcagttttctccacttctttctcccactcacccccagcaaggtgcctggggagacttgagcagatgtttcattttggcctggccagtggctgaaagccaggcctccaatgcactgtgacctctggcttccccagcagctttcccagagaggcagaggggccttccacagcccgggttctcctgctgcctcctgcctgctgcagctgcaggcattctgaggggcaacgtggaggaagggccagggatgcatgggattttaattgtttcatcacaccttccccgtggcaaagaaacagtcagtcctcttcaggtgtcttctggatttctggtgatggacagagaaatctttttacagtttcaaattatgttcaacaaataaaaattgcattttttattttg

SEQ ID NO: 431503 - DNA, 2193 bp, Homo sapiens
gagggcgcttccggcacagcggaactccgggtgccggttgaggttgctggtggacctgctctggtggtcttggatgaggccccatgagcgcggcgcccctggtgggctacagcagcagcggctccgaggatgagtccgaggacgggatgcggaccaggccgggggatgggagccaccgtcgtggccagagcccccttcccaggcagagatttccagtacctgacagtgtgctgaacatgttcccgggcaccgaggaggggcctgaagatgacagcacaaaacacgggggacgggtgcgcaccttcccccacgagcgaggcaactgggccacccacgtctatgtaccatatgaagccaaggaggagttcctggatctgcttgatgtgttgctgccccatgcccagacatatgtcccccggctggtaaggatgaaggtgttccacctcagcctgtcccagagtgtggttctgcgccaccactggatcctccccttcgtgcaggctctgaaagcccgtatgacctccttccacagattcttctttactgccaaccaggtaaagatttacaccaatcaagagaaaaccaggacctttattgggcttgaggtcacttcagggcatgcccagttcctggacctggtttcagaggtggacagagtcatggaggaattcaacctcaccactttctaccaggatccttctttccacctcagcctggcctggtgtgtgggtgatgcacgtctccagctggaggggcagtgcctgcaggaactacaggcaatcgtggatgggtttgaagatgctgaggtgctgctgcgcgtgcacactgagcaagtccgctgcaagtctgggaacaagttcttctcgatgcctttgaagtgagcaccagaggccttcctcctccagggccctctgcagaccaggctgagatggaggaacctgctaaaatcgatggagatgcttctagcctcccagtaggaggccccagccatgccttcaacctggcaggaggtgtagccactcctcatcctccctgagtgctgatattctctctctctctttctcttcctcttctttctctctcttctcctctctttctctcctctgtctctcttcctctcctctcttcctctcttctctcttcctctcctctctctcttcctcttctctctcttcccctcctgtctctcctccccctcctctctcttcctctcctctctctcttcctctcctctctcttcccttcctgtctctcttcccctcctctctctcttcctgtcctctatctcttcccctcctctatctcttcctctcctctctctcttcctctcctctctctctcttgctttcttctctctctcctgtctcggctgttgtgggttgcaggttgggtgctgctgttgtggtccttcccagaaactgccagtagagggcagcctgggcatcctaatgcttactctggttgttacacaaagaaaatattggggtcactggcgagcccacccacactcaccagaatctccactgtagtccccctaacaaacagcccttcacttcctctcccacttcagcaatttgtattttgatgccattggcctcagatcagagtgttttaaatcatcacgccctggcttatccctggtcgagccaggacacggggtgcttcagtgggtctgtcaccctctctccttgaagcatgttgcttttatttatttacttttactctcaccctgctcctgtaccagcaggggccacttcaaagccaaggtacagggtgataacttgtggtccagcatcagttttctccacttctttctcccactcacccccagcaaggtgcctggggagacttgagcagatgtttcattttggcctggccagtggctgaaagccaggcctccaatgcactgtgacctctggcttccccagcagctttcccagagaggcagaggggccttccacagcccgggttctcctgctgcctcctgcctgctgcagctgcaggcattctgaggggcaacgtggaggaagggccagggatgcatgggattttaattgtttcatcacaccttccccgtggcaaagaaacagtcagtcctcttcaggtgtcttctggatttctggtgatggacagagaaatctttttacagtttcaaattatgttcaacaaataaaaattgcattttttattttg

SEQ ID NO: 431504 - DNA, 2202 bp, Homo sapiens
gagggcgcttccggcacagcggaactccgggtgccggttgaggttgctggtggacctgctctggtggtcttggatgaggccccatgagcgcggcgcccctggtgggctacagcagcagcggctccgaggatgagtccgaggacgggatgcggaccaggccgggggatgggagccaccgtcgtggccagagcccccttcccaggcagagatttccagtacctgacagtgtgctgaacatgttcccgggcaccgaggaggggcctgaagatgacagcacaaaacacgggggacgggtgcgcaccttcccccacgagcgaggcaactgggccacccacgtctatgtaccatatgaagccaaggaggagttcctggatctgcttgatgtgttgctgccccatgcccagacatatgtcccccggctggtaaggatgaaggtgttccacctcagcctgtcccagagtgtggttctgcgccaccactggatcctccccttcgtgcaggctctgaaagcccgtatgacctccttccacagattcttctttactgccaaccaggtaaagatttacaccaatcaagagaaaaccaggacctttattgggcttgaggtcacttcagggcatgcccagttcctggacctggtttcagaggtggacagagtcatggaggaattcaacctcaccactttctaccaggatccttctttccacctcagcctggcctggtgtgtgggtgatgcacgtctccagctggaggggcagtgcctgcaggaactacaggcaatcgtggatgggtttgaagatgctgaggtgctgctgcgcgtgcacactgagcaagtccgctgcaagtctgggaacaagttcttctcgatgcctttgaagtgagcaccagaggccttcctcctccagggccctctgcagaccaggctgagatggaggaacctgctaaaatcgatggagatgcttctagcctcccagtaggaggccccagccatgccttcaacctggcaggaggtgtagccactcctcatcctccctgagtgctgatattctctctctctctttctcttcctcttctttctctctcttctcctctctttctctcctctgtctctcttcctctcctctcttcctctcttctctcttcctctcctctctctcttcctcttctctctcttcccctcctgtctctcctcccctcctctctctcttcctctcctctctcttcctctcctctctctacccctcctgtctctcctcccctcctctctcttcctctcctctctctcttcctctcctctctcttcccttcctgtctctcttcccctcctctctctcttcctgtcctctatctcttcccctcctctatctcttcctctcctctctctcttcctctcctctctctctcttgctttcttctctctctcctgtctcggctgttgtgggttgcaggttgggtgctgctgttgtggtccttcccagaaactgccagtagagggcagcctgggcatcctaatgcttactctggttgttacacaaagatccccctaacaaacagcccttcacttcctctcccacttcagcaatttgtattttgatgccattggcctcagatcagagtgttttaaatcatcacgccctggcttatccctggtcgagccaggacacggggtgcttcagtgggtctgtcaccctctctccttgaagcatgttgcttttatttatttacttttactctcaccctgctcctgtaccagcaggggccacttcaaagccaaggtacagggtgataacttgtggtccagcatcagttttctccacttctttctcccactcacccccagcaaggtgcctggggagacttgagcagatgtttcattttggcctggccagtggctgaaagccaggcctccaatgcactgtgacctctggcttccccagcagctttcccagagaggcagaggggccttccacagcccgggttctcctgctgcctcctgcctgctgcagctgcaggcattctgaggggcaacgtggaggaagggccagggatgcatgggattttaattgtttcatcacaccttccccgtggcaaagaaacagtcagtcctcttcaggtgtcttctggatttctggtgatggacagagaaatctttttacagtttcaaattatgttcaacaaataaaaattgcattttttattttg

SEQ ID NO: 431505 - DNA, 2213 bp, Homo sapiens
aaaaaatctgcaccattacaggccgtactggtttattatacaggctgggtctattagtgttgcgtgatgccatacacggcctgtggctaacagagtggggatgatcgagaggaatcgacagcgggatggagcacgtcgtggccagagcccccttcccaggcagagatttccagtacctgacagtgtgctgaacatgttcccgggcaccgaggaggggcctgaagatgacagcacaaaacacgggggacgggtgcgcaccttcccccacgagcgaggcaactgggccacccacgtctatgtaccatatgaagccaaggaggagttcctggatctgcttgatgtgttgctgccccatgcccagacatatgtcccccggctggtaaggatgaaggtgttccacctcagcctgtcccagagtgtggttctgcgccaccactggatcctccccttcgtgcaggctctgaaagcccgtatgacctccttccacagattcttctttactgccaaccaggtaaagatttacaccaatcaagagaaaaccaggacctttattgggcttgaggtcacttcagggcatgcccagttcctggacctggtttcagaggtggacagagtcatggaggaattcaacctcaccactttctaccaggatccttctttccacctcagcctggcctggtgtgtgggtgatgcacgtctccagctggaggggcagtgcctgcaggaactacaggcaatcgtggatgggtttgaagatgctgaggtgctgctgcgcgtgcacactgagcaagtccgctgcaagtctgggaacaagttcttctcgatgcctttgaagtgagcaccagaggccttcctcctccagggccctctgcagaccaggctgagatggaggaacctgctaaaatcgatggagatgcttctagcctcccagtaggaggccccagccatgccttcaacctggcaggaggtgtagccactcctcatcctccctgagtgctgatattctctctctctctttctcttcctcttctttctctctcttctcctctctttctctcctctgtctctcttcctctcctctcttcctctcttctctcttcctctcctctctctcttcctcttctctctcttcccctcctgtctctcctcccctcctctctctcttcctctcctctctcttcctctcctctctctacccctcctgtctctcctcccctcctctctcttcctctcctctctctcttcctctcctctctcttcccttcctgtctctcttcccctcctctctctcttcctgtcctctatctcttcccctcctctatctcttcctctcctctctctcttcctctcctctctctctcttgctttcttctctctctcctgtctcggctgttgtgggttgcaggttgggtgctgctgttgtggtccttcccagaaactgccagtagagggcagcctgggcatcctaatgcttactctggttgttacacaaagaaaatattggggtcactggcgagcccacccacactcaccagaatctccactgtagtccccctaacaaacagcccttcacttcctctcccacttcagcaatttgtattttgatgccattggcctcagatcagagtgttttaaatcatcacgccctggcttatccctggtcgagccaggacacggggtgcttcagtgggtctgtcaccctctctccttgaagcatgttgcttttatttatttacttttactctcaccctgctcctgtaccagcaggggccacttcaaagccaaggtacagggtgataacttgtggtccagcatcagttttctccacttctttctcccactcacccccagcaaggtgcctggggagacttgagcagatgtttcattttggcctggccagtggctgaaagccaggcctccaatgcactgtgacctctggcttccccagcagctttcccagagaggcagaggggccttccacagcccgggttctcctgctgcctcctgcctgctgcagctgcaggcattctgaggggcaacgtggaggaagggccagggatgcatgggattttaattgtttcatcacaccttccccgtggcaaagaaacagtcagtcctcttcaggtgtcttctggatttctggtgatggacagagaaatctttttacagtttcaaattatgttcaacaaataaaaattgcattttttattttg

SEQ ID NO: 431506 - DNA, 2031 bp, Homo sapiens
gagggcgcttccggcacagcggaactccgggtgccggttgaggttgctggtggacctgctctggtggtcttggatgaggccccatgagcgcggcgcccctggtgggctacagcagcagcggctccgaggatgagtccgaggacgggatgcggaccaggccgggggatgggagccaccgtcgtggccagagcccccttcccaggcagagatttccagtacctgacagtgtgctgaacatgttcccgggcaccgaggaggggcctgaagatgacagcacaaaacacgggggacgggtgcgcaccttcccccacgagcgaggcaactgggccacccacgtctatgtaccatatgaagccaaggaggagttcctggatctgcttgatgtgttgctgccccatgcccagacatatgtcccccggctggtaaggatgaaggtgttccacctcagcctgtcccagagtgtggttctgcgccaccactggatcctccccttcgtgcaggctctgaaagcccgtatgacctccttccacagattcttctttactgccaaccaggtaaagatttacaccaatcaagagaaaaccaggacctttattgggcttgaggtcacttcagggcatgcccagttcctggacctggtttcagaggtggacagagtcatggaggaattcaacctcaccactttctaccagaccaggctgagatggaggaacctgctaaaatcgatggagatgcttctagcctcccagtaggaggccccagccatgccttcaacctggcaggaggtgtagccactcctcatcctccctgagtgctgatattctctctctctctttctcttcctcttctttctctctcttctcctctctttctctcctctgtctctcttcctctcctctcttcctctcttctctcttcctctcctctctctcttcctcttctctctcttcccctcctgtctctcctcccctcctctctctcttcctctcctctctcttcctctcctctctctacccctcctgtctctcctcccctcctctctcttcctctcctctctctcttcctctcctctctcttcccttcctgtctctcttcccctcctctctctcttcctgtcctctatctcttcccctcctctatctcttcctctcctctctctcttcctctcctctctctctcttgctttcttctctctctcctgtctcggctgttgtgggttgcaggttgggtgctgctgttgtggtccttcccagaaactgccagtagagggcagcctgggcatcctaatgcttactctggttgttacacaaagaaaatattggggtcactggcgagcccacccacactcaccagaatctccactgtagtccccctaacaaacagcccttcacttcctctcccacttcagcaatttgtattttgatgccattggcctcagatcagagtgttttaaatcatcacgccctggcttatccctggtcgagccaggacacggggtgcttcagtgggtctgtcaccctctctccttgaagcatgttgcttttatttatttacttttactctcaccctgctcctgtaccagcaggggccacttcaaagccaaggtacagggtgataacttgtggtccagcatcagttttctccacttctttctcccactcacccccagcaaggtgcctggggagacttgagcagatgtttcattttggcctggccagtggctgaaagccaggcctccaatgcactgtgacctctggcttccccagcagctttcccagagaggcagaggggccttccacagcccgggttctcctgctgcctcctgcctgctgcagctgcaggcattctgaggggcaacgtggaggaagggccagggatgcatgggattttaattgtttcatcacaccttccccgtggcaaagaaacagtcagtcctcttcaggtgtcttctggatttctggtgatggacagagaaatctttttacagtttcaaattatgttcaacaaataaaaattgcattttttattttg

SEQ ID NO: 431507 - DNA, 2213 bp, Homo sapiens
agatagggcttagtacgaggctggtgtgaattcggccgagggtgccggttgaggttgctggtggacctgctctggtggtcttggatgaggccccatgagcgcggcgcccctggtgggctacagcagcagcggctccgaggatgagtccgaggacgggatgcggaccaggccgggggatgggagccaccgtcgtggccagagcccccttcccaggcagagatttccagtacctgacagtgtgctgaacatgttcccgggcaccgaggaggggcctgaagatgacagcacaaaacacgggggacgggtgcgcaccttcccccacgagcgaggcaactgggccacccacgtctatgtaccatatgaagccaaggaggagttcctggatctgcttgatgtgttgctgccccatgcccagacatatgtcccccggctggtaaggatgaaggtgttccacctcagcctgtcccagagtgtggttctgcgccaccactggatcctccccttcgtgcaggctctgaaagcccgtatgacctccttccacaggacctttattgggcttgaggtcacttcagggcatgcccagttcctggacctggtttcagaggtggacagagtcatggaggaattcaacctcaccactttctaccaggatccttctttccacctcagcctggcctggtgtgtgggtgatgcacgtctccagctggaggggcagtgcctgcaggaactacaggcaatcgtggatgggtttgaagatgctgaggtgctgctgcgcgtgcacactgagcaagtccgctgcaagtctgggaacaagttcttctcgatgcctttgaagtgagcaccagaggccttcctcctccagggccctctgcagaccaggctgagatggaggaacctgctaaaatcgatggagatgcttctagcctcccagtaggaggccccagccatgccttcaacctggcaggaggtgtagccactcctcatcctccctgagtgctgatattctctctctctctttctcttcctcttctttctctctcttctcctctctttctctcctctgtctctcttcctctcctctcttcctctcttctctcttcctctcctctctctcttcctcttctctctcttcccctcctgtctctcctcccctcctctctctcttcctctcctctctcttcctctcctctctctacccctcctgtctctcctcccctcctctctcttcctctcctctctctcttcctctcctctctcttcccttcctgtctctcttcccctcctctctctcttcctgtcctctatctcttcccctcctctatctcttcctctcctctctctcttcctctcctctctctctcttgctttcttctctctctcctgtctcggctgttgtgggttgcaggttgggtgctgctgttgtggtccttcccagaaactgccagtagagggcagcctgggcatcctaatgcttactctggttgttacacaaagaaaatattggggtcactggcgagcccacccacactcaccagaatctccactgtagtccccctaacaaacagcccttcacttcctctcccacttcagcaatttgtattttgatgccattggcctcagatcagagtgttttaaatcatcacgccctggcttatccctggtcgagccaggacacggggtgcttcagtgggtctgtcaccctctctccttgaagcatgttgcttttatttatttacttttactctcaccctgctcctgtaccagcaggggccacttcaaagccaaggtacagggtgataacttgtggtccagcatcagttttctccacttctttctcccactcacccccagcaaggtgcctggggagacttgagcagatgtttcattttggcctggccagtggctgaaagccaggcctccaatgcactgtgacctctggcttccccagcagctttcccagagaggcagaggggccttccacagcccgggttctcctgctgcctcctgcctgctgcagctgcaggcattctgaggggcaacgtggaggaagggccagggatgcatgggattttaattgtttcatcacaccttccccgtggcaaagaaacagtcagtcctcttcaggtgtcttctggatttctggtgatggacagagaaatctttttacagtttcaaattatgttcaacaaataaaaattgcattttttattttg

SEQ ID NO: 431508 - DNA, 1229 bp, Homo sapiens
gagggcgcttccggcacagcggaactccgggtgccggttgaggttgctggtggacctgctctggtggtcttggatgaggccccatgagcgcggcgcccctggtgggctacagcagcagcggctccgaggatgagtccgaggacgggatgcggaccaggccgggggatgggagccaccgtcgtggccagagcccccttcccaggcagagatttccagtacctgacagtgtgctgaacatgttcccgggcaccgaggaggggcctgaagatgacagcacaaaacacgggggacgggtgcgcaccttcccccacgagcgaggcaactgggccacccacgtctatgtaccatatgaagccaaggaggagttcctggatctgcttgatgtgttgctgccccatgcccagacatatgtcccccggctggtaaggatgaaggtgttccacctcagcctgtcccagagtgtggttctgcgccaccactggatcctccccttcgtgcaggctctgaaagcccgtatgacctccttccacagattcttctttactgccaaccaggtaaagatttacaccaatcaagagaaaaccaggacctttattgggcttgaggtcacttcagggcatgcccagttcctggacctggtttcagaggtggacagagtcatggaggaattcaacctcaccactttctaccaggatccttctttccacctcagcctggcctggtgtgtgggtgatgcacgtctccagctggaggggcagtgcctgcaggaactacaggcaatcgtggatgggtttgaagatgctgaggtgctgctgcgcgtgcacactgagcaagtccgctgcaagtctgggaacaagttcttctcgatgcctttgaagtgagcaccagaggccttcctcctccagggccctctgcagaccaggctgagatggaggaacctgctaaaatcgatggagatgcttctagcctcccagtaggaggccccagccatgccttcaacctggcaggaggtgtagccactcctcatcctccctgagtgctgatattctctctctctctttctcttcctcttctttctctctcttctcctctctttctctcctctgtctctcttcctctcctctcttcctctcttctctcttcctctcctctctctcttcctcttctctctcttccttttctattcctgttgctctgtttcttcctttctgtaggtttctcttatccct

SEQ ID NO: 431509 - DNA, 1657 bp, Homo sapiens
agatagggcttagtacgaggctggtgtgaattcggccgagggtgccggttgaggttgctggtggacctgctctggtggtcttggatgaggccccatgagcgcggcgcccctggtgggctacagcagcagcggctccgaggatgagtccgaggacgggatgcggaccaggccgggggatgggagccaccgtcgtggccagagcccccttcccaggcagagatttccagtacctgacagtgtgctgaacatgttcccgggcaccgaggaggggcctgaagatgacagcacaaaacacgggggacgggtgcgcaccttcccaccaggctgagatggaggaacctgctaaaatcgatggagatgcttctagcctcccagtaggaggccccagccatgccttcaacctggcaggaggtgtagccactcctcatcctccctgagtgctgatattctctctctctctttctcttcctcttctttctctctcttctcctctctttctctcctctgtctctcttcctctcctctcttcctctcttctctcttcctctcctctctctcttcctcttctctctcttcccctcctgtctctcctcccctcctctctctcttcctctcctctctcttcctctcctctctctacccctcctgtctctcctcccctcctctctcttcctctcctctctctcttcctctcctctctcttcccttcctgtctctcttcccctcctctctctcttcctgtcctctatctcttcccctcctctatctcttcctctcctctctctcttcctctcctctctctctcttgctttcttctctctctcctgtctcggctgttgtgggttgcaggttgggtgctgctgttgtggtccttcccagaaactgccagtagagggcagcctgggcatcctaatgcttactctggttgttacacaaagaaaatattggggtcactggcgagcccacccacactcaccagaatctccactgtagtccccctaacaaacagcccttcacttcctctcccacttcagcaatttgtattttgatgccattggcctcagatcagagtgttttaaatcatcacgccctggcttatccctggtcgagccaggacacggggtgcttcagtgggtctgtcaccctctctccttgaagcatgttgcttttatttatttacttttactctcaccctgctcctgtaccagcaggggccacttcaaagccaaggtacagggtgataacttgtggtccagcatcagttttctccacttctttctcccactcacccccagcaaggtgcctggggagacttgagcagatgtttcattttggcctggccagtggctgaaagccaggcctccaatgcactgtgacctctggcttccccagcagctttcccagagaggcagaggggccttccacagcccgggttctcctgctgcctcctgcctgctgcagctgcaggcattctgaggggcaacgtggaggaagggccagggatgcatgggattttaattgtttcatcacaccttccccgtggcaaagaaacagtcagtcctcttcaggtgtcttctggatttctggtgatggacagagaaatctttttacagtttcaaattatgttcaacaaataaaaattgcattttttattttg

SEQ ID NO: 431510 - DNA, 1473 bp, Homo sapiens
gagggcgcttccggcacagcggaactccgggtgccggttgaggttgctggtggacctgctctggtggtcttggatgaggccccatgagcgcggcgcccctggtgggctacagcagcagcggctccgaggatgagtccgaggacgggatgcggaccaggccgggggatgggagccaccgtcgtggccagagcccccttcccaggcagagatttccagtacctgacagtgtgctgaacatgttcccgggcaccgaggaggggcctgaagatgacagcacaaaacacgggggacgggtgcgcaccttcccccacgagcgaggcaactgggccacccacgtctatgtaccatatgaagccaaggaggagttcctggatctgcttgatgtgttgctgccccatgcccagacatatgtcccccggctggtaaggatgaaggtgttccacctcagcctgtcccagagtgtggttctgcgccaccactggatcctccccttcgtgcaggctctgaaagcccgtatgacctccttccacagattcttctttactgccaaccaggtaaagatttacaccaatcaagagaaaaccaggacctttattgggcttgaggtcacttcagggcatgcccagttcctggacctggtttcagaggtggacagagtcatggaggaattcaacctcaccactttctaccaggatccttctttccacctcagcctggcctggtgtgtgggtgatgcacgtctccagctggaggggcagtgcctgcaggaactacaggcaatcgtggatgggtttgaagatgctgaggtgctgctgcgcgtgcacactgagcaagtccgctgcaagtctgggaacaagttcttctcgatgcctttgaagtgagcaccagaggccttcctcctccagggccctctgcagaccaggctgagatggaggaacctgctaaaatcgatggagatgcttctagcctcccagtaggaggccccagccatgccttcaacctggcaggaggtgtagccactcctcatcctccctgagtgctggagtggctacacctccagccaggttgaaggcctggcgggagctgcatacgtgaggactagaagcatctcgatcgatttagcaggttcctccatctcagccctgtgtcggtagtagggtctctgtagtgtggatggcctctggtggctcacttcaaaggtctcgatcaagtacttgtctacccaggcaacctggcagctcggtcactggaccccagggggtcgtcctggcgccacgaaacgcggctgatgaaccaattccccaacctcctgtctcacgatggccgcgacagtctccgtgaagaccagccccagaacagcagacggacgttcgttccccaacgacacgtaccagaggacggcaaaacagacccggaaaacggcgacgagtgacatccccgtgagcgaggcggcgagacacaacagaccgcaag

SEQ ID NO: 431511 - DNA, 1364 bp, Homo sapiens
gcgaattcactagtgattagagactaccaggctgagatggaggaacctgctaaaatcgatggagatgcttctagcctcccagtaggaggccccagccatgccttcaacctggcaggaggtgtagccactcctcatcctccctgagtgctgatattctctctctctctttctcttcctcttctttctctctcttctcctctctttctctcctctgtctctcttcctctcctctcttcctctcttctctcttcctctcctctctctcttcctcttctctctcttcccctcctgtctctcctcccctcctctctctcttcctctcctctctcttcctctcctctctctacccctcctgtctctcctcccctcctctctcttcctctcctctctctcttcctctcctctctcttcccttcctgtctctcttcccctcctctctctcttcctgtcctctatctcttcccctcctctatctcttcctctcctctctctcttcctctcctctctctctcttgctttcttctctctctcctgtctcggctgttgtgggttgcaggttgggtgctgctgttgtggtccttcccagaaactgccagtagagggcagcctgggcatcctaatgcttactctggttgttacacaaagaaaatattggggtcactggcgagcccacccacactcaccagaatctccactgtagtccccctaacaaacagcccttcacttcctctcccacttcagcaatttgtattttgatgccattggcctcagatcagagtgttttaaatcatcacgccctggcttatccctggtcgagccaggacacggggtgcttcagtgggtctgtcaccctctctccttgaagcatgttgcttttatttatttacttttactctcaccctgctcctgtaccagcaggggccacttcaaagccaaggtacagggtgataacttgtggtccagcatcagttttctccacttctttctcccactcacccccagcaaggtgcctggggagacttgagcagatgtttcattttggcctggccagtggctgaaagccaggcctccaatgcactgtgacctctggcttccccagcagctttcccagagaggcagaggggccttccacagcccgggttctcctgctgcctcctgcctgctgcagctgcaggcattctgaggggcaacgtggaggaagggccagggatgcatgggattttaattgtttcatcacaccttccccgtggcaaagaaacagtcagtcctcttcaggtgtcttctggatttctggtgatggacagagaaatctttttacagtttcaaattatgttcaacaaataaaaattgcattttttattttg

SEQ ID NO: 431512 - DNA, 1362 bp, Homo sapiens
gagggcgcttccggcacagcggaactccgggtgccggttgaggttgctggtggacctgctctggtggtcttggatgaggccccatgagcgcggcgcccctggtgggctacagcagcagcggctccgaggatgagtccgaggacgggatgcggaccaggccgggggatgggagccaccgtcgtggccagagcccccttcccaggcagagatttccagtacctgacagtgtgctgaacatgttcccgggcaccgaggaggggcctgaagatgacagcacaaaacacgggggacgggtgcgcaccttcccccacgagcgaggcaactgggccacccacgtctatgtaccatatgaagccaaggaggagttcctggatctgcttgatgtgttgctgccccatgcccagacatatgtcccccggctggtaaggatgaaggtgttccacctcagcctgtcccagagtgtggttctgcgccaccactggatcctccccttcgtgcaggctctgaaagcccgtatgacctccttccacagattcttctttactgccaaccaggtaaagatttacaccaatcaagagaaaaccaggacctttattgggcttgaggtcacttcagggcatgcccagttcctggacctggtttcagaggtggacagagtcatggaggaattcaacctcaccactttctaccaggatccttctttccacctcagcctggcctggtgtgtgggtgatgcacgtctccagctggaggggcagtgcctgcaggaactacaggcaatcgtggatgggtttgaagatgctgaggtgctgctgcgcgtgcacactgagcaagtccgctgcaagtctgggaacaagttcttctcgatgcctttgaagtgagcaccagaggccttcctcctccagggccctctgcagaccaggctgagatggaggaacctgctaaaatcgatggagatgcttctagcctcccagtaggaggccccagccatgccttcaacctggcaggaggtgtagccactcctcatcctccctgagtgctggcatggtcttactcggtcccagcagtaatggacagttaccactctcgggaaggggtctgtcatctggcttcccgggcacggtgctctccggtattctatcagcttctctagccactccttcccggtcttcttggcggattcctcctctgttcctgggggctgatcctgggccacttttctctctgagccctctcctcaggtaatctcttccattctctgggtattacatagcaaccaggtgttggtgactcacaaatttttgtgagcccagacatgtcccatgtgttccaactcgaggttctaactgcccctgtgacatc

SEQ ID NO: 431513 - DNA, 985 bp, Homo sapiens
tagtagagcctggtggttaatggcgtgccggttgaggttgctggtggacctgctctggtggtcttggatgaggccccatgagcgcggcgcccctggtgggctacagcagcagcggctccgaggatgagtccgaggacgggatgcggaccaggccgggggatgggagccaccgtcgtggccagagcccccttcccaggcagagatttccagtacctgacagtgtgctgaacatgttcccgggcaccgaggaggggcctgaagatgacagcacaaaacacgggggacgggtgcgcaccttcccccacgagcgaggcaactgggccacccacgtctatgtaccatatgaagccaaggaggagttcctggatctgcttgatgtgttgctgccccatgcccagacatatgtcccccggctggtaaggatgaaggtgttccacctcagcctgtcccagagtgtggttctgcgccaccactggatcctccccttcgtgcaggctctgaaagcccgtatgacctccttccacagattcttctttactgccaaccaggtaaagatttacaccaatcaagagaaaaccaggacctttattgggcttgaggtcacttcagggcatgcccagttcctggacctggtttcagaggtggacagagtcatggaggaattcaacctcaccactttctaccaggtaatgaatggggctgctgcttctccattgacccatttctaatgagaataaaactgtctttaaagaagccctcgtaagaggcaaaccgaagacccttcagaacctcccgtgtcggtgctctgaatgccagccttctgaggatgcacacctcggggggtgagggctttgaggtgtagtcagatgcagcccacccaaagtccaacatttcttagaaattttgctttatatctcaaacgtcctctgtataagatgaagatatttttagttaatctctaagggagaggaatctactcaccggg

SEQ ID NO: 431514 - DNA, 1005 bp, Homo sapiens
tagtagagcctggtggttaatggcgtgccggttgaggttgctggtggacctgctctggtggtcttggatgaggccccatgagcgcggcgcccctggtgggctacagcagcagcggctccgaggatgagtccgaggacgggatgcggaccaggccgggggatgggagccaccgtcgtggccagagcccccttcccaggcagagatttccagtacctgacagtgtgctgaacatgttcccgggcaccgaggaggggcctgaagatgacagcacaaaacacgggggacgggtgcgcaccttcccccacgagcgaggcaactgggccacccacgtctatgtaccatatgaagccaaggaggagttcctggatctgcttgatgtgttgctgccccatgcccagacatatgtcccccggctggtaaggatgaaggtgttccacctcagcctgtcccagagtgtggttctgcgccaccactggatcctccccttcgtgcaggctctgaaagcccgtatgacctccttccacagattcttctttactgccaaccaggtaaagatttacaccaatcaagagaaaaccaggacctttattgggcttgaggtcacttcagggcatgcccagttcctggacctggtttcagaggtggacagagtcatggaggaattcaacctcaccactttctaccaggtaatgaatggggctgctgcttctccattgacccatttctaatgagaataaaactgtctttaaagaagccctcgtaagaggcaaaccgaagacccttcagaacctcccgtgtcggtgctctgaatgccagccttctgaggatgcacacctcggggggtgagggctttgaggtgtagtcagatgcagcccacccaaagtccaacatttcttagaaattttgctttatatcctaaatacgcccgagatttgtaccttctgctccataatgttcccgtgttgttttcacattttttaagtagatgtccctaataatttttgg

SEQ ID NO: 431515 - DNA, 1809 bp, Homo sapiens
agatagggcttagtacgaggctggtgtgaattcggccgagggtgccggttgaggttgctggtggacctgctctggtggtcttggatgaggccccatgagcgcggcgcccctggtgggctacagcagcagcggctccgaggatgagtccgaggacgggatgcggaccaggccgggggatgggagccaccgtcgtggccagagcccccttcccaggcagagatttccagtacctgacagtgtgctgaacatgttcccgggcaccgaggaggggcctgaagatgacagcacaaaacacgggggacgggtgcgcaccttcccccacgagcgaggcaactgggccacccacgtctatgtaccatatgaagccaaggaggagttcctggatctgcttgatgtgttgctgccccatgcccagacatatgtcccccggctggtaaggatgaaggtgttccacctcagcctgtcccagagtgtggttctgcgccaccactggatcctccccttcgtgcaggctctgaaagcccgtatgacctccttccacaggtgccagaagcccatgccagaagcccaacccaaagtggcttaaaccaaagagaaatttataggctggtataactaaaagattcagaggtagcactggctcatgcatgagtggaccggggtgacaagatatcagatggcacctgactgtcaccaccacaggcagactgttcaccatctcagctctgtccccttcctttgtcacaatgacgaagccaccgcatctcccggctaatggtgtaccagcctggaaagacagcctccctctctgattggcttcagcacaagtcacaggaatgactgcctggtctgacccgtctcctgtgtgctttctttgggagtaaagagttaacaggcccttcccccttccacagagagtgcttcccttatcctgcggaagctctgcccctggatgaaggaggagagcggctatgttagtgctgatgactggcacactgcacttgcgctaggaagacagcatgaactgcacccctccagggaagccacggcctgggctcccctgcatacagtggttccttaactgggcacgagtcccttgctgggacttaggaaaactctgcctaaagtccattgcaagaaatactgatccctgtgggatgtatatgtggctggttcccttgctcactgagagactagaaaacagcacctggacccctgggctggttccctctgaggaaaggatctgtgtcatgagtgaagcccgggcaggtgtggtctgttcaactttgatcatctggttgagcctaaggtgaccaagagtgggcggtgcacccctgattctgttgctgtgactgaggaaatgctaagctctgtttggccaggcctgggcagcctgcctctggagtaggggtggagagccatcctgcaacacgaggttaccaggagaaggagttttggttgggcacagacatccagtgtccactccaggatgtttgggagacaccttgagaactcttcctaaaagctgcacttaaccaagctcctggtggttctgtgatcccttacattttctccagaggcagagagttggctgactgacttttgcccttgggcagattgtgaggctctacccagcatgctggtatattatgttccctcagatgggggtgagacccttggcctgggggctgtaaaatgatctgtttctgtgaggagactttccatggtgagattgctagtgtctcagagaataaaggacagaaccagtccaagtcaaagcacttacctagctgagcctgactcttcccg

SEQ ID NO: 431516 - DNA, 1745 bp, Homo sapiens
agatagggcttagtacgaggctggtgtgaattcggccgagggtgccggttgaggttgctggtggacctgctctggtggtcttggatgaggccccatgagcgcggcgcccctggtgggctacagcagcagcggctccgaggatgagtccgaggacgggatgcggaccaggccgggggatgggagccaccgtcgtggccagagcccccttcccaggcagagatttccagtacctgacagtgtgctgaacatgttcccgggcaccgaggaggggcctgaagatgacagcacaaaacacgggggacgggtgcgcaccttcccccacgagcgaggcaactgggccacccacgtctatgtaccatatgaagccaaggaggagttcctggatctgcttgatgtgttgctgccccatgcccagacatatgtcccccggctggtaaggatgaaggtgttccacctcagcctgtcccagagtgtggttctgcgccaccactggatcctccccttcgtgcaggctctgaaagcccgtatgacctccttccacagcccccatccaggacctcattgcctcattggaaccaaagatgcccctgtcacccaggaaattccaaaggatttaggagctctgcgtcaggagccaggatcacagaccagataatagaacaaaagatgctcctagcacccctgctgcttaggaaatgacacaggttttaggatctctgtgtcaggaactggaggctgagaccaacacatatgttatcatttcacagtgataggtcaaacaggtcatggtaatggtgggagctacctcactgggggcctatgggggtgaaaggagatcatgggtgccctcagcacaccacttgggtgaagggttagtaccagaccccacttctggttttgtctgccagcctggggctttttttttccccttacctattagattatttcataactcttttcctaccagaaatgcatctcctgctagactggtccagatcaaaagccctgctctttcactgaggctctcccggttggcatatcctgcagaatccctccgtccagagatcagtcggtcctgtggttgtttcacagagtgactcctctgtccagagatcagtcggtcctgtggttgtttcacaggtgacacctccgtccagagatcagttggccctgtggttgtttcacaggtgacccctccatccagagatcagttggtcctgtggttctttacccctggtggtcatttcactcaccctcatatgcagtcgttcctgtgtccatcttccttcctggagcccacattcctccaggccaggactgtggcttctctctgaattgccccacagcttttttccaagtgctctgctcacagtagacatcaaatagatgcttgttgagtcatggtgcgggaatgagggagcctagagaatatctttctggatcctctactgttgatactagaaggagcctaagaagccacccggctgatggttttctgaccctgcctttatcagcagagccttttttcaaatgaggtgttgcacaaaagcctgatgtgtggctgtgtaaaacagaaataaacagtcttctagccaaagccccattcccacagttcagggggccataggcccaggaattccataggatgtcactgcccaactaggaaactgctcagttagctgaaccccttctgagggccagaggaggacaggatttgtcccaatccagacactcggccagggaat

SEQ ID NO: 431517 - DNA, 1294 bp, Homo sapiens
tatattatcaggactctcttaaccacaggtgccagaagcccatgccagaagcccaacccaaagtggcttaaaccaaagagaaatttataggctggtataactaaaagattcagaggtagcactggctcatgcatgagtggaccggggtgacaagatatcagatggcacctgactgtcaccaccacaggcagactgttcaccatctcagctctgtccccttcctttgtcacaatgacgaagccaccgcatctcccggctaatggtgtaccagcctggaaagacagcctccctctctgattggcttcagcacaagtcacaggaatgactgcctggtctgacccgtctcctgtgtgctttctttgggagtaaagagttaacaggcccttcccccttccacagagagtgcttcccttatcctgcggaagctctgcccctggatgaaggaggagagcggctatgttagtgctgatgactggcacactgcacttgcgctaggaagacagcatgaactgcacccctccagggaagccacggcctgggctcccctgcatacagtggttccttaactgggcacgagtcccttgctgggacttaggaaaactctgcctaaagtccattgcaagaaatactgatccctgtgggatgtatatgtggctggttcccttgctcactgagagactagaaaacagcacctggacccctgggctggttccctctgaggaaaggatctgtgtcatgagtgaagcccgggcaggtgtggtctgttcaactttgatcatctggttgagcctaaggtgaccaagagtgggcggtgcacccctgattctgttgctgtgactgaggaaatgctaagctctgtttggccaggcctgggcagcctgcctctggagtaggggtggagagccatcctgcaacacgaggttaccaggagaaggagttttggttgggcacagacatccagtgtccactccaggatgtttgggagacaccttgagaactcttcctaaaagctgcacttaaccaagctcctggtggttctgtgatcccttacattttctccagaggcagagagttggctgactgacttttgcccttgggcagattgtgaggctctacccagcatgctggtatattatgttccctcagatgggggtgagacccttggcctgggggctgtaaaatgatctgtttctgtgaggagactttccatggtgagattgctagtgtctcagagaataaaggacagaaccagtccaagtcaaagcacttacctagctgagcctgactcttcccg

SEQ ID NO: 431518 - DNA, 1532 bp, Homo sapiens
agatagggcttagtacgaggctggtgtgaattcggccgagggtgccggttgaggttgctggtggacctgctctggtggtcttggatgaggccccatgagcgcggcgcccctggtgggctacagcagcagcggctccgaggatgagtccgaggacgggatgcggaccaggccgggggatgggagccaccgtcgtggccagagcccccttcccaggcagagatttccagtacctgacagtgtgctgaacatgttcccgggcaccgaggaggggcctgaagatgacagcacaaaacacgggggacgggtgcgcaccttcccccacgagcgaggcaactgggccacccacgtctatgtaccatagccaaggaggagttactggaggggcagtgacctgcaggaactacaggacaatcgtggagtcggtttgaacgatgctgagcgtgctgctgcgcgctgcacacttgacacgcaacgtccgctgcaatgtctgggcaccacgttcttgcctcgatgcctctcgaacgctgagcaccagcaggccttccatccctccaagggcacctacatccacgacccagtgcttgccgactgcgacggacggccagagtaaccactcgcacgtgggagactgccttcataggccagacccaagaacgtgcagcgcccccaagcgcatgacatatcgaacactggccacggcagagtgatagccccacttccctcaattaccttacacactccgtactatggctcgcacccaatatcgtcaatcatccgtccaaacacttatagcttcacttcacgtcattatcatatagacaatcctaacacatttcatcaccgtcctatcatttacttcctacacatatcatgatatactatacacataaacaccatggacccagagcagacaatatacacctacattacttatcatccctccttctacctattcaccttccttccctacttacttatcaccataagtagaacaattctactcacactatatccccccccctaactataagatacttacataccaatccccaacatttccacacacaccataaacacagatacactaacagctacacctaatatcgatcaaatatcacagtactatacaaataattatcttacaaacacccacactattcatgagcctaaatcccactcccccgtctcacgtctcatgcaaaataaaactaaaacacacacaattcataacaccaacatgcaaacaattctctccatcccgaccatacactgcatcatacccattcccacccatacccgctgatccactcttataactggtcccctcatatacacaaaccccctccaactaaaacatacctgacaacgaccactctatcaatacacatcgaactcaccactcctctactctccaacctcatccacaaacaacactacacacagaaactcccacttcaacacataacacacgcatgaaaaccaactgtgacgcgccaacccactaaaactatcgacaatacacctagccaccg

SEQ ID NO: 431519 - DNA, 399 bp, Homo sapiens
ttagggctacatgaatttgggggaggtgacacgattcagtccatagcaaggaccagtcctgtgctgttttgtctgtctgtggagggtgcttgggatcaacactgagtatcttgtctcccactgggcaggccagggatccagcagggatgtcacgacagctctgtcacagacctgctgtgagggcagggcctgccaaggcgtccgggtgactgcctgcctctcgtttccctccccaggatccttctttccacctcagcctggcctggtgtgtgggtgatgcacgtctccagctggaggggcagtgcctgcaggaactacaggtgaatttccagggcgggagcacagagggcgctgaactccagaaatgacaggacagatgctggagagggggaggatgag

SEQ ID NO: 431520 - DNA, 579 bp, Homo sapiens
agatagggcttagtacgaggctggtgtgaattcggccgagggtgccggttgaggttgctggtggacctgctctggtggtcttggatgaggccccatgagcgcggcgcccctggtgggctacagcagcagcggctccgaggatgagtccgaggacgggatgcggaccaggccgggggatgggagccaccgtcgtggccagagcccccttcccaggcagagatttccagtacctgacagtgtgctgaacatgttcccgggcaccgaggaggggcctgaagatgacagcacaaaacacgggggacgggtgcgcaccttcccccacgagcgaggcaactgggccacccacgtctatgtaccatatgaagccaaggaggagttcctggatctgcttgatgtgttgctgccccatgcccagacatatgtcccccggctggtaaggatgaaggtgttccacctcagcctgtcccagagtgtggttctgcgccaccactggatcctccccttcgtgcaggctctgaaagcccgtatgacctccttccacaggtgagtgcttcttccctctgcctctccactccctcc

SEQ ID NO: 431521 - DNA, 1013 bp, Homo sapiens
  misc_feature (4)..(4): n is a, c, g, or t
  misc_feature (7)..(9): n is a, c, g, or t
ggcncgnnngtgggtccctgccggccggcggcgggcgcagacagcggcgggcgcaggacgtgcactatggctcggggctcgctgcgccggttgctgcggctcctcgtgctggggctctggctggcgttgctgcgctccgtggccggggagcaagcgccaggcaccgccccctgctcccgcggcagctcctggagcgcggacctggacaagtgcatggactgcgcgtcttgcagggcgcgaccgcacagcgacttctgcctgggctgcgctgcagcacctcctgcccccttccggctgctttggcccatccttgggggcgctctgagcctgaccttcgtgctggggctgctttctggctttttggtctggagacgatgccgcaggagagagaagttcaccacccccatagaggagaccggcggagagggctgcccagctgtggcgctgatccagtgacaatgtgccccctgccagccggggctcgcccactcatcattcattcatccattctagagccagtctctgcctcccagacgcggcgggagccaagctcctccaaccacaaggggggtggggggcggtgaatcacctctgaggcctgggcccagggttcaggggaaccttccaaggtgtctggttgccctgcctctggctccagaacagaaagggagcctcacgctggctcacacaaaacagctgacactgactaaggaactgcagcatttgcacaggggaggggggtgccctccttcctagaggccctgggggccaggctgacttggggggcagacttgacactaggccccactcactcagatgtcctgaaattccaccacgggggtcaccctggggggttagggacctatttttaacactagggggctggcccactaggagggctggccctaagatacagacccccccaactccccaaagcggggaggagatatttattttggggagagtttggaggggagggagaatttattaataaaagaatctttaactttaaa

SEQ ID NO: 431522 - DNA, 908 bp, Homo sapiens
  misc_feature (4)..(4): n is a, c, g, or t
  misc_feature (7)..(9): n is a, c, g, or t
ggcncgnnngtgggtccctgccggccggcggcgggcgcagacagcggcgggcgcaggacgtgcactatggctcggggctcgctgcgccggttgctgcggctcctcgtgctggggctctggctggcgttgctgcgctccgtggccggggagcaagcgccaggcgctgcagcacctcctgcccccttccggctgctttggcccatccttgggggcgctctgagcctgaccttcgtgctggggctgctttctggctttttggtctggagacgatgccgcaggagagagaagttcaccacccccatagaggagaccggcggagagggctgcccagctgtggcgctgatccagtgacaatgtgccccctgccagccggggctcgcccactcatcattcattcatccattctagagccagtctctgcctcccagacgcggcgggagccaagctcctccaaccacaaggggggtggggggcggtgaatcacctctgaggcctgggcccagggttcaggggaaccttccaaggtgtctggttgccctgcctctggctccagaacagaaagggagcctcacgctggctcacacaaaacagctgacactgactaaggaactgcagcatttgcacaggggaggggggtgccctccttcctagaggccctgggggccaggctgacttggggggcagacttgacactaggccccactcactcagatgtcctgaaattccaccacgggggtcaccctggggggttagggacctatttttaacactagggggctggcccactaggagggctggccctaagatacagacccccccaactccccaaagcggggaggagatatttattttggggagagtttggaggggagggagaatttattaataaaagaatctttaactttaaa

SEQ ID NO: 431523 - DNA, 956 bp, Homo sapiens
  misc_feature (905)..(906): n is a, c, g, or t
  misc_feature (911)..(911): n is a, c, g, or t
  misc_feature (913)..(913): n is a, c, g, or t
aataagcatagtcgaggccgggtgttaatcggacagggtgcactatggctcggggctcgctgcgccggttgctgcggctcctcgtgctggggctctggctggcgttgctgcgctccgtggccggggagcaagcgccaggcaccgccccctgctcccgcggcagctcctggagcgcggacctggacaagtgcatggactgcgcgtcttgcagggcgcgaccgcacagcgacttctgcctgggctgcgctgcagcacctcctgcccccttccggctgctttggcccatccttgggggcgctctgagcctgaccttcgtgctggggctgctttctggctttttggtctggagacgatgccgcaggagagagaagttcaccacccccatagaggagaccggcggagagggctgcccagctgtggcgctgatccagtgacaatgtgccccctgccagccggggctcgcccactcatcattcattcatccattctagagccagtctctgcctcccagacgcggcgggagccaagctcctccaaccacaaggggggtggggggcggtgaatcacctctgaggcctgggcccagggttcaggggaaccttccaaggtgtctggttgccctgcctctggctccagaacagaaagggagcctcacgctggctcacacaaaacagctgacactgactaaggaactgcagcatttgcacaggggaggggggtgccctccttcctagaggccctgggggccaggctgacttggggggcagacttgacactaggccccactcactcagatgtcctgaaattccaccacgggggtcaccctggggggttagggacctatttttaacactagggggctggcccactaggagggctggccctaagatacagacccccatccnnagcgngnggaattattgggaagtggacggagggaattaaaaaacttcttt

SEQ ID NO: 431524 - DNA, 349 bp, Homo sapiens
agatgagcaaggcctcacccagctccctgctggctaagttctcagaggatactctcagcagctatacggaggctgtctcccctccttcctagaggccctgggggccaggctgacttggggggcagacttgacactaggccccactcactcagatgtcctgaaattccaccacgggggtcaccctggggggttagggacctatttttaacactagggggctggcccactaggagggctggccctaagatacagacccccccaactccccaaagcggggaggagatatttattttggggagagtttggaggggagggagaatttattaataaaagaatctttaactttaaa

SEQ ID NO: 431525 - DNA, 1074 bp, Homo sapiens
  misc_feature (4)..(4): n is a, c, g, or t
  misc_feature (7)..(9): n is a, c, g, or t
ggcncgnnngtgggtccctgccggccggcggcgggcgcagacagcggcgggcgcaggacgtgcactatggctcggggctcgctgcgccggttgctgcggctcctcgtgctggggctctggctggcgttgctgcgctccgtggccggggagcaagcgccaggcaccgccccctgctcccgcggcagctcctggagcgcggacctggacaagtgcatggactgcgcgtcttgcagggcgcgaccgcacagcgacttctgcctgggctgcgctgcagcacctcctgcccccttccggctgctttggcccatccttgggggcgctctgagcctgaccttcgtgctggggctgctttctggctttttggtctggagacgatgccgcaggagagagaagttcaccacccccatagaggagaccggcggagagggctgcccagctgtggcgctgatccagtgacaatgtgccccctgccagccggggctcgcccactcatcattcattcatccattctagagccagtctctgcctcccagacgcggcgggagccaagctcctccaaccacaaggggggtggggggcggtgaatcacctctgaggcctgggcccagggttcaggggaaccttccaaggtgtctggttgccctgcctctggctccagaacagaaagggagcctcacgctggctcacacaaaacagctgacactgactaaggaactgcagcatttgcacaggggaggggggtgccctccttcctagaggccctgggggccaggctgacttggggggcagacttgacactaggccccactcactcagatgtcctgaaattccaccacgggggtcaccctggggggttagggacctatttttaacactagggggctggcccactaggagggctggccctaagatacagacccccccaactccccaaagcggggaggagatatttattttggggagagtttggaggggagggagaatttattaataaaagaatctttaactttaaaaacacaacacaaaagccgggcatattcgtgggcacaacacgtaataagagcacagtgttaa

SEQ ID NO: 431526 - DNA, 978 bp, Homo sapiens
  misc_feature (4)..(4): n is a, c, g, or t
  misc_feature (7)..(9): n is a, c, g, or t
  misc_feature (927)..(928): n is a, c, g, or t
  misc_feature (933)..(933): n is a, c, g, or t
  misc_feature (935)..(935): n is a, c, g, or t
ggcncgnnngtgggtccctgccggccggcggcgggcgcagacagcggcgggcgcaggacgtgcactatggctcggggctcgctgcgccggttgctgcggctcctcgtgctggggctctggctggcgttgctgcgctccgtggccggggagcaagcgccaggcaccgccccctgctcccgcggcagctcctggagcgcggacctggacaagtgcatggactgcgcgtcttgcagggcgcgaccgcacagcgacttctgcctgggctgcgctgcagcacctcctgcccccttccggctgctttggcccatccttgggggcgctctgagcctgaccttcgtgctggggctgctttctggctttttggtctggagacgatgccgcaggagagagaagttcaccacccccatagaggagaccggcggagagggctgcccagctgtggcgctgatccagtgacaatgtgccccctgccagccggggctcgcccactcatcattcattcatccattctagagccagtctctgcctcccagacgcggcgggagccaagctcctccaaccacaaggggggtggggggcggtgaatcacctctgaggcctgggcccagggttcaggggaaccttccaaggtgtctggttgccctgcctctggctccagaacagaaagggagcctcacgctggctcacacaaaacagctgacactgactaaggaactgcagcatttgcacaggggaggggggtgccctccttcctagaggccctgggggccaggctgacttggggggcagacttgacactaggccccactcactcagatgtcctgaaattccaccacgggggtcaccctggggggttagggacctatttttaacactagggggctggcccactaggagggctggccctaagatacagacccccatccnnagcgngnggaattattgggaagtggacggagggaattaaaaaacttcttt

SEQ ID NO: 431527 - DNA, 727 bp, Homo sapiens
gcctactactactactaaattagcggccgctcgatctgagcctgaccttcgtgctggggctgctttctggctttttggtctggagacgatgccgcaggagagagaagttcaccacccccatagaggagaccggcggagagggctgcccagctgtggcgctgatccagtgacaatgtgccccctgccagccggggctcgcccactcatcattcattcatccattctagagccagtctctgcctcccagacgcggcgggagccaagctcctccaaccacaaggggggtggggggcggtgaatcacctctgaggcctgggcccagggttcaggggaaccttccaaggtgtctggttgccctgcctctggctccagaacagaaagggagcctcacgctggctcacacaaaacagctgacactgactaaggaactgcagcatttgcacaggggaggggggtgccctccttcctagaggccctgggggccaggctgacttggggggcagacttgacactaggccccactcactcagatgtcctgaaattccaccacgggggtcaccctggggggttagggacctatttttaacactagggggctggcccactaggagggctggccctaagatacagacccccccaactccccaaagcggggaggagatatttattttggggagagtttggaggggagggagaatttattaataaaagaatctttaactttaaa

SEQ ID NO: 431528 - DNA, 833 bp, Homo sapiens
  misc_feature (4)..(4): n is a, c, g, or t
  misc_feature (7)..(9): n is a, c, g, or t
ggcncgnnngtgggtccctgccggccggcggcgggcgcagacagcggcgggcgcaggacgtgcactatggctcggggctcgctgcgccggttgctgcggctcctcgtgctggggctctggctggcgttgctgcgctccgtggccggggagcaagcgccaggcaccgccccctgctcccgcggcagctcctggagcgcggacctggacaagtgcatggactgcgcgtcttgcagggcgcgaccgcacagcgacttctgcctgggcttgatccagtgacaatgtgccccctgccagccggggctcgcccactcatcattcattcatccattctagagccagtctctgcctcccagacgcggcgggagccaagctcctccaaccacaaggggggtggggggcggtgaatcacctctgaggcctgggcccagggttcaggggaaccttccaaggtgtctggttgccctgcctctggctccagaacagaaagggagcctcacgctggctcacacaaaacagctgacactgactaaggaactgcagcatttgcacaggggaggggggtgccctccttcctagaggccctgggggccaggctgacttggggggcagacttgacactaggccccactcactcagatgtcctgaaattccaccacgggggtcaccctggggggttagggacctatttttaacactagggggctggcccactaggagggctggccctaagatacagacccccccaactccccaaagcggggaggagatatttattttggggagagtttggaggggagggagaatttattaataaaagaatctttaactttaaa

SEQ ID NO: 431529 - DNA, 770 bp, Homo sapiens
  misc_feature (4)..(4): n is a, c, g, or t
  misc_feature (7)..(9): n is a, c, g, or t
ggcncgnnngtgggtccctgccggccggcggcgggcgcagacagcggcgggcgcaggacgtgcactatggctcggggctcgctgcgccggttgctgcggctcctcgtgctggggctctggctggcgttgctgcgctccgtggccggggagcaagcgccaggcaccgccccctgctcccgcggcagctcctggagcgcggacctggacaagtgcatggactgcgcgtcttgcagggcgcgaccgcacagcgacttctgcctgggctgcgctgcagcacctcctgcccccttccggctgctttggcccatccttgggggcgctctgagcctgaccttcgtgctggggctgctttctggctttttggtctggagacgatgccgcaggagagagaagttcaccacccccatagaggagaccggcggagagggctgcccagctgtggcgctgatccagtgacaatgtgccccctgccagccggggctcgcccactcatcattcattcatccattctagaggccctgggggccaggctgacttggggggcagacttgacactaggccccactcactcagatgtcctgaaattccaccacgggggtcaccctggggggttagggacctatttttaacactagggggctggcccactaggagggctggccctaagatacagacccccccaactccccaaagcggggaggagatatttattttggggagagtttggaggggagggagaatttattaataaaagaatctttaactttaaa

SEQ ID NO: 431530 - DNA, 666 bp, Homo sapiens
aataagcatagtcgaggccgggtgttaatcggacagggtgcactatggctcggggctcgctgcgccggttgctgcggctcctcgtgctggggctctggctggcgttgctgcgctccgtggccggggagcaagcgccaggtacgcgggactccggggtcggggaaccccgggccggggctcgggagccggactgggtgtctggagaacagcgccgaactgggggaacaggcggatgtggggatctggggtcaggtggccttcaaacagctcgctcccggctgtgggaagttccatcactctccaagcttcattcacaatccgggcctcagtttctcccaccgtccaattggggttgggggggtcttcagttccacaagtccgaagtacttcgaatggagagagaaagtgagtgagggcgggatgtttagtctaggaaggggcacgcccccagcctggtccgtacagggtctaactagccccagtgatcgacgagttggggaggccgtcgagaggcactagggtctgtgccctctataccatgtggggtgcccccttccatccggtgacttcagtgcccagctatgcggggggagggactggggtcgggcccggtgcccaggagtgagtcacccgccggcggcaggggggttgtggggacctgacccc

SEQ ID NO: 431531 - DNA, 102 bp, Homo sapiens
gagggcgccggtgactcacgttattcgagccggccgaccctgacctcagaccccagaatagccgagtcccgcccccagcctctgacccgaggccccctcccc

SEQ ID NO: 431532 - DNA, 253 bp, Homo sapiens
ggtttgatttttgccctgggaagagatgggaacagctgaaggagattggcctccgagttcccagccagcccccggaacttgggtagaacccccctacccctcatcctcgcagtagctgggtctctcccagggacgcccctagtcagccttggcctccctctccatgccacctccctttccaaggtgagcctctgcagaagacagacccttggctggctggctgtcgggttggtgccttatttatgtgtgtatc

SEQ ID NO: 431533 - DNA, 2195 bp, Homo sapiens
cggggttcggtgcgcggccggggccggagttcgctgcaagtcggcggaaagtttggctgcgcgggttcccccgaagttcagagtgaagacatttccacctggacacctgaccatgtgcctgccctgagcagcgaggcccaccaggcatctctgttgtgggcagcagggccaggtcctggtctgtggaccctcggcagttggcaggctccctctgcagtggggtctgggcctcggccccaccatgtcgagcctcggcggtggctcccaggatgccggcggcagtagcagcagcagcaccaatggcagcggtggcagtggcagcagtggcccaaaggcaggagcagcagacaagagtgcagtggtggctgccgccgcaccagcctcagtggcagatgacacaccaccccccgagcgtcggaacaagagcggtatcatcagtgagcccctcaacaagagcctgcgccgctcccgcccgctctcccactactcttcttttggcagcagtggtggtagtggcggtggcagcatgatgggcggagagtctgctgacaaggccactgcggctgcagccgctgcctccctgttggccaatgggcatgacctggcggcggccatggcggtggacaaaagcaaccctacctcaaagcacaaaagtggtgctgtggccagcctgctgagcaaggcagagcgggccacggagctggcagccgagggacagctgacgctgcagcagtttgcgcagtccacagagatgctgaagcgcgtggtgcaggagcatctcccgctgatgagcgaggcgggtgctggcctgcctgacatggaggctgtggcaggtgccgaagccctcaatggccagtccgacttcccctacctgggcgctttccccatcaacccaggcctcttcattatgaccccggcaggtgtgttcctggccgagagcgcgctgcacatggcgggcctggctgagtaccccatgcagggagagctggcctctgccatcagctccggcaagaagaagcggaaacgctgcggcatgtgcgcgccctgccggcggcgcatcaactgcgagcagtgcagcagttgtaggaatcgaaagactggccatcagatttgcaaattcagaaaatgtgaggaactcaaaaagaagccttccgctgctctggagaaggtgatgcttccgacgggagccgccttccggtggtttcagtgacggcggcggaacccaaagctgccctctccgtgcaatgtcactgctcgtgtggtctccagcaagggattcgggcgaagacaaacggatgcacccgtctttagaaccaaaaatattctctcacagatttcattcctgtttttatatatatattttttgttgtcgttttaacatctccacgtccctagcataaaaagaaaaagaaaaaaatttaaactgctttttcggaagaacaacaacaaaaaagaggtaaagacgaatctataaagtaccgagacttcctgggcaaagaatggacaatcagtttccttcctgtgtcgatgtcgatgttgtctgtgcaggagatgcagtttttgtgtagagaatgtaaattttctgtaaccttttgaaatctagttactaataagcactactgtaatttagcacagtttaactccaccctcatttaaacttcctttgattctttccgaccatgaaatagtgcatagtttgcctggagaatccactcacgttcataaagagaatgttgatggcgccgtgtagaagccgctctgtatccatccacgcgtgcagagctgccagcagggagctcacagaaggggagggagcaccaggccagctgagctgcacccacagtcccgagactgggatcccccaccccaacagtgattttggaaaaaaaaatgaaagttctgttcgtttatccattgcgatctggggagccccatctcgatatttccaatcctggctacttttcttagagaaaataagtcctttttttctggccttgctaatggcaacagaagaaagggcttctttgcgtggtcccctgctggtgggggtgggtccccagggggccccctgcggcctgggcccccctgcccacggccagcttcctgctgatgaacatgctgtttgtattgttttaggaaaccaggctgttttgtgaataaaacgaatgcatgtttgtgtcacgaaaaaaagctgg

SEQ ID NO: 431534 - DNA, 2347 bp, Homo sapiens
tagtctagatcgcgatctagaactaggggcaggtgctgcaggctcccccccctccccgcctcgggccagccgcggcggcgcgactcgggctccggacccgggcactgctggcggctggagcggagcgcaccgcggcggtggtgcccagagcggagcgcagctccctgccccgcccctccccctcggcctcgcggcgacggcggcggtggcggcttggacgactcggagagccgagtgaagacatttccacctggacacctgaccatgtgcctgccctgagcagcgaggcccaccaggcatctctgttgtgggcagcagggccaggtcctggtctgtggaccctcggcagttggcaggctccctctgcagtggggtctgggcctcggccccaccatgtcgagcctcggcggtggctcccaggatgccggcggcagtagcagcagcagcaccaatggcagcggtggcagtggcagcagtggcccaaaggcaggagcagcagacaagagtgcagtggtggctgccgccgcaccagcctcagtggcagatgacacaccaccccccgagcgtcggaacaagagcggtatcatcagtgagcccctcaacaagagcctgcgccgctcccgcccgctctcccactactcttcttttggcagcagtggtggtagtggcggtggcagcatgatgggcggagagtctgctgacaaggccactgcggctgcagccgctgcctccctgttggccaatgggcatgacctggcggcggccatggcggtggacaaaagcaaccctacctcaaagcacaaaagtggtgctgtggccagcctgctgagcaaggcagagcgggccacggagctggcagccgagggacagctgacgctgcagcagtttgcgcagtccacagagatgctgaagcgcgtggtgcaggagcatctcccgctgatgagcgaggcgggtgctggcctgcctgacatggaggctgtggcaggtgccgaagccctcaatggccagtccgacttcccctacctgggcgctttccccatcaacccaggcctcttcattatgaccccggcaggtgtgttcctggccgagagcgcgctgcacatggcgggcctggctgagtaccccatgcagggagagctggcctctgccatcagctccggcaagaagaagcggaaacgctgcggcatgtgcgcgccctgccggcggcgcatcaactgcgagcagtgcagcagttgtaggaatcgaaagactggccatcagatttgcaaattcagaaaatgtgaggaactcaaaaagaagccttccgctgctctggagaaggtgatgcttccgacgggagccgccttccggtggtttcagtgacggcggcggaacccaaagctgccctctccgtgcaatgtcactgctcgtgtggtctccagcaagggattcgggcgaagacaaacggatgcacccgtctttagaaccaaaaatattctctcacagatttcattcctgtttttatatatatattttttgttgtcgttttaacatctccacgtccctagcataaaaagaaaaagaaaaaaatttaaactgctttttcggaagaacaacaacaaaaaagaggtaaagacgaatctataaagtaccgagacttcctgggcaaagaatggacaatcagtttccttcctgtgtcgatgtcgatgttgtctgtgcaggagatgcagtttttgtgtagagaatgtaaattttctgtaaccttttgaaatctagttactaataagcactactgtaatttagcacagtttaactccaccctcatttaaacttcctttgattctttccgaccatgaaatagtgcatagtttgcctggagaatccactcacgttcataaagagaatgttgatggcgccgtgtagaagccgctctgtatccatccacgcgtgcagagctgccagcagggagctcacagaaggggagggagcaccaggccagctgagctgcacccacagtcccgagactgggatcccccaccccaacagtgattttggaaaaaaaaatgaaagttctgttcgtttatccattgcgatctggggagccccatctcgatatttccaatcctggctacttttcttagagaaaataagtcctttttttctggccttgctaatggcaacagaagaaagggcttctttgcgtggtcccctgctggtgggggtgggtccccagggggccccctgcggcctgggcccccctgcccacggccagcttcctgctgatgaacatgctgtttgtattgttttaggaaaccaggctgttttgtgaataaaacgaatgcatgtttgtgtcacgaaaaaaagctgg

SEQ ID NO: 431535 - DNA, 2312 bp, Homo sapiens
ggcttagcattccaggccctgggcatctccaagtgccccaggtgggggcactctcctggggtctgtgacagcttgcccccaaccacggagaggtgacaggcacgagatagagtttcaccatgttgtccagggtggtctcaaaactcctgagctcaagcgatctgcctgcctctgcttcccaaagtgctgagattacagagtgaagacatttccacctggacacctgaccatgtgcctgccctgagcagcgaggcccaccaggcatctctgttgtgggcagcagggccaggtcctggtctgtggaccctcggcagttggcaggctccctctgcagtggggtctgggcctcggccccaccatgtcgagcctcggcggtggctcccaggatgccggcggcagtagcagcagcagcaccaatggcagcggtggcagtggcagcagtggcccaaaggcaggagcagcagacaagagtgcagtggtggctgccgccgcaccagcctcagtggcagatgacacaccaccccccgagcgtcggaacaagagcggtatcatcagtgagcccctcaacaagagcctgcgccgctcccgcccgctctcccactactcttcttttggcagcagtggtggtagtggcggtggcagcatgatgggcggagagtctgctgacaaggccactgcggctgcagccgctgcctccctgttggccaatgggcatgacctggcggcggccatggcggtggacaaaagcaaccctacctcaaagcacaaaagtggtgctgtggccagcctgctgagcaaggcagagcgggccacggagctggcagccgagggacagctgacgctgcagcagtttgcgcagtccacagagatgctgaagcgcgtggtgcaggagcatctcccgctgatgagcgaggcgggtgctggcctgcctgacatggaggctgtggcaggtgccgaagccctcaatggccagtccgacttcccctacctgggcgctttccccatcaacccaggcctcttcattatgaccccggcaggtgtgttcctggccgagagcgcgctgcacatggcgggcctggctgagtaccccatgcagggagagctggcctctgccatcagctccggcaagaagaagcggaaacgctgcggcatgtgcgcgccctgccggcggcgcatcaactgcgagcagtgcagcagttgtaggaatcgaaagactggccatcagatttgcaaattcagaaaatgtgaggaactcaaaaagaagccttccgctgctctggagaaggtgatgcttccgacgggagccgccttccggtggtttcagtgacggcggcggaacccaaagctgccctctccgtgcaatgtcactgctcgtgtggtctccagcaagggattcgggcgaagacaaacggatgcacccgtctttagaaccaaaaatattctctcacagatttcattcctgtttttatatatatattttttgttgtcgttttaacatctccacgtccctagcataaaaagaaaaagaaaaaaatttaaactgctttttcggaagaacaacaacaaaaaagaggtaaagacgaatctataaagtaccgagacttcctgggcaaagaatggacaatcagtttccttcctgtgtcgatgtcgatgttgtctgtgcaggagatgcagtttttgtgtagagaatgtaaattttctgtaaccttttgaaatctagttactaataagcactactgtaatttagcacagtttaactccaccctcatttaaacttcctttgattctttccgaccatgaaatagtgcatagtttgcctggagaatccactcacgttcataaagagaatgttgatggcgccgtgtagaagccgctctgtatccatccacgcgtgcagagctgccagcagggagctcacagaaggggagggagcaccaggccagctgagctgcacccacagtcccgagactgggatcccccaccccaacagtgattttggaaaaaaaaatgaaagttctgttcgtttatccattgcgatctggggagccccatctcgatatttccaatcctggctacttttcttagagaaaataagtcctttttttctggccttgctaatggcaacagaagaaagggcttctttgcgtggtcccctgctggtgggggtgggtccccagggggccccctgcggcctgggcccccctgcccacggccagcttcctgctgatgaacatgctgtttgtattgttttaggaaaccaggctgttttgtgaataaaacgaatgcatgtttgtgtcacgaaaaaaagctgg

SEQ ID NO: 431536 - DNA, 2218 bp, Homo sapiens
ggcttagcattccaggccctgggcatctccaagtgccccaggtgggggcactctcctggggtctgtgacagcttgcccccaaccacggagaggtgacaggcacgagtgaagacatttccacctggacacctgaccatgtgcctgccctgagcagcgaggcccaccaggcatctctgttgtgggcagcagggccaggtcctggtctgtggaccctcggcagttggcaggctccctctgcagtggggtctgggcctcggccccaccatgtcgagcctcggcggtggctcccaggatgccggcggcagtagcagcagcagcaccaatggcagcggtggcagtggcagcagtggcccaaaggcaggagcagcagacaagagtgcagtggtggctgccgccgcaccagcctcagtggcagatgacacaccaccccccgagcgtcggaacaagagcggtatcatcagtgagcccctcaacaagagcctgcgccgctcccgcccgctctcccactactcttcttttggcagcagtggtggtagtggcggtggcagcatgatgggcggagagtctgctgacaaggccactgcggctgcagccgctgcctccctgttggccaatgggcatgacctggcggcggccatggcggtggacaaaagcaaccctacctcaaagcacaaaagtggtgctgtggccagcctgctgagcaaggcagagcgggccacggagctggcagccgagggacagctgacgctgcagcagtttgcgcagtccacagagatgctgaagcgcgtggtgcaggagcatctcccgctgatgagcgaggcgggtgctggcctgcctgacatggaggctgtggcaggtgccgaagccctcaatggccagtccgacttcccctacctgggcgctttccccatcaacccaggcctcttcattatgaccccggcaggtgtgttcctggccgagagcgcgctgcacatggcgggcctggctgagtaccccatgcagggagagctggcctctgccatcagctccggcaagaagaagcggaaacgctgcggcatgtgcgcgccctgccggcggcgcatcaactgcgagcagtgcagcagttgtaggaatcgaaagactggccatcagatttgcaaattcagaaaatgtgaggaactcaaaaagaagccttccgctgctctggagaaggtgatgcttccgacgggagccgccttccggtggtttcagtgacggcggcggaacccaaagctgccctctccgtgcaatgtcactgctcgtgtggtctccagcaagggattcgggcgaagacaaacggatgcacccgtctttagaaccaaaaatattctctcacagatttcattcctgtttttatatatatattttttgttgtcgttttaacatctccacgtccctagcataaaaagaaaaagaaaaaaatttaaactgctttttcggaagaacaacaacaaaaaagaggtaaagacgaatctataaagtaccgagacttcctgggcaaagaatggacaatcagtttccttcctgtgtcgatgtcgatgttgtctgtgcaggagatgcagtttttgtgtagagaatgtaaattttctgtaaccttttgaaatctagttactaataagcactactgtaatttagcacagtttaactccaccctcatttaaacttcctttgattctttccgaccatgaaatagtgcatagtttgcctggagaatccactcacgttcataaagagaatgttgatggcgccgtgtagaagccgctctgtatccatccacgcgtgcagagctgccagcagggagctcacagaaggggagggagcaccaggccagctgagctgcacccacagtcccgagactgggatcccccaccccaacagtgattttggaaaaaaaaatgaaagttctgttcgtttatccattgcgatctggggagccccatctcgatatttccaatcctggctacttttcttagagaaaataagtcctttttttctggccttgctaatggcaacagaagaaagggcttctttgcgtggtcccctgctggtgggggtgggtccccagggggccccctgcggcctgggcccccctgcccacggccagcttcctgctgatgaacatgctgtttgtattgttttaggaaaccaggctgttttgtgaataaaacgaatgcatgtttgtgtcacgaaaaaaagctgg

SEQ ID NO: 431537 - DNA, 2784 bp, Homo sapiens
aggtggagggggttggggggaggagggagcggcgagtccggtccgggttttgccggcagcccccgggcagcgttcatagctcctgcccgggcgggcgcgcggcggcggcggcagaggcggctgagcctgagcggggatgtagaggcggcggcagcagaggcggcactggcggcaagagcagacgcccgagccgagcgagaagagcggcagagccttatcccctgaagccgggccccgcgtcccagccctgcccagcccgcgcccagccatgcgcgccgcctgctgagtccgggcgccgcacgctgagccctccgcccgcgagccgcgctcagctcgggggtgattagttgctttttgttgttttttaatttgggccgcggggagggggaggaggggcaggtgctgcaggctcccccccctccccgcctcgggccagccgcggcggcgcgactcgggctccggacccgggcactgctggcggctggagcggagcgcaccgcggcggtggtgcccagagcggagcgcagctccctgccccgcccctccccctcggcctcgcggcgacggcggcggtggcggcttggacgactcggagagccgagtgaagacatttccacctggacacctgaccatgtgcctgccctgagcagcgaggcccaccaggcatctctgttgtgggcagcagggccaggtcctggtctgtggacccttcgtgcatgtttgtgcatgtgctctcctcttgcatgttgtgtgtgtctttggtgacctctgtgtccctcgaccagtagtctgatgccatctgtgctggttgtgcatccgcatgtagattgacctgctgctgtgtcatggtatgccatgccatgtcatggcatccaatttgtgcatgctgtgttgtgcatgttgtgcatgcatgtggcccaaaggcaggagcagcagacaagagtgcagtggtggctgccgccgcaccagcctcagtggcagatgacacaccaccccccgagcgtcggaacaagagcggtatcatcagtgagcccctcaacaagagcctgcgccgctcccgcccgctctcccactactcttcttttggcagcagtggtggtagtggcggtggcagcatgatgggcggagagtctgctgacaaggccactgcggctgcagccgctgcctccctgttggccaatgggcatgacctggcggcggccatggcggtggacaaaagcaaccctacctcaaagcacaaaagtggtgctgtggccagcctgctgagcaaggcagagcgggccacggagctggcagccgagggacagctgacgctgcagcagtttgcgcagtccacagagatgctgaagcgcgtggtgcaggagcatctcccgctgatgagcgaggcgggtgctggcctgcctgacatggaggctgtggcaggtgccgaagccctcaatggccagtccgacttcccctacctgggcgctttccccatcaacccaggcctcttcattatgaccccggcaggtgtgttcctggccgagagcgcgctgcacatggcgggcctggctgagtaccccatgcagggagagctggcctctgccatcagctccggcaagaagaagcggaaacgctgcggcatgtgcgcgccctgccggcggcgcatcaactgcgagcagtgcagcagttgtaggaatcgaaagactggccatcagatttgcaaattcagaaaatgtgaggaactcaaaaagaagccttccgctgctctggagaaggtgatgcttccgacgggagccgccttccggtggtttcagtgacggcggcggaacccaaagctgccctctccgtgcaatgtcactgctcgtgtggtctccagcaagggattcgggcgaagacaaacggatgcacccgtctttagaaccaaaaatattctctcacagatttcattcctgtttttatatatatattttttgttgtcgttttaacatctccacgtccctagcataaaaagaaaaagaaaaaaatttaaactgctttttcggaagaacaacaacaaaaaagaggtaaagacgaatctataaagtaccgagacttcctgggcaaagaatggacaatcagtttccttcctgtgtcgatgtcgatgttgtctgtgcaggagatgcagtttttgtgtagagaatgtaaattttctgtaaccttttgaaatctagttactaataagcactactgtaatttagcacagtttaactccaccctcatttaaacttcctttgattctttccgaccatgaaatagtgcatagtttgcctggagaatccactcacgttcataaagagaatgttgatggcgccgtgtagaagccgctctgtatccatccacgcgtgcagagctgccagcagggagctcacagaaggggagggagcaccaggccagctgagctgcacccacagtcccgagactgggatcccccaccccaacagtgattttggaaaaaaaaatgaaagttctgttcgtttatccattgcgatctggggagccccatctcgatatttccaatcctggctacttttcttagagaaaataagtcctttttttctggccttgctaatggcaacagaagaaagggcttctttgcgtggtcccctgctggtgggggtgggtccccagggggccccctgcggcctgggcccccctgcccacggccagcttcctgctgatgaacatgctgtttgtattgttttaggaaaccaggctgttttgtgaataaaacgaatgcatgtttgtgtcacgaaaaaaagctgg

SEQ ID NO: 431538 - DNA, 2950 bp, Homo sapiens
aggtggagggggttggggggaggagggagcggcgagtccggtccgggttttgccggcagcccccgggcagcgttcatagctcctgcccgggcgggcgcgcggcggcggcggcagaggcggctgagcctgagcggggatgtagaggcggcggcagcagaggcggcactggcggcaagagcagacgcccgagccgagcgagaagagcggcagagccttatcccctgaagccgggccccgcgtcccagccctgcccagcccgcgcccagccatgcgcgccgcctgctgagtccgggcgccgcacgctgagccctccgcccgcgagccgcgctcagctcgggggtgattagttgctttttgttgttttttaatttgggccgcggggagggggaggaggggcaggtgctgcaggctcccccccctccccgcctcgggccagccgcggcggcgcgactcgggctccggacccgggcactgctggcggctggagcggagcgcaccgcggcggtggtgcccagagcggagcgcagctccctgccccgcccctccccctcggcctcgcggcgacggcggcggtggcggcttggacgactcggagagccgagtgaagacatttccacctggacacctgaccatgtgcctgccctgagcagcgaggcccaccaggcatctctgttgtgggcagcagggccaggtcctggtctgtggaccctcggcagttggcaggctccctctgcagtggggtctgggcctcggccccaccatgtcgagcctcggcggtggctcccaggatgccggcggcagtagcagcagcagcaccaatggcagcggtggcagtggcagcagtggcccaaaggcaggagcagcagacaagagtgcagtggtggctgccgccgcaccagcctcagtggcagatgacacaccaccccccgagcgtcggaacaagagcggtatcatcagtgagcccctcaacaagagcctgcgccgctcccgcccgctctcccactactcttcttttggcagcagtggtggtagtggcggtggcagcatgatgggcggagagtctgctgacaaggccactgcggctgcagccgctgcctccctgttggccaatgggcatgacctggcggcggccatggcggtggacaaaagcaaccctacctcaaagcacaaaagtggtgctgtggccagcctgctgagcaaggcagagcgggccacggagctggcagccgagggacagctgacgctgcagcagtttgcgcagtccacagagatgctgaagcgcgtggtgcaggagcatctcccgctgatgagcgaggcgggtgctggcctgcctgacatggaggctgtggcaggtgccgaagccctcaatggccagtccgacttcccctacctgggcgctttccccatcaacccaggcctcttcattatgaccccggcaggtgtgttcctggccgagagcgcgctgcacatggcgggcctggctgagtaccccatgcagggagagctggcctctgccatcagctccggcaagaagaagcggaaacgctgcggcatgtgcgcgccctgccggcggcgcatcaactgcgagcagtgcagcagttgtaggaatcgaaagactggccatcagatttgcaaattcagaaaatgtgaggaactcaaaaagaagccttccgctgctctggagaaggtgatgcttccgacgggagccgccttccggtggtttcagtgacggcggcggaacccaaagctgccctctccgtgcaatgtcactgctcgtgtggtctccagcaagggattcgggcgaagacaaacggatgcacccgtctttagaaccaaaaatattctctcacagatttcattcctgtttttatatatatattttttgttgtcgttttaacatctccacgtccctagcataaaaagaaaaagaaaaaaatttaaactgctttttcggaagaacaacaacaaaaaagaggtaaagacgaatctataaagtaccgagacttcctgggcaaagaatggacaatcagtttccttcctgtgtcgatgtcgatgttgtctgtgcaggagatgcagtttttgtgtagagaatgtaaattttctgtaaccttttgaaatctagttactaataagcactactgtaatttagcacagtttaactccaccctcatttaaacttcctttgattctttccgaccatgaaatagtgcatagtttgcctggagaatccactcacgttcataaagagaatgttgatggcgccgtgtagaagccgctctgtatccatccacgcgtgcagagctgccagcagggagctcacagaaggggagggagcaccaggccagctgagctgcacccacagtcccgagactgggatcccccaccccaacagtgattttggaaaaaaaaatgaaagttctgttcgtttatccattgcgatctggggagccccatctcgatatttccaatcctggctacttttcttagagaaaataagtcctttttttctggccttgctaatggcaacagaagaaagggcttctttgcgtggtcccctgctggtgggggtgggtccccagggggccccctgcggcctgggcccccctgcccacggccagcttcctgctgatgaacatgctgtggatggtaaggaaacaggctggagggatacaagaatgctgtagggcacagaaaaaaaaaaaagacaaacaacgacacacagaacaaggtgggcgccacaaaagaccccaggggcaaagatacaaacccgcttatggaagaggcccacgagagaacaaaacaaaagcggcgacaacgcgcgcgaaaacacggcatgagagcaacccgggggacagcaccacaaaacagaagacaagaaccacaactgcgatcgaccaaaacgaacaagaaaccaagcacaagtcaaacaccgagaacagcacaaagaaga

SEQ ID NO: 431539 - DNA, 2487 bp, Homo sapiens
aggtggagggggttggggggaggagggagcggcgagtccggtccgggttttgccggcagcccccgggcagcgttcatagctcctgcccgggcgggcgcgcggcggcggcggcagaggcggctgagcctgagcggggatgtagaggcggcggcagcagaggcggcactggcggcaagagcagacgcccgagccgagcgagaagagcggcagagccttatcccctgaagccgggccccgcgtcccagccctgcccagcccgcgcccagccatgcgcgccgcctgctgagtccgggcgccgcacgctgagccctccgcccgcgagccgcgctcagctcgggggtgattagttgctttttgttgttttttaatttgggccgcggggagggggaggaggggcaggtgctgcaggctcccccccctccccgcctcgggccagccgcggcggcgcgactcgggctccggacccgggcactgctggcggctggagcggagcgcaccgcggcggtggtgcccagagcggagcgcagctccctgccccgcccctccccctcggcctcgcggcgacggcggcggtggcggcttggacgactcggagagccgagtgaagacatttccacctggacacctgaccatgtgcctgccctgagcagcgaggcccaccaggcatctctgttgtgggcagcagggccaggtcctggtctgtggaccctcggcagttggcaggctccctctgcagtggggtctgggcctcggccccaccatgtcgagcctcggcggtggctcccaggatgccggcggcagtagcagcagcagcaccaatggcagcggtggcagtggcagcagtggcccaaaggcaggagcagcagacaagagtgcagtggtggctgccgccgcaccagcctcagtggcagatgacacaccaccccccgagcgtcggaacaagagcggtatcatcagtgagcccctcaacaagagcctgcgccgctcccgcccgctctcccactactcttcttttggcagcagtggtggtagtggcggtggcagcatgatgggcggagagtctgctgacaaggccactgcggctgcagccgctgcctccctgttggccaatgggcatgacctggcggcggccatggcggtggacaaaagcaaccctacctcaaagcacaaaagtggtgctgtggccagcctgctgagcaaggcagagcgggccacggagctggcagccgagggacagctgacgctgcagcagtttgcgcagtccacagagatgctgaagcgcgtggtgcaggagcatctcccgctgatgagcgaggcgggtgctggcctgcctgacatggaggctgtggcaggtgccgaagccctcaatggccagtccgacttcccctacctgggcgctttccccatcaacccaggcctcttcattatgaccccggcaggtgtgttcctggccgagagcgcgctgcacatggcgggcctggctgagtaccccatgcagggagagctggcctctgccatcagctccggcaagaagaagcggaaacgctgcggcatgtgcgcgccctgccggcggcgcatcaactgcgagcagtgcagcagttgtaggaatcgaaagactggccatcagatttgcaaattcagaaaatgtgaggaactcaaaaagaagccttccgctgctctggagaaggtgatgcttccgacgggagccgccttccggtggtttcagtgacggcggcggaacccaaagctgccctctccgtgcaatgtcactgctcgtgtggtctccagcaagggattcgggcgaagacaaacggatgcacccgtctttagaaccaaaaatattctctcacagatttcattcctgtttttatatatatattttttgttgtcgttttaacatctccacgtccctagcataaaaagaaaaagaaaaaaatttaaactgctttttcggaagaacaacaacaaaaaaggaaatagtgcatagtttgcctggagaatccactcacgttcataaagagaatgttgatggcgccgtgtagaagccgctctgtatccatccacgcgtgcagagctgccagcagggagctcacagaaggggagggagcaccaggccagctgagctgcacccacagtcccgagactgggatcccccaccccaacagtgattttggaaaaaaaaatgaaagttctgttcgtttatccattgcgatctggggagccccatctcgatatttccaatcctggctacttttcttagagaaaataagtcctttttttctggccttgctaatggcaacagaagaaagggcttctttgcgtggtcccctgctggtgggggtgggtccccagggggccccctgcggcctgggcccccctgcccacggccagcttcctgctgatgaacatgctgtttgtattgttttaggaaaccaggctgttttgtgaataaaacgaatgcatgtttgtgtcacgaaaaaaagctgg

SEQ ID NO: 431540 - DNA, 2735 bp, Homo sapiens
aggtggagggggttggggggaggagggagcggcgagtccggtccgggttttgccggcagcccccgggcagcgttcatagctcctgcccgggcgggcgcgcggcggcggcggcagaggcggctgagcctgagcggggatgtagaggcggcggcagcagaggcggcactggcggcaagagcagacgcccgagccgagcgagaagagcggcagagccttatcccctgaagccgggccccgcgtcccagccctgcccagcccgcgcccagccatgcgcgccgcctgctgagtccgggcgccgcacgctgagccctccgcccgcgagccgcgctcagctcgggggtgattagttgctttttgttgttttttaatttgggccgcggggagggggaggaggggcaggtgctgcaggctcccccccctccccgcctcgggccagccgcggcggcgcgactcgggctccggacccgggcactgctggcggctggagcggagcgcaccgcggcggtggtgcccagagcggagcgcagctccctgccccgcccctccccctcggcctcgcggcgacggcggcggtggcggcttggacgactcggagagccgagtgaagacatttccacctggacacctgaccatgtgcctgccctgagcagcgaggcccaccaggcatctctgttgtgggcagcagggccaggtcctggtctgtggaccctcggcagttggcaggctccctctgcagtggggtctgggcctcggccccaccatgtcgagcctcggcggtggctcccaggatgccggcggcagtagcagcagcagcaccaatggcagcggtggcagtggcagcagtggcccaaaggcaggagcagcagacaagagtgcagtggtggctgccgccgcaccagcctcagtggcagatgacacaccaccccccgagcgtcggaacaagagcggtatcatcagtgagcccctcaacaagagcctgcgccgctcccgcccgctctcccactactcttcttttggcagcagtggtggtagtggcggtggcagcatgatgggcggagagtctgctgacaaggccactgcggctgcagccgctgcctccctgttggccaatgggcatgacctggcggcggccatggcggtggacaaaagcaaccctacctcaaagcacaaaagtggtgctgtggccagcctgctgagcaaggcagagcgggccacggagctggcagccgagggacagctgacgctgcagcagtttgcgcagtccacagagatgctgaagcgcgtggtgcaggagcatctcccgctgatgagcgaggcgggtgctggcctgcctgacatggaggctgtggcaggtgccgaagccctcaatggccagtccgacttcccctacctgggcgctttccccatcaacccaggcctcttcattatgaccccggcaggtgtgttcctggccgagagcgcgctgcacatggcgggcctggctgagtaccccatgcagggagagctggcctctgccatcagctccggcaagaagaagcggaaacgctgcggcatgtgcgcgccctgccggcggcgcatcaactgcgagcagtgcagcagttgtaggaatcgaaagactggccatcagatttgcaaattcagaaaatgtgaggaactcaaaaagaagccttccgctgctctggaggtaacggcgccttagagggagaaggtgatgcttccgacgggagccgccttccggtggtttcagtgacggcggcggaacccaaagctgccctctccgtgcaatgtcactgctcgtgtggtctccagcaagggattcgggcgaagacaaacggatgcacccgtctttagaaccaaaaatattctctcacagatttcattcctgtttttatatatatattttttgttgtcgttttaacatctccacgtccctagcataaaaagaaaaagaaaaaaatttaaactgctttttcggaagaacaacaacaaaaaagaggtaaagacgaatctataaagtaccgagacttcctgggcaaagaatggacaatcagtttccttcctgtgtcgatgtcgatgttgtctgtgcaggagatgcagtttttgtgtagagaatgtaaattttctgtaaccttttgaaatctagttactaataagcactactgtaatttagcacagtttaactccaccctcatttaaacttcctttgattctttccgaccatgaaatagtgcatagtttgcctggagaatccactcacgttcataaagagaatgttgatggcgccgtgtagaagccgctctgtatccatccacgcgtgcagagctgccagcagggagctcacagaaggggagggagcaccaggccagctgagctgcacccacagtcccgagactgggatcccccaccccaacagtgattttggaaaaaaaaatgaaagttctgttcgtttatccattgcgatctggggagccccatctcgatatttccaatcctggctacttttcttagagaaaataagtcctttttttctggccttgctaatggcaacagaagaaagggcttctttgcgtggtcccctgctggtgggggtgggtccccagggggccccctgcggcctgggcccccctgcccacggccagcttcctgctgatgaacatgctgtttgtattgttttaggaaaccaggctgttttgtgaataaaacgaatgcatgtttgtgtcacgaaaaaaagctgg

SEQ ID NO: 431541 - DNA, 787 bp, Homo sapiens
ctttttatgctagggacgtggagatgttaaaacaacaacaaaaaagaggtaaagacgaatctataaagtaccgagacttcctgggcaaagaatggacaatcagtttccttcctgtgtcgatgtcgatgttgtctgtgcaggagatgcagtttttgtgtagagaatgtaaattttctgtaaccttttgaaatctagttactaataagcactactgtaatttagcacagtttaactccaccctcatttaaacttcctttgattctttccgaccatgaaatagtgcatagtttgcctggagaatccactcacgttcataaagagaatgttgatggcgccgtgtagaagccgctctgtatccatccacgcgtgcagagctgccagcagggagctcacagaaggggagggagcaccaggccagctgagctgcacccacagtcccgagactgggatcccccaccccaacagtgattttggaaaaaaaaatgaaagttctgttcgtttatccattgcgatctggggagccccatctcgatatttccaatcctggctacttttcttagagaaaataagtcctttttttctggccttgctaatggcaacagaagaaagggcttctttgcgtggtcccctgctggtgggggtgggtccccagggggccccctgcggcctgggcccccctgcccacggccagcttcctgctgatgaacatgctgtttgtattgttttaggaaaccaggctgttttgtgaataaaacgaatgcatgtttgtgtcacgaaaaaaagctgg

SEQ ID NO: 431542 - DNA, 2714 bp, Homo sapiens
aggtggagggggttggggggaggagggagcggcgagtccggtccgggttttgccggcagcccccgggcagcgttcatagctcctgcccgggcgggcgcgcggcggcggcggcagaggcggctgagcctgagcggggatgtagaggcggcggcagcagaggcggcactggcggcaagagcagacgcccgagccgagcgagaagagcggcagagccttatcccctgaagccgggccccgcgtcccagccctgcccagcccgcgcccagccatgcgcgccgcctgctgagtccgggcgccgcacgctgagccctccgcccgcgagccgcgctcagctcgggggtgattagttgctttttgttgttttttaatttgggccgcggggagggggaggaggggcaggtgctgcaggctcccccccctccccgcctcgggccagccgcggcggcgcgactcgggctccggacccgggcactgctggcggctggagcggagcgcaccgcggcggtggtgcccagagcggagcgcagctccctgccccgcccctccccctcggcctcgcggcgacggcggcggtggcggcttggacgactcggagagccgagtgaagacatttccacctggacacctgaccatgtgcctgccctgagcagcgaggcccaccaggcatctctgttgtgggcagcagggccaggtcctggtctgtggaccctcggcagttggcaggctccctctgcagtggggtctgggcctcggccccaccatgtcgagcctcggcggtggctcccaggatgccggcggcagtagcagcagcagcaccaatggcagcggtggcagtggcagcagtggcccaaaggcaggagcagcagacaagagtgcagtggtggctgccgccgcaccagcctcagtggcagatgacacaccaccccccgagcgtcggaacaagagcggtatcatcagtgagcccctcaacaagagcctgcgccgctcccgcccgctctcccactactcttcttttggcagcagtggtggtagtggcggtggcagcatgatgggcggagagtctgctgacaaggccactgcggctgcagccgctgcctccctgttggccaatgggcatgacctggcggcggccatggcggtggacaaaagcaaccctacctcaaagcacaaaagtggtgctgtggccagcctgctgagcaaggcagagcgggccacggagctggcagccgagggacagctgacgctgcagcagtttgcgcagtccacagagatgctgaagcgcgtggtgcaggagcatctcccgctgatgagcgaggcgggtgctggcctgcctgacatggaggctgtggcaggtgccgaagccctcaatggccagtccgacttcccctacctgggcgctttccccatcaacccaggcctcttcattatgaccccggcaggtgtgttcctggccgagagcgcgctgcacatggcgggcctggctgagtaccccatgcagggagagctggcctctgccatcagctccggcaagaagaagcggaaacgctgcggcatgtgcgcgccctgccggcggcgcatcaactgcgagcagtgcagcagttgtaggaatcgaaagactggccatcagatttgcaaattcagaaaatgtgaggaactcaaaaagaagccttccgctgctctggagaaggtgatgcttccgacgggagccgccttccggtggtttcagtgacggcggcggaacccaaagctgccctctccgtgcaatgtcactgctcgtgtggtctccagcaagggattcgggcgaagacaaacggatgcacccgtctttagaaccaaaaatattctctcacagatttcattcctgtttttatatatatattttttgttgtcgttttaacatctccacgtccctagcataaaaagaaaaagaaaaaaatttaaactgctttttcggaagaacaacaacaaaaaagaggtaaagacgaatctataaagtaccgagacttcctgggcaaagaatggacaatcagtttccttcctgtgtcgatgtcgatgttgtctgtgcaggagatgcagtttttgtgtagagaatgtaaattttctgtaaccttttgaaatctagttactaataagcactactgtaatttagcacagtttaactccaccctcatttaaacttcctttgattctttccgaccatgaaatagtgcatagtttgcctggagaatccactcacgttcataaagagaatgttgatggcgccgtgtagaagccgctctgtatccatccacgcgtgcagagctgccagcagggagctcacagaaggggagggagcaccaggccagctgagctgcacccacagtcccgagactgggatcccccaccccaacagtgattttggaaaaaaaaatgaaagttctgttcgtttatccattgcgatctggggagccccatctcgatatttccaatcctggctacttttcttagagaaaataagtcctttttttctggccttgctaatggcaacagaagaaagggcttctttgcgtggtcccctgctggtgggggtgggtccccagggggccccctgcggcctgggcccccctgcccacggccagcttcctgctgatgaacatgctgtttgtattgttttaggaaaccaggctgttttgtgaataaaacgaatgcatgtttgtgtcacgaaaaaaagctgg

SEQ ID NO: 431543 - DNA, 2534 bp, Homo sapiens
aggtggagggggttggggggaggagggagcggcgagtccggtccgggttttgccggcagcccccgggcagcgttcatagctcctgcccgggcgggcgcgcggcggcggcggcagaggcggctgagcctgagcggggatgtagaggcggcggcagcagaggcggcactggcggcaagagcagacgcccgagccgagcgagaagagcggcagagccttatcccctgaagccgggccccgcgtcccagccctgcccagcccgcggcggcgcgactcgggctccggacccgggcactgctggcggctggagcggagcgcaccgcggcggtggtgcccagagcggagcgcagctccctgccccgcccctccccctcggcctcgcggcgacggcggcggtggcggcttggacgactcggagagccgagtgaagacatttccacctggacacctgaccatgtgcctgccctgagcagcgaggcccaccaggcatctctgttgtgggcagcagggccaggtcctggtctgtggaccctcggcagttggcaggctccctctgcagtggggtctgggcctcggccccaccatgtcgagcctcggcggtggctcccaggatgccggcggcagtagcagcagcagcaccaatggcagcggtggcagtggcagcagtggcccaaaggcaggagcagcagacaagagtgcagtggtggctgccgccgcaccagcctcagtggcagatgacacaccaccccccgagcgtcggaacaagagcggtatcatcagtgagcccctcaacaagagcctgcgccgctcccgcccgctctcccactactcttcttttggcagcagtggtggtagtggcggtggcagcatgatgggcggagagtctgctgacaaggccactgcggctgcagccgctgcctccctgttggccaatgggcatgacctggcggcggccatggcggtggacaaaagcaaccctacctcaaagcacaaaagtggtgctgtggccagcctgctgagcaaggcagagcgggccacggagctggcagccgagggacagctgacgctgcagcagtttgcgcagtccacagagatgctgaagcgcgtggtgcaggagcatctcccgctgatgagcgaggcgggtgctggcctgcctgacatggaggctgtggcaggtgccgaagccctcaatggccagtccgacttcccctacctgggcgctttccccatcaacccaggcctcttcattatgaccccggcaggtgtgttcctggccgagagcgcgctgcacatggcgggcctggctgagtaccccatgcagggagagctggcctctgccatcagctccggcaagaagaagcggaaacgctgcggcatgtgcgcgccctgccggcggcgcatcaactgcgagcagtgcagcagttgtaggaatcgaaagactggccatcagatttgcaaattcagaaaatgtgaggaactcaaaaagaagccttccgctgctctggagaaggtgatgcttccgacgggagccgccttccggtggtttcagtgacggcggcggaacccaaagctgccctctccgtgcaatgtcactgctcgtgtggtctccagcaagggattcgggcgaagacaaacggatgcacccgtctttagaaccaaaaatattctctcacagatttcattcctgtttttatatatatattttttgttgtcgttttaacatctccacgtccctagcataaaaagaaaaagaaaaaaatttaaactgctttttcggaagaacaacaacaaaaaagaggtaaagacgaatctataaagtaccgagacttcctgggcaaagaatggacaatcagtttccttcctgtgtcgatgtcgatgttgtctgtgcaggagatgcagtttttgtgtagagaatgtaaattttctgtaaccttttgaaatctagttactaataagcactactgtaatttagcacagtttaactccaccctcatttaaacttcctttgattctttccgaccatgaaatagtgcatagtttgcctggagaatccactcacgttcataaagagaatgttgatggcgccgtgtagaagccgctctgtatccatccacgcgtgcagagctgccagcagggagctcacagaaggggagggagcaccaggccagctgagctgcacccacagtcccgagactgggatcccccaccccaacagtgattttggaaaaaaaaatgaaagttctgttcgtttatccattgcgatctggggagccccatctcgatatttccaatcctggctacttttcttagagaaaataagtcctttttttctggccttgctaatggcaacagaagaaagggcttctttgcgtggtcccctgctggtgggggtgggtccccagggggccccctgcggcctgggcccccctgcccacggccagcttcctgctgatgaacatgctgtttgtattgttttaggaaaccaggctgttttgtgaataaaacgaatgcatgtttgtgtcacgaaaaaaagctgg

SEQ ID NO: 431544 - DNA, 2419 bp, Homo sapiens
cggggttcggtgcgcggccggggccggagttcgctgcaagtcggcggaaagtttggctgcgcgggttcccccgaagttcagggtcctcttgcctgcccagcttgggctgatggagacagatgtaattatggaattttgcttgggaaattaatttgaaaaagttaattaattggtggttccggaggtggcgggctccacgcccggccagtcttgctgacgtcagtgctgacccactggagacgtgcagcttccgggcaagctgggcagagggaccccggtgacctggctgggcagccctggaacagagtgaagacatttccacctggacacctgaccatgtgcctgccctgagcagcgaggcccaccaggcatctctgttgtgggcagcagggccaggtcctggtctgtggaccctcggcagttggcaggctccctctgcagtggggtctgggcctcggccccaccatgtcgagcctcggcggtggctcccaggatgccggcggcagtagcagcagcagcaccaatggcagcggtggcagtggcagcagtggcccaaaggcaggagcagcagacaagagtgcagtggtggctgccgccgcaccagcctcagtggcagatgacacaccaccccccgagcgtcggaacaagagcggtatcatcagtgagcccctcaacaagagcctgcgccgctcccgcccgctctcccactactcttcttttggcagcagtggtggtagtggcggtggcagcatgatgggcggagagtctgctgacaaggccactgcggctgcagccgctgcctccctgttggccaatgggcatgacctggcggcggccatggcggtggacaaaagcaaccctacctcaaagcacaaaagtggtgctgtggccagcctgctgagcaaggcagagcgggccacggagctggcagccgagggacagctgacgctgcagcagtttgcgcagtccacagagatgctgaagcgcgtggtgcaggagcatctcccgctgatgagcgaggcgggtgctggcctgcctgacatggaggctgtggcaggtgccgaagccctcaatggccagtccgacttcccctacctgggcgctttccccatcaacccaggcctcttcattatgaccccggcaggtgtgttcctggccgagagcgcgctgcacatggcgggcctggctgagtaccccatgcagggagagctggcctctgccatcagctccggcaagaagaagcggaaacgctgcggcatgtgcgcgccctgccggcggcgcatcaactgcgagcagtgcagcagttgtaggaatcgaaagactggccatcagatttgcaaattcagaaaatgtgaggaactcaaaaagaagccttccgctgctctggagaaggtgatgcttccgacgggagccgccttccggtggtttcagtgacggcggcggaacccaaagctgccctctccgtgcaatgtcactgctcgtgtggtctccagcaagggattcgggcgaagacaaacggatgcacccgtctttagaaccaaaaatattctctcacagatttcattcctgtttttatatatatattttttgttgtcgttttaacatctccacgtccctagcataaaaagaaaaagaaaaaaatttaaactgctttttcggaagaacaacaacaaaaaagaggtaaagacgaatctataaagtaccgagacttcctgggcaaagaatggacaatcagtttccttcctgtgtcgatgtcgatgttgtctgtgcaggagatgcagtttttgtgtagagaatgtaaattttctgtaaccttttgaaatctagttactaataagcactactgtaatttagcacagtttaactccaccctcatttaaacttcctttgattctttccgaccatgaaatagtgcatagtttgcctggagaatccactcacgttcataaagagaatgttgatggcgccgtgtagaagccgctctgtatccatccacgcgtgcagagctgccagcagggagctcacagaaggggagggagcaccaggccagctgagctgcacccacagtcccgagactgggatcccccaccccaacagtgattttggaaaaaaaaatgaaagttctgttcgtttatccattgcgatctggggagccccatctcgatatttccaatcctggctacttttcttagagaaaataagtcctttttttctggccttgctaatggcaacagaagaaagggcttctttgcgtggtcccctgctggtgggggtgggtccccagggggccccctgcggcctgggcccccctgcccacggccagcttcctgctgatgaacatgctgtttgtattgttttaggaaaccaggctgttttgtgaataaaacgaatgcatgtttgtgtcacgaaaaaaagctgg

SEQ ID NO: 431545 - DNA, 2297 bp, Homo sapiens
ggtttgatttttgccctgggaagagatgggaacagctgaaggagattggcctccgagttcccagccagcccccggaacttgggtagaacccccctacccctcatcctcgcagtagctgggtctctcccagggacgcccctagtcagccttggcctccctctccatgccacctccctttccaagagtgaagacatttccacctggacacctgaccatgtgcctgccctgagcagcgaggcccaccaggcatctctgttgtgggcagcagggccaggtcctggtctgtggaccctcggcagttggcaggctccctctgcagtggggtctgggcctcggccccaccatgtcgagcctcggcggtggctcccaggatgccggcggcagtagcagcagcagcaccaatggcagcggtggcagtggcagcagtggcccaaaggcaggagcagcagacaagagtgcagtggtggctgccgccgcaccagcctcagtggcagatgacacaccaccccccgagcgtcggaacaagagcggtatcatcagtgagcccctcaacaagagcctgcgccgctcccgcccgctctcccactactcttcttttggcagcagtggtggtagtggcggtggcagcatgatgggcggagagtctgctgacaaggccactgcggctgcagccgctgcctccctgttggccaatgggcatgacctggcggcggccatggcggtggacaaaagcaaccctacctcaaagcacaaaagtggtgctgtggccagcctgctgagcaaggcagagcgggccacggagctggcagccgagggacagctgacgctgcagcagtttgcgcagtccacagagatgctgaagcgcgtggtgcaggagcatctcccgctgatgagcgaggcgggtgctggcctgcctgacatggaggctgtggcaggtgccgaagccctcaatggccagtccgacttcccctacctgggcgctttccccatcaacccaggcctcttcattatgaccccggcaggtgtgttcctggccgagagcgcgctgcacatggcgggcctggctgagtaccccatgcagggagagctggcctctgccatcagctccggcaagaagaagcggaaacgctgcggcatgtgcgcgccctgccggcggcgcatcaactgcgagcagtgcagcagttgtaggaatcgaaagactggccatcagatttgcaaattcagaaaatgtgaggaactcaaaaagaagccttccgctgctctggagaaggtgatgcttccgacgggagccgccttccggtggtttcagtgacggcggcggaacccaaagctgccctctccgtgcaatgtcactgctcgtgtggtctccagcaagggattcgggcgaagacaaacggatgcacccgtctttagaaccaaaaatattctctcacagatttcattcctgtttttatatatatattttttgttgtcgttttaacatctccacgtccctagcataaaaagaaaaagaaaaaaatttaaactgctttttcggaagaacaacaacaaaaaagaggtaaagacgaatctataaagtaccgagacttcctgggcaaagaatggacaatcagtttccttcctgtgtcgatgtcgatgttgtctgtgcaggagatgcagtttttgtgtagagaatgtaaattttctgtaaccttttgaaatctagttactaataagcactactgtaatttagcacagtttaactccaccctcatttaaacttcctttgattctttccgaccatgaaatagtgcatagtttgcctggagaatccactcacgttcataaagagaatgttgatggcgccgtgtagaagccgctctgtatccatccacgcgtgcagagctgccagcagggagctcacagaaggggagggagcaccaggccagctgagctgcacccacagtcccgagactgggatcccccaccccaacagtgattttggaaaaaaaaatgaaagttctgttcgtttatccattgcgatctggggagccccatctcgatatttccaatcctggctacttttcttagagaaaataagtcctttttttctggccttgctaatggcaacagaagaaagggcttctttgcgtggtcccctgctggtgggggtgggtccccagggggccccctgcggcctgggcccccctgcccacggccagcttcctgctgatgaacatgctgtttgtattgttttaggaaaccaggctgttttgtgaataaaacgaatgcatgtttgtgtcacgaaaaaaagctgg

SEQ ID NO: 431546 - DNA, 2436 bp, Homo sapiens
aggtggagggggttggggggaggagggagcggcgagtccggtccgggttttgccggcagcccccgggcagcgttcatagctcctgcccgggcgggcgcgcggcggcggcggcagaggcggctgagcctgagcggggatgtagaggcggcggcagcagaggcggcactggcggcaagagcagacgcccgagccgagcgagaagagcggcagagccttatcccctgaagccgggccccgcgtcccagccctgcccagcccgcgcccagccatgcgcgccgcctgctgagtccgggcgccgcacgctgagccctccgcccgcgagccgcgctcagctcgggggtgattagttgctttttgttgttttttaatttgggccgcggggagggggaggaggggcaggtgctgcaggctcccccccctccccgcctcgggccagccgcggcggcgcgactcgggctccggacccgggcactgctggcggctggagcggagcgcaccgcggcggtggtgcccagagcggagcgcagctccctgccccgcccctccccctcggcctcgcggcgacggcggcggtggcggcttggacgactcggagagccgagtgaagacatttccacctggacacctgaccatgtgcctgccctgagcagcgaggcccaccaggcatctctgttgtgggcagcagggccaggtcctggtctgtggaccctcggcagttggcaggctccctctgcagtggggtctgggcctcggccccaccatgtcgagcctcggcggtggctcccaggatgccggcggcagtagcagcagcagctgcctccctgttggccaatgggcatgacctggcggcggccatggcggtggacaaaagcaaccctacctcaaagcacaaaagtggtgctgtggccagcctgctgagcaaggcagagcgggccacggagctggcagccgagggacagctgacgctgcagcagtttgcgcagtccacagagatgctgaagcgcgtggtgcaggagcatctcccgctgatgagcgaggcgggtgctggcctgcctgacatggaggctgtggcaggtgccgaagccctcaatggccagtccgacttcccctacctgggcgctttccccatcaacccaggcctcttcattatgaccccggcaggtgtgttcctggccgagagcgcgctgcacatggcgggcctggctgagtaccccatgcagggagagctggcctctgccatcagctccggcaagaagaagcggaaacgctgcggcatgtgcgcgccctgccggcggcgcatcaactgcgagcagtgcagcagttgtaggaatcgaaagactggccatcagatttgcaaattcagaaaatgtgaggaactcaaaaagaagccttccgctgctctggagaaggtgatgcttccgacgggagccgccttccggtggtttcagtgacggcggcggaacccaaagctgccctctccgtgcaatgtcactgctcgtgtggtctccagcaagggattcgggcgaagacaaacggatgcacccgtctttagaaccaaaaatattctctcacagatttcattcctgtttttatatatatattttttgttgtcgttttaacatctccacgtccctagcataaaaagaaaaagaaaaaaatttaaactgctttttcggaagaacaacaacaaaaaagaggtaaagacgaatctataaagtaccgagacttcctgggcaaagaatggacaatcagtttccttcctgtgtcgatgtcgatgttgtctgtgcaggagatgcagtttttgtgtagagaatgtaaattttctgtaaccttttgaaatctagttactaataagcactactgtaatttagcacagtttaactccaccctcatttaaacttcctttgattctttccgaccatgaaatagtgcatagtttgcctggagaatccactcacgttcataaagagaatgttgatggcgccgtgtagaagccgctctgtatccatccacgcgtgcagagctgccagcagggagctcacagaaggggagggagcaccaggccagctgagctgcacccacagtcccgagactgggatcccccaccccaacagtgattttggaaaaaaaaatgaaagttctgttcgtttatccattgcgatctggggagccccatctcgatatttccaatcctggctacttttcttagagaaaataagtcctttttttctggccttgctaatggcaacagaagaaagggcttctttgcgtggtcccctgctggtgggggtgggtccccagggggccccctgcggcctgggcccccctgcccacggccagcttcctgctgatgaacatgctgtttgtattgttttaggaaaccaggctgttttgtgaataaaacgaatgcatgtttgtgtcacgaaaaaaagctgg

SEQ ID NO: 431547 - DNA, 2075 bp, Homo sapiens
cggggttcggtgcgcggccggggccggagttcgctgcaagtcggcggaaagtttggctgcgcgggttcccccgaagttcagagtgaagacatttccacctggacacctgaccatgtgcctgccctgagcagcgaggcccaccaggcatctctgttgtgggcagcagggccaggtcctggtctgtggaccctcggcagttggcaggctccctctgcagtggggtctgggcctcggccccaccatgtcgagcctcggcggtggctcagtggcagatgacacaccaccccccgagcgtcggaacaagagcggtatcatcagtgagcccctcaacaagagcctgcgccgctcccgcccgctctcccactactcttcttttggcagcagtggtggtagtggcggtggcagcatgatgggcggagagtctgctgacaaggccactgcggctgcagccgctgcctccctgttggccaatgggcatgacctggcggcggccatggcggtggacaaaagcaaccctacctcaaagcacaaaagtggtgctgtggccagcctgctgagcaaggcagagcgggccacggagctggcagccgagggacagctgacgctgcagcagtttgcgcagtccacagagatgctgaagcgcgtggtgcaggagcatctcccgctgatgagcgaggcgggtgctggcctgcctgacatggaggctgtggcaggtgccgaagccctcaatggccagtccgacttcccctacctgggcgctttccccatcaacccaggcctcttcattatgaccccggcaggtgtgttcctggccgagagcgcgctgcacatggcgggcctggctgagtaccccatgcagggagagctggcctctgccatcagctccggcaagaagaagcggaaacgctgcggcatgtgcgcgccctgccggcggcgcatcaactgcgagcagtgcagcagttgtaggaatcgaaagactggccatcagatttgcaaattcagaaaatgtgaggaactcaaaaagaagccttccgctgctctggagaaggtgatgcttccgacgggagccgccttccggtggtttcagtgacggcggcggaacccaaagctgccctctccgtgcaatgtcactgctcgtgtggtctccagcaagggattcgggcgaagacaaacggatgcacccgtctttagaaccaaaaatattctctcacagatttcattcctgtttttatatatatattttttgttgtcgttttaacatctccacgtccctagcataaaaagaaaaagaaaaaaatttaaactgctttttcggaagaacaacaacaaaaaagaggtaaagacgaatctataaagtaccgagacttcctgggcaaagaatggacaatcagtttccttcctgtgtcgatgtcgatgttgtctgtgcaggagatgcagtttttgtgtagagaatgtaaattttctgtaaccttttgaaatctagttactaataagcactactgtaatttagcacagtttaactccaccctcatttaaacttcctttgattctttccgaccatgaaatagtgcatagtttgcctggagaatccactcacgttcataaagagaatgttgatggcgccgtgtagaagccgctctgtatccatccacgcgtgcagagctgccagcagggagctcacagaaggggagggagcaccaggccagctgagctgcacccacagtcccgagactgggatcccccaccccaacagtgattttggaaaaaaaaatgaaagttctgttcgtttatccattgcgatctggggagccccatctcgatatttccaatcctggctacttttcttagagaaaataagtcctttttttctggccttgctaatggcaacagaagaaagggcttctttgcgtggtcccctgctggtgggggtgggtccccagggggccccctgcggcctgggcccccctgcccacggccagcttcctgctgatgaacatgctgtttgtattgttttaggaaaccaggctgttttgtgaataaaacgaatgcatgtttgtgtcacgaaaaaaagctgg

SEQ ID NO: 431548 - DNA, 1794 bp, Homo sapiens
gcttggagaaggcaaggggttcccatgctgctatctctgcacccctgtggcagggcccgtccctgtgcccccagatgcagcaacctagctggagtgccaggcctgggtacaaaagcatcttttcagcctgcagtccctgcccttgtccccgcccctctatgagtgggcttgacgcaaatgtccagaatggttggaaaacaacagtggtatatcccagccatggcctcctggttaccctcccccaaccccagccccacccttccatttctgctctcctatgtacacacaaaggcacccactttagtccagtgtagacacacatgcacacacacatagacacggccgcttgagaaatagctcaaatacccacctcccacagctccataccacacagctcagcatagcacgaggcacacacccatatgcacacccgtcgcacgtgctcacacgctcatttacagaaacatgccacagccacctggcgctgttgcctttgggccaggggaagggacttcttctctggaaggagggttcctgggcacagtggctcaggaggcctcagagtcctcggggccttccagcagcccagcaggtcaagcgcctcctttggcctggctggggtggcaggagctccgaggggtggctgctcttcctccatgcctgtccctccgccatgaggccatccatgggggaacgtctttgctccaggcctacccggaccctgactgaactctctccttgtttttgtctcccgcccccgccagaaggtgatgcttccgacgggagccgccttccggtggtttcagtgacggcggcggaacccaaagctgccctctccgtgcaatgtcactgctcgtgtggtctccagcaagggattcgggcgaagacaaacggatgcacccgtctttagaaccaaaaatattctctcacagatttcattcctgtttttatatatatattttttgttgtcgttttaacatctccacgtccctagcataaaaagaaaaagaaaaaaatttaaactgctttttcggaagaacaacaacaaaaaagaggtaaagacgaatctataaagtaccgagacttcctgggcaaagaatggacaatcagtttccttcctgtgtcgatgtcgatgttgtctgtgcaggagatgcagtttttgtgtagagaatgtaaattttctgtaaccttttgaaatctagttactaataagcactactgtaatttagcacagtttaactccaccctcatttaaacttcctttgattctttccgaccatgaaatagtgcatagtttgcctggagaatccactcacgttcataaagagaatgttgatggcgccgtgtagaagccgctctgtatccatccacgcgtgcagagctgccagcagggagctcacagaaggggagggagcaccaggccagctgagctgcacccacagtcccgagactgggatcccccaccccaacagtgattttggaaaaaaaaatgaaagttctgttcgtttatccattgcgatctggggagccccatctcgatatttccaatcctggctacttttcttagagaaaataagtcctttttttctggccttgctaatggcaacagaagaaagggcttctttgcgtggtcccctgctggtgggggtgggtccccagggggccccctgcggcctgggcccccctgcccacggccagcttcctgctgatgaacatgctgtttgtattgttttaggaaaccaggctgttttgtgaataaaacgaatgcatgtttgtgtcacgaaaaaaagctgg

SEQ ID NO: 431549 - DNA, 709 bp, Homo sapiens
agtgattagtactagtagatagttggcaggaacattgagcttgatgtcaaacacttgctcgcatgagagtctgacgctcttcgtggtgcgagtgctcctctgagcttgctaagtcggtagatcatcataatagactctgaagaagaacttataaataaaaaaagaatcatagagaaagttattcatcgactcacacactatgatcatgttctaattgagctcacccaggctggattgaaaggctccacagagggaagtgagagctatgaagaagatccctacttggtagttaaccctaactacttgctcgaagattgagatagtgaaagtaactgaccagagctgaggaactgtggcacagcacctcgtggcctggagcctggctggagctctgctagggacagaagtgtttctggaagtgatgcttccaggatttgttttcagaaacaagaattgagttgatggtcctatgtgtcacattcatcacaggtttcataccaacacaggcttcagcacttcctttggtgtgtttcctgtcccagtgaagttggaaccaaataatgtgtagtctctataaccaatacctttgttttcatgtgtaagaaaaggcccattacttttaaggtatgtgctgtcctattgagcaaataactttttttcaattgccagctactgcttttattcatcaaaataaaataacttgttctga

SEQ ID NO: 431550 - DNA, 1411 bp, Homo sapiens
  misc_feature (1353)..(1353): n is a, c, g, or t
ggctgcaggaattcggcacgaggaaagttattcatcgactcacacactatgatcatgttctaattgagctcacccaggctggattgaaaggctccacagagggaagtgagagctatgaagaagatccctacttggtagttaaccctaactacttgctcgaagattgagatagtgaaagtaactgaccagagctgaggaactgtggcacagcacctcgtggcctggagcctggctggagctctgctagggacagaagtgtttttggaagtgatgcttccaggatttgttttcagaaacaagaattgagttgatggtcctatgtgtcacattcatcacaggtttcataccaacacaggcttcagcacttcctttggtgtgtttcctgtcccagtgaagttggaaccaaataatgtgtagtctctataaccaatacctttgttttcatgtgtaagaaaaggcccattacttttaaggtatgtgctgtcctattgagcaaataactttttttcaattgccagctactgcttttattcatcaaaataaaataacttgtctggaaaaaagcgacttgtggcggtcgagcgtggcgcaggcgaatcctcggcactaagcaaatatggacctcgcggcggcagcggagccgggcgccggcagccagcacctggaggtccgcgacgaggtggccgagaagtgccagaaactgttcctggacttcttggaggagtttcagagcagcgatggagaaattaaatacttgcaattagcagaggaactgattcgtcctgagagaaacacattggttgtgagttttgtggacctggaacaatttaaccagcaactttccaccaccattcaagaggagttctatagagtttacccttacctgtgtcgggccttgaaaacattcgtcaaagaccgtaaagagatccctcttgccaaggatttttatgttgcattccaagacctgcctaccagacacaagattcgagagctcacctcatccagaattggtttgctcactcgcatcagtgggcaggtggtgcggactcacccagttcacccagagcttgtgagcggaacttttctgtgcttggactgtcagacagtgatcagggatgtagaacagcagttcaaatacacacagccaaacatctgccgaaatccagtttgtgccaacaggaggagattcttactggatacaaataaatcaagatttgttgattttcaaaaggttcgtattcaagagacccaagctgagcttcctcgagggagtatcccccgcagtttagaagtaattttaagggctgaagctgtggaatcagctcaagctggtgacaagtgtgactttcgggncctgatgtggggcggaaagatccagttaacacgtgcctgggaataatcccggcaggga

SEQ ID NO: 431551 - DNA, 595 bp, Homo sapiens
ttcgattccaaagaaaggcttctaaagaagaccttataatataaaaaaagattcttagagaaggtaattattcgactcccaccttatgatcatgttctaattgagctcacccaggctggattgaaaggctccacagagggaagtgagagctatgaagaagatccctacttggtagttaaccctaactacttgctcgaagattgagatagtgaaagtaactgaccagagctgaggaactgtggcacagcacctcgtggcctggagcctggctggagctctgctagggacagaagtgtttctggaagtgatgcttccaggatttgttttcagaaacaagaattgagttgatggtcctatgtgtcacattcatcacaggtttcataccaacacaggcttcagcacttcctttggtgtgtttcctgtcccagtgaagttggaaccaaataatgtgtagtctctataaccaatacctttgttttcatgtgtaagaaaaggcccattacttttaaggtatgtgctgtcctattgagcaaataactttttttcaattgccagctactgcttttattcatcaaaataaaataacttgttctga

SEQ ID NO: 431552 - DNA, 454 bp, Homo sapiens
aaagtgaaaaaaatcagtattaaatgtaagtagtgtatttgtaaatgcttgacaaggggatgttaagggcacaaaaataagattcaggtggtcaatttttcacttaggtcatgctgacagccctgctcctgtgaacgggatcaatggctacaatgaagacataaatcaagagtctgctcccaaagcctccttaaggctgggcttctctgagtactgccgaatctctaaccttattgtgcttcacctcagaaaggtggaagaaggtgaggcttacctggtactgcttacatgctcggtcacttctgtaagctctgttcacataggccacttgtgattgccaaacttcgtgttgttctgtcggaagagaggataagttgttagataaactcactttagcaaagtaaatttgtggagtatcagcatacctgccagcctgaacatttcttcacaagct

SEQ ID NO: 431553 - DNA, 2956 bp, Homo sapiens
gcggaagcggcggcggcgcgcgcaaagctgcagcgtctggaaaaaagcgacttgtggcggtcgagcgtggcgcaggcgaatcctcggcactaagcaaatatggacctcgcggcggcagcggagccgggcgccggcagccagcacctggaggtccgcgacgaggtggccgagaagtgccagaaactgttcctggacttcttggaggagtttcagagcagcgatggagaaattaaatacttgcaattagcagaggaactgattcgtcctgagagaaacacattggttgtgagttttgtggacctggaacaatttaaccagcaactttccaccaccattcaagaggagttctatagagtttacccttacctgtgtcgggccttgaaaacattcgtcaaagaccgtaaagagatccctcttgccaaggatttttatgttgcattccaagacctgcctaccagacacaagattcgagagctcacctcatccagaattggtttgctcactcgcatcagtgggcaggtggtgcggactcacccagttcacccagagcttgtgagcggaacttttctgtgcttggactgtcagacagtgatcagggatgtagaacagcagttcaaatacacacagccaaacatctgccgaaatccagtttgtgccaacaggaggagattcttactggatacaaataaatcaagatttgttgattttcaaaaggttcgtattcaagagacccaagctgagcttcctcgagggagtatcccccgcagtttagaagtaattttaagggctgaagctgtggaatcagctcaagctggtgacaagtgtgactttacagggacactgattgttgtgcctgacgtctccaagcttagcacaccaggagcacgtgcagaaactaattcccgtgtcagtggtgttgatggatatgagacagaaggcattcgaggactccgggcccttggtgttagggacctttcttataggctggtctttcttgcctgctgtgttgcgccaaccaacccaaggtttggggggaaagagctcagagatgaggaacagacagctgagagcattaagaaccaaatgactgtgaaagaatgggagaaagtgtttgagatgagtcaagataaaaatctataccacaatctttgtaccagcctgttccctactatacatggcaatgatgaagtaaaacggggtgtcctgctgatgctctttggtggcgttccaaagacaacaggagaagggacctctcttcgaggggacataaatgtttgcattgttggtgacccaagtacagctaagagccaatttctcaagcacgtggaggagttcagccccagagctgtctacaccagtggtaaagcgtccagtgctgctggcttaacagcagctgttgtgagagatgaagaatctcatgagtttgtcattgaggctggagctttgatgttggctgataatggtgtgtgttgtattgatgaatttgataagatggacgtgcgggatcaagttgctattcatgaagctatggaacagcagaccatatccatcactaaagcaggagtgaaggctactctgaacgcccggacgtccattttggcagcagcaaacccaatcagtggacactatgacagatcaaaatcattgaaacagaatataaatttgtcagctcccatcatgtcccgattcgatctcttctttatccttgtggatgaatgtaatgaggttacagattatgccattgccaggcgcatagtagatttgcattcaagaattgaggaatcaattgatcgtgtctattccctcgatgatatcagaagatatcttctctttgcaagacagtttaaacccaagatttccaaagagtcagaggacttcattgtggagcaatataaacatctccgccagagagatggttctggagtgaccaagtcttcatggaggattacagtgcgacagcttgagagcatgattcgtctctctgaagctatggctcggatgcactgctgtgatgaggtccaacctaaacatgtgaaggaagctttccggttactgaataaatcaatcatccgtgtggaaacacctgatgtcaatctagatcaagaggaagagatccagatggaggtagatgagggtgctggtggcatcaatggtcatgctgacagccctgctcctgtgaacgggatcaatggctacaatgaagacataaatcaagagtctgctcccaaagcctccttaaggctgggcttctctgagtactgccgaatctctaaccttattgtgcttcacctcagaaaggtggaagaagaagaggacgagtcagcattaaagaggagcgagcttgttaactggtacttgaaggaaatcgaatcagagatagactctgaagaagaacttataaataaaaaaagaatcatagagaaagttattcatcgactcacacactatgatcatgttctaattgagctcacccaggctggattgaaaggctccacagagggaagtgagagctatgaagaagatccctacttggtagttaaccctaactacttgctcgaagattgagatagtgaaagtaactgaccagagctgaggaactgtggcacagcacctcgtggcctggagcctggctggagctctgctagggacagaagtgtttctggaagtgatgcttccaggatttgttttcagaaacaagaattgagttgatggtcctatgtgtcacattcatcacaggtttcataccaacacaggcttcagcacttcctttggtgtgtttcctgtcccagtgaagttggaaccaaataatgtgtagtctctataaccaatacctttgttttcatgtgtaagaaaaggcccattacttttaaggtatgtgctgtcctattgagcaaataactttttttcaattgccagctactgcttttattcatcaaaataaaataacttgttctga

SEQ ID NO: 431554 - DNA, 3473 bp, Homo sapiens
ggctgcaggaattcggcacgaggaaagttattcatcgactcacacactatgatcatgttctaattgagctcacccaggctggattgaaaggctccacagagggaagtgagagctatgaagaagatccctacttggtagttaaccctaactacttgctcgaagattgagatagtgaaagtaactgaccagagctgaggaactgtggcacagcacctcgtggcctggagcctggctggagctctgctagggacagaagtgtttttggaagtgatgcttccaggatttgttttcagaaacaagaattgagttgatggtcctatgtgtcacattcatcacaggtttcataccaacacaggcttcagcacttcctttggtgtgtttcctgtcccagtgaagttggaaccaaataatgtgtagtctctataaccaatacctttgttttcatgtgtaagaaaaggcccattacttttaaggtatgtgctgtcctattgagcaaataactttttttcaattgccagctactgcttttattcatcaaaataaaataacttgtctggaaaaaagcgacttgtggcggtcgagcgtggcgcaggcgaatcctcggcactaagcaaatatggacctcgcggcggcagcggagccgggcgccggcagccagcacctggaggtccgcgacgaggtggccgagaagtgccagaaactgttcctggacttcttggaggagtttcagagcagcgatggagaaattaaatacttgcaattagcagaggaactgattcgtcctgagagaaacacattggttgtgagttttgtggacctggaacaatttaaccagcaactttccaccaccattcaagaggagttctatagagtttacccttacctgtgtcgggccttgaaaacattcgtcaaagaccgtaaagagatccctcttgccaaggatttttatgttgcattccaagacctgcctaccagacacaagattcgagagctcacctcatccagaattggtttgctcactcgcatcagtgggcaggtggtgcggactcacccagttcacccagagcttgtgagcggaacttttctgtgcttggactgtcagacagtgatcagggatgtagaacagcagttcaaatacacacagccaaacatctgccgaaatccagtttgtgccaacaggaggagattcttactggatacaaataaatcaagatttgttgattttcaaaaggttcgtattcaagagacccaagctgagcttcctcgagggagtatcccccgcagtttagaagtaattttaagggctgaagctgtggaatcagctcaagctggtgacaagtgtgactttacagggacactgattgttgtgcctgacgtctccaagcttagcacaccaggagcacgtgcagaaactaattcccgtgtcagtggtgttgatggatatgagacagaaggcattcgaggactccgggcccttggtgttagggacctttcttataggctggtctttcttgcctgctgtgttgcgccaaccaacccaaggtttggggggaaagagctcagagatgaggaacagacagctgagagcattaagaaccaaatgactgtgaaagaatgggagaaagtgtttgagatgagtcaagataaaaatctataccacaatctttgtaccagcctgttccctactatacatggcaatgatgaagtaaaacggggtgtcctgctgatgctctttggtggcgttccaaagacaacaggagaagggacctctcttcgaggggacataaatgtttgcattgttggtgacccaagtacagctaagagccaatttctcaagcacgtggaggagttcagccccagagctgtctacaccagtggtaaagcgtccagtgctgctggcttaacagcagctgttgtgagagatgaagaatctcatgagtttgtcattgaggctggagctttgatgttggctgataatggtgtgtgttgtattgatgaatttgataagatggacgtgcgggatcaagttgctattcatgaagctatggaacagcagaccatatccatcactaaagcaggagtgaaggctactctgaacgcccggacgtccattttggcagcagcaaacccaatcagtggacactatgacagatcaaaatcattgaaacagaatataaatttgtcagctcccatcatgtcccgattcgatctcttctttatccttgtggatgaatgtaatgaggttacagattatgccattgccaggcgcatagtagatttgcattcaagaattgaggaatcaattgatcgtgtctattccctcgatgatatcagaagatatcttctctttgcaagacagtttaaacccaagatttccaaagagtcagaggacttcattgtggagcaatataaacatctccgccagagagatggttctggagtgaccaagtcttcatggaggattacagtgcgacagcttgagagcatgattcgtctctctgaagctatggctcggatgcactgctgtgatgaggtccaacctaaacatgtgaaggaagctttccggttactgaataaatcaatcatccgtgtggaaacacctgatgtcaatctagatcaagaggaagagatccagatggaggtagatgagggtgctggtggcatcaatggtcatgctgacagccctgctcctgtgaacgggatcaatggctacaatgaagacataaatcaagagtctgctcccaaagcctccttaaggctgggcttctctgagtactgccgaatctctaaccttattgtgcttcacctcagaaaggtggaagaagaagaggacgagtcagcattaaagaggagcgagcttgttaactggtacttgaaggaaatcgaatcagagatagactctgaagaagaacttataaataaaaaaagaatcatagagaaagttattcatcgactcacacactatgatcatgttctaattgagctcacccaggctggattgaaaggctccacagagggaagtgagagctatgaagaagatccctacttggtagttaaccctaactacttgctcgaagattgagatagtgaaagtaactgaccagagctgaggaactgtggcacagcacctcgtggcctggagcctggctggagctctgctagggacagaagtgtttctggaagtgatgcttccaggatttgttttcagaaacaagaattgagttgatggtcctatgtgtcacattcatcacaggtttcataccaacacaggcttcagcacttcctttggtgtgtttcctgtcccagtgaagttggaaccaaataatgtgtagtctctataaccaatacctttgttttcatgtgtaagaaaaggcccattacttttaaggtatgtgctgtcctattgagcaaataactttttttcaattgccagctactgcttttattcatcaaaataaaataacttgttctga

SEQ ID NO: 431555 - DNA, 3779 bp, Homo sapiens
gcggaagcggcggcggcgcgcgcaaagctgcagcgtctggaaaaaagcgacttgtggcggtcgagcgtggcgcaggcgaatcctcggcactaagcaaatatggacctcgcggcggcagcggagccgggcgccggcagccagcacctggaggtccgcgacgaggtggccgagaagtgccagaaactgttcctggacttcttggaggagtttcagagcagcgatggagaaattaaatacttgcaattagcagaggaactgattcgtcctgagagaaacacattggttgtgagttttgtggacctggaacaatttaaccagcaactttccaccaccattcaagaggagttctatagagtttacccttacctgtgtcgggccttgaaaacattcgtcaaagaccgtaaagagatccctcttgccaaggatttttatgttgcattccaagacctgcctaccagacacaagattcgagagctcacctcatccagaattggtttgctcactcgcatcagtgggcaggtggtgcggactcacccagttcacccagagcttgtgagcggaacttttctgtgcttggactgtcagacagtgatcagggatgtagaacagcagttcaaatacacacagccaaacatctgccgaaatccagtttgtgccaacaggaggagattcttactggatacaaataaatcaagatttgttgattttcaaaaggttcgtattcaagagacccaagctgagcttcctcgagggagtatcccccgcagtttagaagtaattttaagggctgaagctgtggaatcagctcaagctggtgacaagtgtgactttacagggacactgattgttgtgcctgacgtctccaagcttagcacaccaggagcacgtgcagaaactaattcccgtgtcagtggtgttgatggatatgagacagaaggcattcgaggactccgggcccttggtgttagggacctttcttataggctggtctttcttgcctgctgtgttgcgccaaccaacccaaggtttggggggaaagagctcagagatgaggaacagacagctgagagcattaagaaccaaatgactgtgaaagaatgggagaaagtgtttgagatgagtcaagataaaaatctataccacaatctttgtaccagcctgttccctactatacatggcaatgatgaagtaaaacggggtgtcctgctgatgctctttggtggcgttccaaagacaacaggagaagggacctctcttcgaggggacataaatgtttgcattgttggtgacccaagtacagctaagagccaatttctcaagcacgtggaggagttcagccccagagctgtctacaccagtggtaaagcgtccagtgctgctggcttaacagcagctgttgtgagagatgaagaatctcatgagtttgtcattgaggctggagctttgatgttggctgataatggtgtgtgttgtattgatgaatttgataagatggacgtgcgggatcaagttgctattcatgaagctatggaacagcagaccatatccatcactaaagcaggagtgaaggctactctgaacgcccggacgtccattttggcagcagcaaacccaatcagtggacactatgacagatcaaaatcattgaaacagaatataaatttgtcagctcccatcatgtcccgattcgatctcttctttatccttgtggatgaatgtaatgaggttacagattatgccattgccaggcgcatagtagatttgcattcaagaattgaggaatcaattgatcgtgtctattccctcgatgatatcagaagatatcttctctttgcaagacagtttaaacccaagatttccaaagagtcagaggacttcattgtggagcaatataaacatctccgccagagagatggttctggagtgaccaagtcttcatggaggattacagtgcgacagcttgagagcatgattcgtctctctgaagctatggctcggatgcactgctgtgatgaggtccaacctaaacatgtgaaggaagctttccggttactgaataaatcaatcatccgtgtggaaacacctgatgtcaatctagatcaagaggaagagatccagatggaggtagatgagggtgctggtggcatcaatggtcatgctgacagccctgctcctgtgaacgggatcaatggctacaatgaagacataaatcaagagtctgctcccaaagcctccttaaggctgggcttctctgagtactgccgaatctctaaccttattgtgcttcacctcagaaaggtggaagaagaagaggacgagtcagcattaaagaggagcgagcttgttaactggtacttgaaggaaatcgaatcagagatagactctgaagaagaacttataaataaaaaaagaatcatagagaaagttattcatcgactcacacactatgatcatgttctaattgagctcacccaggctggattgaaaggctccacagagggaagtgagagctatgaagaagatccctacttggtagttaaccctaactacttgctcgaagattgagatagtgaaagtaactgaccagagctgaggaactgtggcacagcacctcgtggcctggagcctggctggagctctgctagggacagaagtgtttctggaagtgatgcttccaggatttgttttcagaaacaagaattgagttgatggtcctatgtgtcacattcatcacaggtttcataccaacacaggcttcagcacttcctttggtgtgtttcctgtcccagtgaagttggaaccaaataatgtgtagtctctataaccaatacctttgttttcatgtgtaagaaaaggcccattacttttaaggtatgtgctgtcctattgagcaaataactttttttcaattgccagctactgcttttattcatcaaaataaaataacttgttctgaagttgtctattggatttctttctactgtaccctgattattacttccatctacttctgaatgtgagactttccctttttgcttaacctggagtgaagaggtagaactgtggtattatggatgaggtttctatgagaaggagtcattagagaactcatatgaaagctagaggccttagagatgactttccaaggttaattccagttgtttttttttttttttaagtttataaaagtttattatacttttttaaaattactctttagtaatttattttacttctgtgtcctaagggtaatttctcaggattgttttcaaattgcttttttaggggaaataggtcatttgctatattacaagcaatccccaaattttatggtcttccaggaaaagttattaccgtttatgatactaacagttcctgagacttagctatgatcagtatgttcatgaggtggagcagttcctgtgttgcagcttttaacaacagatggcattcattaaatcacaaagtatgttaaaggtcacaaaagcaaaataactgtctgagggctaaggcccacgtgggacagtctaatacccatgagtactcaacttgccttgatgtctgagctttccagtgcaatgtgaatttgagcagccagaaatctattagtagaaagcaagacagattaatataggttaaaacaatgatttaaatatgtttctcccaataattatctctttccctggaatcaacttgtatgaaaccttgtcaaaatgtactccacaagtatgtacaattaagtattttaaaaataaatggcaaacattaaaaacaagagt

SEQ ID NO: 431556 - DNA, 2813 bp, Homo sapiens
gcggaagcggcggcggcgcgcgcaaagctgcagcgtctggaaaaaagcgacttgtggcggtcgagcgtggcgcaggcgaatcctcggcactaagcaaatatggacctcgcggcggcagcggagccgggcgccggcagccagcacctggaggtccgcgacgaggtggccgagaagtgccagaaactgttcctggacttcttggaggagtttcagagcagcgatggagaaattaaatacttgcaattagcagaggaactgattcgtcctgagagaaacacattggttgtgagttttgtggacctggaacaatttaaccagcaactttccaccaccattcaagaggagttctatagagtttacccttacctgtgtcgggccttgaaaacattcgtcaaagaccgtaaagagatccctcttgccaaggatttttatgttgcattccaagacctgcctaccagacacaagattcgagagctcacctcatccagaattggtttgctcactcgcatcagtgggcaggtggtgcggactcacccagttcacccagagcttgtgagcggaacttttctgtgcttggactgtcagacagtgatcagggatgtagaacagcagttcaaatacacacagccaaacatctgccgaaatccagtttgtgccaacaggaggagattcttactggatacaaataaatcaagatttgttgattttcaaaaggttcgtattcaagagacccaagctgagcttcctcgagggagtatcccccgcagtttagaagtaattttaagggctgaagctgtggaatcagctcaagctggtgacaagtgtgactttacagggacactgattgttgtgcctgacgtctccaagcttagcacaccaggagcacgtgcagaaactaattcccgtgtcagtggtgttgatggatatgagacagaaggcattcgaggactccgggcccttggtgttagggacctttcttataggctggtctttcttgcctgctgtgttgcgccaaccaacccaaggtttggggggaaagagctcagagatgaggaacagacagctgagagcattaagaaccaaatgactgtgaaagaatgggagaaagtgtttgagatgagtcaagataaaaatctataccacaatctttgtaccagcctgttccctactatacatggcaatgatgaagtaaaacggggtgtcctgctgatgctctttggtggcgttccaaagacaacaggagaagggacctctcttcgaggggacataaatgtttgcattgttggtgacccaagtacagctaagagccaatttctcaagcacgtggaggagttcagccccagagctgtctacaccagtggtaaagcgtccagtgctgctggcttaacagcagctgttgtgagagatgaagaatctcatgagtttgtcattgaggctggagctttgatgttggctgataatggtgtgtgttgtattgatgaatttgataagatggacgtgcgggatcaagttgctattcatgaagctatggaacagcagaccatatccatcactaaagcaggagtgaaggctactctgaacgcccggacgtccattttggcagcagcaaacccaatcagtggacactatgacagatcaaaatcattgaaacagaatataaatttgtcagctcccatcatgtcccgattcgatctcttctttatccttgtggatgaatgtaatgaggttacagattatgccattgccaggcgcatagtagatttgcattcaagaattgaggaatcaattgatcgtgtctattccctcgatgatatcagaagatatcttctctttgcaagacagtttaaacccaagatttccaaagagtcagaggacttcattgtggagcaatataaacatctccgccagagagatggttctggagtgaccaagtcttcatggaggattacagtgcgacagcttgagagcatgattcgtctctctgaagctatggctcggatgcactgctgtgatgaggtccaacctaaacatgtgaaggaagctttccggttactgaataaatcaatcatccgtgtggaaacacctgatgtcaatctagatcaagaggaagagatccagatggaggtagatgagggtgctggtggcatcaatggtcatgctgacagccctgctcctgtgaacgggatcaatggctacaatgaagacataaatcaagagtctgctcccaaagcctccttaaggctgggcttctctgagtactgccgaatctctaaccttattgtgcttcacctcagaaaggtggaagaagaagaggacgagtcagcattaaagaggagcgagcttgttaactggtacttgaaggaaatcgaatcagagatagactctgaagaagaacttataaataaaaaaagaatcatagagaaagttattcatcgactcacacactatgatcatgttctaattgagctcacccaggctggagcctggctggagctctgctagggacagaagtgtttctggaagtgatgcttccaggatttgttttcagaaacaagaattgagttgatggtcctatgtgtcacattcatcacaggtttcataccaacacaggcttcagcacttcctttggtgtgtttcctgtcccagtgaagttggaaccaaataatgtgtagtctctataaccaatacctttgttttcatgtgtaagaaaaggcccattacttttaaggtatgtgctgtcctattgagcaaataactttttttcaattgccagctactgcttttattcatcaaaataaaataacttgttctga

SEQ ID NO: 431557 - DNA, 2927 bp, Homo sapiens
tacggctaaggtacgaggcctgggcttgtggtcgagcgtggcgcaggcgaatcctcggcactaagcaaatatggacctcgcggcggcagcggagccgggcgccggcagccagcacctggaggtccgcgacgaggtggccgagaagtgccagaaactgttcctggacttcttggaggagtttcagagcagcgatggagaaattaaatacttgcaattagcagaggaactgattcgtcctgagagaaacacattggttgtgagttttgtggacctggaacaatttaaccagcaactttccaccaccattcaagaggagttctatagagtttacccttacctgtgtcgggccttgaaaacattcgtcaaagaccgtaaagagatccctcttgccaaggatttttatgttgcattccaagacctgcctaccagacacaagattcgagagctcacctcatccagaattggtttgctcactcgcatcagtgggcaggtggtgcggactcacccagttcacccagagcttgtgagcggaacttttctgtgcttggactgtcagacagtgatcagggatgtagaacagcagttcaaatacacacagccaaacatctgccgaaatccagtttgtgccaacaggaggagattcttactggatacaaataaatcaagatttgttgattttcaaaaggttcgtattcaagagacccaagctgagcttcctcgagggagtatcccccgcagtttagaagtaattttaagggctgaagctgtggaatcagctcaagctggtgacaagtgtgactttacagggacactgattgttgtgcctgacgtctccaagcttagcacaccaggagcacgtgcagaaactaattcccgtgtcagtggtgttgatggatatgagacagaaggcattcgaggactccgggcccttggtgttagggacctttcttataggctggtctttcttgcctgctgtgttgcgccaaccaacccaaggtttggggggaaagagctcagagatgaggaacagacagctgagagcattaagaaccaaatgactgtgaaagaatgggagaaagtgtttgagatgagtcaagataaaaatctataccacaatctttgtaccagcctgttccctactatacatggcaatgatgaagtaaaacggggtgtcctgctgatgctctttggtggcgttccaaagacaacaggagaagggacctctcttcgaggggacataaatgtttgcattgttggtgacccaagtacagctaagagccaatttctcaagcacgtggaggagttcagccccagagctgtctacaccagtggtaaagcgtccagtgctgctggcttaacagcagctgttgtgagagatgaagaatctcatgagtttgtcattgaggctggagctttgatgttggctgataatggtgtgtgttgtattgatgaatttgataagatggacgtgcgggatcaagttgctattcatgaagctatggaacagcagaccatatccatcactaaagcaggagtgaaggctactctgaacgcccggacgtccattttggcagcagcaaacccaatcagtggacactatgacagatcaaaatcattgaaacagaatataaatttgtcagctcccatcatgtcccgattcgatctcttctttatccttgtggatgaatgtaatgaggttacagattatgccattgccaggcgcatagtagatttgcattcaagaattgaggaatcaattgatcgtgtctattccctcgatgatatcagaagatatcttctctttgcaagacagtttaaacccaagatttccaaagagtcagaggacttcattgtggagcaatataaacatctccgccagagagatggttctggagtgaccaagtcttcatggaggattacagtgcgacagcttgagagcatgattcgtctctctgaagctatggctcggatgcactgctgtgatgaggtccaacctaaacatgtgaaggaagctttccggttactgaataaatcaatcatccgtgtggaaacacctgatgtcaatctagatcaagaggaagagatccagatggaggtagatgagggtgctggtggcatcaatggtcatgctgacagccctgctcctgtgaacgggatcaatggctacaatgaagacataaatcaagagtctgctcccaaagcctccttaaggctgggcttctctgagtactgccgaatctctaaccttattgtgcttcacctcagaaaggtggaagaagaagaggacgagtcagcattaaagaggagcgagcttgttaactggtacttgaaggaaatcgaatcagagatagactctgaagaagaacttataaataaaaaaagaatcatagagaaagttattcatcgactcacacactatgatcatgttctaattgagctcacccaggctggattgaaaggctccacagagggaagtgagagctatgaagaagatccctacttggtagttaaccctaactacttgctcgaagattgagatagtgaaagtaactgaccagagctgaggaactgtggcacagcacctcgtggcctggagcctggctggagctctgctagggacagaagtgtttctggaagtgatgcttccaggatttgttttcagaaacaagaattgagttgatggtcctatgtgtcacattcatcacaggtttcataccaacacaggcttcagcacttcctttggtgtgtttcctgtcccagtgaagttggaaccaaataatgtgtagtctctataaccaatacctttgttttcatgtgtaagaaaaggcccattacttttaaggtatgtgctgtcctattgagcaaataactttttttcaattgccagctactgcttttattcatcaaaataaaataacttgttctga

SEQ ID NO: 431558 - DNA, 2143 bp, Homo sapiens
agctagatagaggcccgtgttaatcggccgagggttgtgcctgacgtctccaagcttagcacaccaggagcacgtgcagaaactaattcccgtgtcagtggtgttgatggatatgagacagaaggcattcgaggactccgggcccttggtgttagggacctttcttataggctggtctttcttgcctgctgtgttgcgccaaccaacccaaggtttggggggaaagagctcagagatgaggaacagacagctgagagcattaagaaccaaatgactgtgaaagaatgggagaaagtgtttgagatgagtcaagataaaaatctataccacaatctttgtaccagcctgttccctactatacatggcaatgatgaagtaaaacggggtgtcctgctgatgctctttggtggcgttccaaagacaacaggagaagggacctctcttcgaggggacataaatgtttgcattgttggtgacccaagtacagctaagagccaatttctcaagcacgtggaggagttcagccccagagctgtctacaccagtggtaaagcgtccagtgctgctggcttaacagcagctgttgtgagagatgaagaatctcatgagtttgtcattgaggctggagctttgatgttggctgataatggtgtgtgttgtattgatgaatttgataagatggacgtgcgggatcaagttgctattcatgaagctatggaacagcagaccatatccatcactaaagcaggagtgaaggctactctgaacgcccggacgtccattttggcagcagcaaacccaatcagtggacactatgacagatcaaaatcattgaaacagaatataaatttgtcagctcccatcatgtcccgattcgatctcttctttatccttgtggatgaatgtaatgaggttacagattatgccattgccaggcgcatagtagatttgcattcaagaattgaggaatcaattgatcgtgtctattccctcgatgatatcagaagatatcttctctttgcaagacagtttaaacccaagatttccaaagagtcagaggacttcattgtggagcaatataaacatctccgccagagagatggttctggagtgaccaagtcttcatggaggattacagtgcgacagcttgagagcatgattcgtctctctgaagctatggctcggatgcactgctgtgatgaggtccaacctaaacatgtgaaggaagctttccggttactgaataaatcaatcatccgtgtggaaacacctgatgtcaatctagatcaagaggaagagatccagatggaggtagatgagggtgctggtggcatcaatggtcatgctgacagccctgctcctgtgaacgggatcaatggctacaatgaagacataaatcaagagtctgctcccaaagcctccttaaggctgggcttctctgagtactgccgaatctctaaccttattgtgcttcacctcagaaaggtggaagaagaagaggacgagtcagcattaaagaggagcgagcttgttaactggtacttgaaggaaatcgaatcagagatagactctgaagaagaacttataaataaaaaaagaatcatagagaaagttattcatcgactcacacactatgatcatgttctaattgagctcacccaggctggattgaaaggctccacagagggaagtgagagctatgaagaagatccctacttggtagttaaccctaactacttgctcgaagattgagatagtgaaagtaactgaccagagctgaggaactgtggcacagcacctcgtggcctggagcctggctggagctctgctagggacagaagtgtttctggaagtgatgcttccaggatttgttttcagaaacaagaattgagttgatggtcctatgtgtcacattcatcacaggtttcataccaacacaggcttcagcacttcctttggtgtgtttcctgtcccagtgaagttggaaccaaataatgtgtagtctctataaccaatacctttgttttcatgtgtaagaaaaggcccattacttttaaggtatgtgctgtcctattgagcaaataactttttttcaattgccagctactgcttttattcatcaaaataaaataacttgttctga

SEQ ID NO: 431559 - DNA, 1757 bp, Homo sapiens
gcagatgtacgaggcagatcccgggttttaatttcagtcacggggctctgtttgagatggacatataactgttccggcttggcttgcagacccaagtacagctaagagccaatttctcaagcacgtggaggagttcagccccagagctgtctacaccagtggtaaagcgtccagtgctgctggcttaacagcagctgttgtgagagatgaagaatctcatgagtttgtcattgaggctggagctttgatgttggctgataatggtgtgtgttgtattgatgaatttgataagatggacgtgcgggatcaagttgctattcatgaagctatggaacagcagaccatatccatcactaaagcaggagtgaaggctactctgaacgcccggacgtccattttggcagcagcaaacccaatcagtggacactatgacagatcaaaatcattgaaacagaatataaatttgtcagctcccatcatgtcccgattcgatctcttctttatccttgtggatgaatgtaatgaggttacagattatgccattgccaggcgcatagtagatttgcattcaagaattgaggaatcaattgatcgtgtctattccctcgatgatatcagaagatatcttctctttgcaagacagtttaaacccaagatttccaaagagtcagaggacttcattgtggagcaatataaacatctccgccagagagatggttctggagtgaccaagtcttcatggaggattacagtgcgacagcttgagagcatgattcgtctctctgaagctatggctcggatgcactgctgtgatgaggtccaacctaaacatgtgaaggaagctttccggttactgaataaatcaatcatccgtgtggaaacacctgatgtcaatctagatcaagaggaagagatccagatggaggtagatgagggtgctggtggcatcaatggtcatgctgacagccctgctcctgtgaacgggatcaatggctacaatgaagacataaatcaagagtctgctcccaaagcctccttaaggctgggcttctctgagtactgccgaatctctaaccttattgtgcttcacctcagaaaggtggaagaagaagaggacgagtcagcattaaagaggagcgagcttgttaactggtacttgaaggaaatcgaatcagagatagactctgaagaagaacttataaataaaaaaagaatcatagagaaagttattcatcgactcacacactatgatcatgttctaattgagctcacccaggctggattgaaaggctccacagagggaagtgagagctatgaagaagatccctacttggtagttaaccctaactacttgctcgaagattgagatagtgaaagtaactgaccagagctgaggaactgtggcacagcacctcgtggcctggagcctggctggagctctgctagggacagaagtgtttctggaagtgatgcttccaggatttgttttcagaaacaagaattgagttgatggtcctatgtgtcacattcatcacaggtttcataccaacacaggcttcagcacttcctttggtgtgtttcctgtcccagtgaagttggaaccaaataatgtgtagtctctataaccaatacctttgttttcatgtgtaagaaaaggcccattacttttaaggtatgtgctgtcctattgagcaaataactttttttcaattgccagctactgcttttattcatcaaaataaaataacttgttctga

SEQ ID NO: 431560 - DNA, 1651 bp, Homo sapiens
ccagtggtaaagcgtccagtggtgtagacagctctggggctgaactcctccagtggtaaagcgtccagtgctgctggcttaacagcagctgttgtgagagatgaagaatctcatgagtttgtcattgaggctggagctttgatgttggctgataatggtgtgtgttgtattgatgaatttgataagatggacgtgcgggatcaagttgctattcatgaagctatggaacagcagaccatatccatcactaaagcaggagtgaaggctactctgaacgcccggacgtccattttggcagcagcaaacccaatcagtggacactatgacagatcaaaatcattgaaacagaatataaatttgtcagctcccatcatgtcccgattcgatctcttctttatccttgtggatgaatgtaatgaggttacagattatgccattgccaggcgcatagtagatttgcattcaagaattgaggaatcaattgatcgtgtctattccctcgatgatatcagaagatatcttctctttgcaagacagtttaaacccaagatttccaaagagtcagaggacttcattgtggagcaatataaacatctccgccagagagatggttctggagtgaccaagtcttcatggaggattacagtgcgacagcttgagagcatgattcgtctctctgaagctatggctcggatgcactgctgtgatgaggtccaacctaaacatgtgaaggaagctttccggttactgaataaatcaatcatccgtgtggaaacacctgatgtcaatctagatcaagaggaagagatccagatggaggtagatgagggtgctggtggcatcaatggtcatgctgacagccctgctcctgtgaacgggatcaatggctacaatgaagacataaatcaagagtctgctcccaaagcctccttaaggctgggcttctctgagtactgccgaatctctaaccttattgtgcttcacctcagaaaggtggaagaagaagaggacgagtcagcattaaagaggagcgagcttgttaactggtacttgaaggaaatcgaatcagagatagactctgaagaagaacttataaataaaaaaagaatcatagagaaagttattcatcgactcacacactatgatcatgttctaattgagctcacccaggctggattgaaaggctccacagagggaagtgagagctatgaagaagatccctacttggtagttaaccctaactacttgctcgaagattgagatagtgaaagtaactgaccagagctgaggaactgtggcacagcacctcgtggcctggagcctggctggagctctgctagggacagaagtgtttctggaagtgatgcttccaggatttgttttcagaaacaagaattgagttgatggtcctatgtgtcacattcatcacaggtttcataccaacacaggcttcagcacttcctttggtgtgtttcctgtcccagtgaagttggaaccaaataatgtgtagtctctataaccaatacctttgttttcatgtgtaagaaaaggcccattacttttaaggtatgtgctgtcctattgagcaaataactttttttcaattgccagctactgcttttattcatcaaaataaaataacttgttctga

SEQ ID NO: 431561 - DNA, 2364 bp, Homo sapiens
gcggaagcggcggcggcgcgcgcaaagctgcagcgtctggaaaaaagcgacttgtggcggtcgagcgtggcgcaggcgaatcctcggcactaagcaaatatggacctcgcggcggcagcggagccgggcgccggcagccagcacctggaggtccgcgacgaggtggccgagaagtgccagaaactgttcctggacttcttggaggagtttcagagcagcgatggagaaattaaatacttgcaattagcagaggaactgattcgtcctgagagaaacacattggttgtgagttttgtggacctggaacaatttaaccagcaactttccaccaccattcaagaggagttctatagagtttacccttacctgtgtcgggccttgaaaacattcgtcaaagaccgtaaagagatccctcttgccaaggatttttatgttgcattccaagacctgcctaccagacacaagattcgagagctcacctcatccagaattggtttgctcactcgcatcagtgggcaggtggtgcggactcacccagttcacccagagcttgtgagcggaacttttctgtgcttggactgtcagacagtgatcagggatgtagaacagcagttcaaatacacacagccaaacatctgccgaaatccagtttgtgccaacaggaggagattcttactggatacaaataaatcaagatttgttgattttcaaaaggttcgtattcaagagacccaagctgagcttcctcgagggagtatcccccgcagtttagaagtaattttaagggctgaagctgtggaatcagctcaagctggtgacaagtgtgactttacagggacactgattgttgtgcctgacgtctccaagcttagcacaccaggagcacgtgcagaaactaattcccgtgtcagtggtgttgatggatatgagacagaaggcattcgaggactccgggcccttggtgttagggacctttcttataggctggtctttcttgcctgctgtgttgcgccaaccaacccaaggtttggggggaaagagctcagagatgaggaacagacagctgagagcattaagaaccaaatgactgtgaaagaatgggagaaagtgtttgagatgagtcaagataaaaatctataccacaatctttgtaccagcctgttccctactatacatggcaatgatgaagtaaaacggggtgtcctgctgatgctctttggtggcgttccaaagacaacaggagaagggacctctcttcgaggggacataaatgtttgcattgttggtgacccaagtacagctaagagccaatttctcaagcacgtggaggagttcagccccagagctgtctacaccagtggtaaagcgtccagtgctgctggcttaacagcagctgttgtgagagatgaagaatctcatgagtttgtcattgaggctggagctttgatgttggctgataatggtgtgtgttgtattgatgaatttgataagatggacgtgcgggatcaagttgctattcatgaagctatggaacagcagaccatatccatcactaaagcaggagtgaaggctactctgaacgcccggacgtccattttggcagcagcaaacccaatcagtggacactatgacagatcaaaatcattgaaacagaatataaatttgtcagctcccatcatgtcccgattcgatctcttctttatccttgtggatgaatgtaatgaggttacagattatgccattgccaggcgcatagtagatttgcattcaagaattgaggaatcaattgatcgtgtctattccctcgatgatatcagaagatatcttctctttgcaagacagtttaaacccaaggtaacctacccttttgtactgggataaggtataatgggtatattaaagtggaatttaagtaagtgtgttatatggaaattaactgaacctgtcatctaccttagttcctaaattttacaactttttttttttttctggaacagcaatttgttttttcagagagggctgagaaagggaactgtaaaaaaaattctgaataattccattatttgtttggtggtaataaaaagatttgtatgggagaagagttttggataactggataatctagaacattcttttatttcaaacattactaagaacgttaaaattgtttatgcgcctaaatcaatagttgaatctttctttgaaggaaacattggattcatctaggccattatggtaaatataaattactgttttacagtgattgatgcattgtattggactaactctgttctggacccaggattcttacctggacataaacccccaaatgcttggcattttcccaaaatagggtatgaaaag

SEQ ID NO: 431562 - DNA, 1675 bp, Homo sapiens
  misc_feature (1332)..(1333): n is a, c, g, or t
  misc_feature (1401)..(1401): n is a, c, g, or t
  misc_feature (1585)..(1585): n is a, c, g, or t
gcggaagcggcggcggcgcgcgcaaagctgcagcgtctggaaaaaagcgacttgtggcggtcgagcgtggcgcaggcgaatcctcggcactaagcaaatatggacctcgcggcggcagcggagccgggcgccggcagccagcacctggaggtccgcgacgaggtggccgagaagtgccagaaactgttcctggacttcttggaggagtttcagagcagcgatggagaaattaaatacttgcaattagcagaggaactgattcgtcctgagagaaacacattggttgtgagttttgtggacctggaacaatttaaccagcaactttccaccaccattcaagaggagttctatagagtttacccttacctgtgtcgggccttgaaaacattcgtcaaagaccgtaaagagatccctcttgccaaggatttttatgttgcattccaagacctgcctaccagacacaagattcgagagctcacctcatccagaattggtttgctcactcgcatcagtgggcaggtggtgcggactcacccagttcacccagagcttgtgagcggaacttttctgtgcttggactgtcagacagtgatcagggatgtagaacagcagttcaaatacacacagccaaacatctgccgaaatccagtttgtgccaacaggaggagattcttactggatacaaataaatcaagatttgttgattttcaaaaggttcgtattcaagagacccaagctgagcttcctcgagggagtatcccccgcagtttagaagtaattttaagggctgaagctgtggaatcagctcaagctggtgacaagtgtgactttacagggacactgattgttgtgcctgacgtctccaagcttagcacaccaggagcacgtgcagaaactaattcccgtgtcagtggtgttgatggatatgagacagaaggcattcgaggactccgggcccttggtgttagggacctttcttataggctggtctttcttgcctgctgtgttgcgccaaccaacccaaggtttggggggaaagagctcagagatgaggaacagacagctgagagcattaagaaccaaatgactgtgaaagaatgggagaaagtgtttgagatgagtcaagataaaaatctataccacaatctttgtaccagcctgttccctactatacatggcaatgatgaagtaaaacggggtgtcctgctgatgctctttggtggcgttccaaagacaacaggagaagggacctctcttcgaggggacataaatgtttgcattgttggtgacccaagtacagctaagagccaatttctcaacctgtgggagccnncaaggatgagaaactgccattgtgttttaagtttccctggagcctatctgtaacaaggttcatataanactaagcaaaaaattactcttggcgctggaggcacttaagaatcctaccttgcctcttcctgtcttctggtggttgtcagtaatccttagtgttccttggcttgtagctgcattactccaatctgttgctgtcatctcatggtcctcttcgtgtctctctcatgatttgtcattggatctagangccaccctaatcaaatataacgtcattttacctaattatttccgtaacgagcttatttccaaataggggcacattctgatgtctagttgg

SEQ ID NO: 431563 - DNA, 1002 bp, Homo sapiens
atgcttttagtttctgttggcaagcattctcagaggtggtgaagcataagaagatgaagaaaagaccttcatactttgaaatcttaatagctttaagaaacatatttcttataatctcttttattaggtttctctccttatggataaaataaggcatgctttaatacaagtgatatgacttgttatttcaggcttatgctagaacattgcggaccttacgtcaccagatgtactttcggacggcttgacatttatctaatctgtacattatctcgttgtatatgtggcagagatttacccaaggactgacagtacgagttgctaggataatttgaatgtgtttttttgttgcagaagaggacgagtcagcattaaagaggagcgagcttgttaactggtacttgaaggaaatcgaatcagagatagactctgaagaagaacttataaataaaaaaagaatcatagagaaagttattcatcgactcacacactatgatcatgttctaattgagctcacccaggctggattgaaaggctccacagagggaagtgagagctatgaagaagatccctacttggtagttaaccctaactacttgctcgaagattgagatagtgaaagtaactgaccagagctgaggaactgtggcacagcacctcgtggcctggagcctggctggagctctgctagggacagaagtgtttctggaagtgatgcttccaggatttgttttcagaaacaagaattgagttgatggtcctatgtgtcacattcatcacaggtttcataccaacacaggcttcagcacttcctttggtgtgtttcctgtcccagtgaagttggaaccaaataatgtgtagtctctataaccaatacctttgttttcatgtgtaagaaaaggcccattacttttaaggtatgtgctgtcctattgagcaaataactttttttcaattgccagctactgcttttattcatcaaaataaaataacttgttctga

SEQ ID NO: 431564 - DNA, 1012 bp, Homo sapiens
  misc_feature (842)..(842): n is a, c, g, or t
  misc_feature (844)..(844): n is a, c, g, or t
gcggaagcggcggcggcgcgcgcaaagctgcagcgtctggaaaaaagcgacttgtggcggtcgagcgtggcgcaggcgaatcctcggcactaagcaaatatggacctcgcggcggcagcggagccgggcgccggcagccagcacctggaggtccgcgacgaggtggccgagaagtgccagaaactgttcctggacttcttggaggagtttcagagcagcgatggagaaattaaatacttgcaattagcagaggaactgattcgtcctgagagaaacacattggttgtgagttttgtggacctggaacaatttaaccagcaactttccaccaccattcaagaggagttctatagagtttacccttacctgtgtcgggccttgaaaacattcgtcaaagaccgtaaagagatccctcttgccaaggatttttatgttgcattccaagacctgcctaccagacacaagattcgagagctcacctcatccagaattggtttgctcactcgcatcagtgggcaggtggtgcggactcacccagttcacccagagcttgtgagcggaacttttctgtgcttggactgtcagacagtgatcagggatgtagaacagcagttcaaatacacacagccaaacatctgccgaaatccagtttgtgccaacaggaggagattcttactggatacaaataaatcaagatttgttgattttcaaaaggttcgtattcaagagacccaagctgagcttcctcgagggagtatcccccgcagtttagaagtaattttaagggctgaagctgtggaatcagctcaagctggtgacaagtgtgacttttcgggccctgngntgtgccgaggttccagttgcaccggccgtgggactatccggcggggtggggtcagacacggttcgggccggccggtggccgcttgggcgcgccgggggcccccccgtgcggcggcgtggcccggctcacccgtggggcggtggacccctcgctgtagggggtgtcacc

SEQ ID NO: 431565 - DNA, 894 bp, Homo sapiens
  misc_feature (836)..(836): n is a, c, g, or t
gcggaagcggcggcggcgcgcgcaaagctgcagcgtctggaaaaaagcgacttgtggcggtcgagcgtggcgcaggcgaatcctcggcactaagcaaatatggacctcgcggcggcagcggagccgggcgccggcagccagcacctggaggtccgcgacgaggtggccgagaagtgccagaaactgttcctggacttcttggaggagtttcagagcagcgatggagaaattaaatacttgcaattagcagaggaactgattcgtcctgagagaaacacattggttgtgagttttgtggacctggaacaatttaaccagcaactttccaccaccattcaagaggagttctatagagtttacccttacctgtgtcgggccttgaaaacattcgtcaaagaccgtaaagagatccctcttgccaaggatttttatgttgcattccaagacctgcctaccagacacaagattcgagagctcacctcatccagaattggtttgctcactcgcatcagtgggcaggtggtgcggactcacccagttcacccagagcttgtgagcggaacttttctgtgcttggactgtcagacagtgatcagggatgtagaacagcagttcaaatacacacagccaaacatctgccgaaatccagtttgtgccaacaggaggagattcttactggatacaaataaatcaagatttgttgattttcaaaaggttcgtattcaagagacccaagctgagcttcctcgagggagtatcccccgcagtttagaagtaattttaagggctgaagctgtggaatcagctcaagctggtgacaagtgtgactttcgggncctgatgtggggcggaaagatccagttaacacgtgcctgggaataatcccggcaggga

SEQ ID NO: 431566 - DNA, 1288 bp, Homo sapiens
ggctgcaggaattcggcacgaggaaagttattcatcgactcacacactatgatcatgttctaattgagctcacccaggctggattgaaaggctccacagagggaagtgagagctatgaagaagatccctacttggtagttaaccctaactacttgctcgaagattgagatagtgaaagtaactgaccagagctgaggaactgtggcacagcacctcgtggcctggagcctggctggagctctgctagggacagaagtgtttttggaagtgatgcttccaggatttgttttcagaaacaagaattgagttgatggtcctatgtgtcacattcatcacaggtttcataccaacacaggcttcagcacttcctttggtgtgtttcctgtcccagtgaagttggaaccaaataatgtgtagtctctataaccaatacctttgttttcatgtgtaagaaaaggcccattacttttaaggtatgtgctgtcctattgagcaaataactttttttcaattgccagctactgcttttattcatcaaaataaaataacttgtctggaaaaaagcgacttgtggcggtcgagcgtggcgcaggcgaatcctcggcactaagcaaatatggacctcgcggcggcagcggagccgggcgccggcagccagcacctggaggtccgcgacgaggtggccgagaagtgccagaaactgttcctggacttcttggaggagtttcagagcagcgatggagaaattaaatacttgcaattagcagaggaactgattcgtcctgagagaaacacattggttgtgagttttgtggacctggaacaatttaaccagcaactttccaccaccattcaagaggagttctataggattcgagagctcacctcatccagaattggtttgctcactcgcatcagtgggcaggtggtgcggactcacccagttcacccagagcttgtgagcggaacttttctgtgcttggactgtcagacagtgatcagggatgtagaacagcagttcaaatacacacagccaaacatctgccgaaatccagtttgtgccaacaggtttcataccaacacaggcttcagcacttcctttggtgtgtttcctgtcccagtgaagttggaaccaaataatgtgtagtctctataaccaatacctttgttttcatgtgtaagaaaaggcccattacttttaaggtatgtgctgtcctattgagcaaataactttttttcaattgccagctactgcttttattcatcaaaataaaataacttgttctga

SEQ ID NO: 431567 - DNA, 517 bp, Homo sapiens
tcctcaccggggtgaaaggttagcggaagtgtccttctttcctttttgctgtaggcccgggtggttgctgccgaaatgggcaagttcatgaaacctgggaaggtggtgcttgtcctggctggacgctactccggacgcaaagctgtcatcgtgaagaacattgatgatggcacctcagatcgcccctacagccatgctctggtggctggaattgaccgctacccccgcaaagtgacagctgccatgggcaagaagaagatcgccaagagatcaaagataaaatcttttgtgaaagtgtataactacaatcacctaatgcccacaaggtactctgtggatatccccttggacaaaactgtcgtcaataaggatgtcttcagagatcctgctcttaaacgcaaggcccgacgggaggccaaggtcaagtttgaagagagatacaagacaggcaagaacaagtggttcttccagaaactgcggttttagatgctttgttttgatcattaaaaattataaa

SEQ ID NO: 431568 - DNA, 616 bp, Homo sapiens
  misc_feature (118)..(118): n is a, c, g, or t
tcagagtctgatcttatttatttgttactcaaaaaatcttatttctgactggattcagacttagaagtagaagctcgcagagaggaaagtctgcgtctcttcgcaatttgttcctggngcttctccttagcctccttcattctcttggcccgggtggttgctgccgaagaaatgggcaagttcatgaaacctgggaaggtggtgcttgtcctggctggacgctactccggacgcaaagctgtcatcgtgaagaagaacattgatgatggcacctcagatcgcccctacagccatgctctggtggctggaattgaccgctacccccgcaaagtgacagctgccatgggcaagaagaagatcgccaagagatcaaagataaaatcttttgtgaaagtgtataactacaatcacctaatgcccacaaggtactctgtggatatccccttggacaaaactgtcgtcaataaggatgtcttcagagatcctgctcttaaacgcaaggcccgacgggaggccaaggtcaagtttgaagagagatacaagacaggcaagaacaagtggttcttccagaaactgcggttttagatgctttgttttgatcattaaaaattataaa

SEQ ID NO: 431569 - DNA, 729 bp, Homo sapiens
ccaacgaaatatgtacgaggacggcaccggtttttattcatccgcgggctggctgtttcgttgaagtgactgtgcgctggcgtacgataccatccctaggtctctggcggctacgtatccgatcctgtcctgcgagcagggccctcgggcggccttgaccaaggcgacagtgaacacagtctgaagttccggcccaagacctgggcttgctggcaggagtcagctctgggcatctttggctttacggatttttaagtggccctttctccttgctctctgcagaaatgggcaagttcatgaaacctgggaaggtggtgcttgtcctggctggacgctactccggacgcaaagctgtcatcgtgaagaagaacattgatgatggcacctcagatcgcccctacagccatgctctggtggctggaattgaccgctacccccgcaaagtgacagctgccatgggcaagaagaagatcgccaagagatcaaagataaaatcttttgtgaaagtgtataactacaatcacctaatgcccacaaggtactctgtggatatccccttggacaaaactgtcgtcaataaggatgtcttcagagatcctgctcttaaacgcaaggcccgacgggaggccaaggtcaagtttgaagagagatacaagacaggcaagaacaagtggttcttccagaaactgcggttttagatgctttgttttgatcattaaaaattataaa

SEQ ID NO: 431570 - DNA, 523 bp, Homo sapiens
tcctcaccggggtgaaaggttagcggaagtgtccttctttcctttttgctgtaggcccgggtggttgctgccgaagaaatgggcaagttcatgaaacctgggaaggtggtgcttgtcctggctggacgctactccggacgcaaagctgtcatcgtgaagaagaacattgatgatggcacctcagatcgcccctacagccatgctctggtggctggaattgaccgctacccccgcaaagtgacagctgccatgggcaagaagaagatcgccaagagatcaaagataaaatcttttgtgaaagtgtataactacaatcacctaatgcccacaaggtactctgtggatatccccttggacaaaactgtcgtcaataaggatgtcttcagagatcctgctcttaaacgcaaggcccgacgggaggccaaggtcaagtttgaagagagatacaagacaggcaagaacaagtggttcttccagaaactgcggttttagatgctttgttttgatcattaaaaattataaa

SEQ ID NO: 431571 - DNA, 439 bp, Homo sapiens
tcctcaccggggtgaaaggttagcggaagtgtccttctttcctttttgctgtaggcccgggtggttgctgccgaaaagaacattgatgatggcacctcagatcgcccctacagccatgctctggtggctggaattgaccgctacccccgcaaagtgacagctgccatgggcaagaagaagatcgccaagagatcaaagataaaatcttttgtgaaagtgtataactacaatcacctaatgcccacaaggtactctgtggatatccccttggacaaaactgtcgtcaataaggatgtcttcagagatcctgctcttaaacgcaaggcccgacgggaggccaaggtcaagtttgaagagagatacaagacaggcaagaacaagtggttcttccagaaactgcggttttagatgctttgttttgatcattaaaaattataaa

SEQ ID NO: 431572 - DNA, 947 bp, Homo sapiens
ggtgttctgttatttacctgaagtgctgcagctgggaatctgtaagaagaggaggaaattgcttttagaaaggtcacatagcccctcactgttttcctcttatccatgattttgtagcttcttgagagagttccctaggctctggccacatacaccactgcgttttgttgttgtggggacactggagtacccctggattcccctctcccatctcctgagactgatctctggagttaggctgtggtgtcttaaccttggctgtacacttcactagcagtggagcaagtgaatagataccaagtcctgtgagcagtgcttggcatatagcaagtacttcttaaatgttaactgttgctacttttaaatctcttacctctagtaagccgttccagatgcttcctgatggagataaacactgttctgtttctctttggtcatttctcatagctttctgtgatttttctctttataatggtggatcttggagacctgagggtggaaatattttttggacactgcactacctctaacacagggcctaaataggccctcagtgaataacaaatgtaattcttactcatttaagaacattgatgatggcacctcagatcgcccctacagccatgctctggtggctggaattgaccgctacccccgcaaagtgacagctgccatgggcaagaagaagatcgccaagagatcaaagataaaatcttttgtgaaagtgtataactacaatcacctaatgcccacaaggtactctgtggatatccccttggacaaaactgtcgtcaataaggatgtcttcagagatcctgctcttaaacgcaaggcccgacgggaggccaaggtcaagtttgaagagagatacaagacaggcaagaacaagtggttcttccagaaactgcggttttagatgctttgttttgatcattaaaaattataaa

SEQ ID NO: 431573 - DNA, 380 bp, Homo sapiens
gcggccgcctactactactactgctcgaattcaagcttctaacgatgtacggggacatgctctggtggctggaattgaccgctacccccgcaaagtgacagctgccatgggcaagaagaagatcgccaagagatcaaagataaaatcttttgtgaaagtgtataactacaatcacctaatgcccacaaggtactctgtggatatccccttggacaaaactgtcgtcaataaggatgtcttcagagatcctgctcttaaacgcaaggcccgacgggaggccaaggtcaagtttgaagagagatacaagacaggcaagaacaagtggttcttccagaaactgcggttttagatgctttgttttgatcattaaaaattataaa

SEQ ID NO: 431574 - DNA, 760 bp, Homo sapiens
  misc_feature (26)..(26): n is a, c, g, or t
  misc_feature (31)..(31): n is a, c, g, or t
  misc_feature (36)..(36): n is a, c, g, or t
  misc_feature (572)..(573): n is a, c, g, or t
ccggccgcgcgacacggctgcgagangacgncaganggggagtgtccccctgctgtaggcccgggtggttgctgccgaaatgggcaagttcatgaaacctgggaaggtggtgcttgtcctggctggacgctactccggacgcaaagctgtcatcgtgaagaagaacattgatgatggcacctcagatcgcccctacagccatgctctggtggctggaattgaccgctacccccgcaaagtgacagctgccatgggcaagaagaagatcgccaagagatcaaagataaaatcttttgtgaaagtgtataactacaatcacctaatgcccacaaggtactctgtggatatccccttggacaaaactgtcgtcaataaggatgtcttcagagatcctgctcttaaacgcaaggcccgacgggaggccaaggtcaagtttgaagagagatacaagacaggcaagaacaagtggttcttccagaaactgcggttttagatgctttgttttgatcattaaaaattataaagaaacaaaaaaaaaaaaaaaaaaaaaatttggggggggctggggcctnngaaaaggtttttcaaacacccttccgtgtggcgggggggccccatttggtagtgaacactggggcaagacgggccaaggaaaccgcgccgactaggcgtggttctcacaaaaaaacgcggggacacagcgtttgaaacccgagggtcggggctaggtcctaacgggcaggacgttaccgcccgggga

SEQ ID NO: 431575 - DNA, 1108 bp, Homo sapiens
gcccttcaagggtatgagccccaggtatatgcccccctttgttgttgtgtttgtgtgtgtgttttgaagaatcggagcctgggtggcctaaaccacttgggggttcagatcctccgttttgtctaagattaagaaacggttcttcagaattttgttaagttgggggcaacccatataggccccccagttaatggaggttccttcaactattaggacttttcgcttcgaagcgaaggctttcctcagatgcatgaaaattgattaatattgactgcctgttagagaaatgaatgagcctacagatgataggatgtttcatgtggtgtatgcatcggggtagtccgagtaacgtcggggcattccggatagccgagaaagtgttgtgggaagaaagttagatttacgccgatgaatatgatagtgaaatggatttttgctgtaggcccgggtggttgctgccgaaatgggcaagttcatgaaacctgggaaggtggtgcttgtcctggctggacgctactccggacgcaaagctgtcatcgtgaagaagaacattgatgatggcacctcagatcgcccctacagccatgctctggtggctggaattgaccgctacccccgcaaagtgacagctgccatgggcaagaagaagatcgccaagagatcaaagataaaatcttttgtgaaagtgtataactacaatcacctaatgcccacaaggtactctgtggatatccccttggacaaaactgtcgtcaataaggatgtcttcagagatcctgctcttaaacgcaaggcccgacgggaggccaaggtcaagtttgaagagagatacaagacaggcaagaacaagtggttcttccagaaactgcggttttagatgctttgttttgatcattaaaaattataaagaaaaaaaaaaaaaaaaaaaaaaaaaaaaaaaaaaaaaaaaaaaaaaaaaaagaaaaagaaaaaagaaggagagagagaaaaggaggaagcgaaaacacgaagcaaagacagacggacaaaagagcaaaaaaaaaagaccgcggagagaaaaaggagacgcacaacgaaagagaagggggggaggaaaagaaacaaacag

SEQ ID NO: 431576 - DNA, 554 bp, Homo sapiens
tcctcaccggggtgaaaggttagcggaagtgtccttctttcctttttgctgtaggcccgggtggttgctgccgaagaaatgggcaagttcatgaaacctgggaaggtggtgcttgtcctggctggacgctactccggacgcaaagctgtcatcgtgaagaagaacattgatgatggcacctcagatcgcccctacagccatgctctggtggctggaattgaccgctacccccgcaaagtgacagctgccatgggcaagaagaagatcgccaagagatcaaagataaaatcttttgtgaaagtgtataactacaatcacctaatgcccacaaggtactctgtggatatccccttggacaaaactgtcgtcaataaggatgtcttcagagatcctgctcttaaacgcaaggcccgacgggaggccaaggtcaagtttgaagagagatacaagacaggcaagaacaagtggttcttccagaaactgcggttttagatgctttgttttgatcattaaaaattataaaaaaaaaaacatttcttaaaaaaaaaatatgt

SEQ ID NO: 431577 - DNA, 705 bp, Homo sapiens
  misc_feature (527)..(527): n is a, c, g, or t
tcctcaccggggtgaaaggttagcggaagtgtccttctttcctttttgctgtaggcccgggtggttgctgccgaagaaatgggcaagttcatgaaacctgggaaggtggtgcttgtcctggctggacgctactccggacgcaaagctgtcatcgtgaagaagaacattgatgatggcacctcagatcgcccctacagccatgctctggtggctggaattgaccgctacccccgcaaagtgacagctgccatgggcaagaagaagatcgccaagagatcaaagataaaatcttttgtgaaagtgtataactacaatcacctaatgcccacaaggtactctgtggatatccccttggacaaaactgtcgtcaataaggatgtcttcagagatcctgctcttaaacgcaaggcccgacgggaggccaaggtcaagtttgaagagagatacaagacaggcaagaacaagtggttcttccagaaactgcggttttagatgctttgttttgatcattaaaaattataaatagnaaaaaaaataacaaacctttgtaataatgttggggcgcctttggcccaagctattttataatattagcaaaggttttatctgtgcggcgcaaatttgggcctatttgtgccaattgccccttatagggagggtattacaaatacttgggcccgggtttataaacaccggggagggtga

SEQ ID NO: 431578 - DNA, 1032 bp, Homo sapiens
gcctcctgcgcgtactccacttggaagaggtggccctcgggcgagaaagcggtgatggcgcggtcgtagctcattccggcggcggcggccgggctccttccgccgcgactttccaaagcgcacactcacggcctgcgcgcacccgcgactcccggggcccatacgcccgcgccccaacccttggggccgtgtcctgcgctgtccggctgccgaaatgggcaagttcatgaaacctgggaaggtggtgcttgtcctggctggacgctactccggacgcaaagctgtcatcgtgaagaagaacattgatgatggcacctcagatcgcccctacagccatgctctggtggctggaattgaccgctacccccgcaaagtgacagctgccatgggcaagaagaagatcgccaagagatcaaagataaaatcttttgtgaaagtgtataactacaatcacctaatgcccacaaggtactctgtggatatccccttggacaaaactgtcgtcaataaggatgtcttcagagatcctgctcttaaacgcaaggcccgacgggaggccaaggtcaagtttgaagagagatacaagacaggcaagaacaagtggttcttccagaaactgcggttttagatgctttgttttgatcattaaaaattataaagaaaaactaaacacagcagaaaacaacacaaaaaacacgtgtgttgggcggccgcggggcctcgagaaaagttttcaaacaacaaactggttgggggcgcggggccccacgcgggcaacagcgcacacgcgggggctcaacagcggtggtcccccaaaagagaaaaccggcggggcagagaaacaaagcgggcccgcgggcgaattcctcacaccagttagaaacaacgcccgcgcggggaaccagcggaggcgtttcggaacacaaaaatccacagaaagagcggatccggagggacccatagcgcgggcccatcaacacggggtgtcccaaggggaactctgctaaatacaaagtaagccgcgcgcggggc

SEQ ID NO: 431579 - DNA, 579 bp, Homo sapiens
  misc_feature (54)..(54): n is a, c, g, or t
  misc_feature (78)..(79): n is a, c, g, or t
  misc_feature (99)..(99): n is a, c, g, or t
  misc_feature (557)..(557): n is a, c, g, or t
  misc_feature (562)..(562): n is a, c, g, or t
  misc_feature (564)..(564): n is a, c, g, or t
aagagtggtatcaacacagagggcccattacggccgggaagagtggtatcaacncagagtgcccattacggccgggannagtggtatcaacgcagagtngccattacggccggggcctttttgctgtaggcccgggtggttgctgccgaaatgggcaagttcatgaaacctgggaaggtggtgcttgtcctggctggacgctactccggacgcaaagctgtcatcgtgaagaagaacattgatgatggcacctcagatcgcccctacagccatgctctggtggctggaattgaccgctacccccgcaaagtgacagctgccatgggcaagaagaagatcgccaagagatcaaagataaaatcttttgtgaaagtgtataactacaatcacctaatgcccacaaggtactctgtggatatccccttggacaaaactgtcgtcaataaggatgtcttcagagatcctgctcttaaacgcaaggcccgacgggaggccaaggtcaagtttgaagagagatacaagacaggcaagaacaagtggttcttccagaactgctnatcangncttgttgtcataata

SEQ ID NO: 431580 - DNA, 464 bp, Homo sapiens
  misc_feature (1)..(1): n is a, c, g, or t
  misc_feature (408)..(408): n is a, c, g, or t
  misc_feature (440)..(440): n is a, c, g, or t
ngggcagcatggaatttgggcacgagccgaaatgggcaagttcatgaaacctgggaaggtggtgcttgtcctggctggacgctactccggacgcaaagctgtcatcgtgaagaagaacattgatgatggcacctcagatcgcccctacagccatgctctggtggctggaattgaccgctacccccgcaaagtgacagctgccatgggcaagaagaagatcgccaagagatcaaagataaaatcttttgtgaaagtgtataactacaatcacctaatgcccacaaggtactctgtggatatccccttggacaaaactgtcgtcaataaggatgtcttcagagatcctgctcttaaacgcaaggcccgacgggaggccaaggtcaagtttgaagaggaggaggtaccaanggtcaaggcaatgtccaaagtgggttctttcnagaaaccttgtggttttttagggt

SEQ ID NO: 431581 - DNA, 920 bp, Homo sapiens
tcctcaccggggtgaaaggttagcggaagtgtccttctttcctttttgctgtaggcccgggtggttgctgccgaaagtagaagcttgggttgaatctttcaatctgctgccatccgcggcttgggggtcgaaggtccgggcggcgccgggtgcattccttccctaggtctctggcggctacgtatccgatcctgtcctgcgagcagggccctcgggcggccttgaccaaggcgacagtgaacacagtctgaagttccggcccaagacctgggcttgctggcaggagtcagctctgggcatctttggctttacggatttttaagtggccctttctccttgctctctgcagaaatgggcaagttcatgaaacctgggaaggtggtgcttgtcctggctggacgctactccggacgcaaagctgtcatcgtgaaggtatcagcctcgcgggactctgcgtccttgcatgccgggaccaggctggctgcggcggggcgggcaggcttggaattcaaggcctgtttctggggcagtagccagtgagcacggtcagggtgaacgtgggagagcttttgagagaggaagaagcacagtaaaagcaaatgtgagctgaattgggctcccaacgcataaagccttctccaccagaggctttaaatatatagtaatagtggctgacattgcacgcttgctatgtgctcccactgcctttcaggtattgtcatgtgcagtccttgaagtaatcataggggattccttttcttttcttttcttttctttttttgagacgggatctctgtccaggctaagtgcagtggcgtgatcactgcagcctcgacctcccgggctcaagcgagtctcccatctcagcctctcgagtggctgggactacaggtgcgtgccaccatcccagctataggggg

SEQ ID NO: 431582 - DNA, 273 bp, Homo sapiens
  misc_feature (22)..(22): n is a, c, g, or t
gctactactactactaaattcncggccggtcgacgtgaaagtgtataactacaatcacctaatgcccacaaggtactctgtggatatccccttggacaaaactgtcgtcaataaggatgtcttcagagatcctgctcttaaacgcaaggcccgacgggaggccaaggtcaagtttgaagagagatacaagacaggcaagaacaagtggttcttccagaaactgcggtttactgcggttttagatgctttgttttgatcattaaaaattataaa

SEQ ID NO: 431583 - DNA, 277 bp, Homo sapiens
ggagtttcccacaccacacccacaaaccatttcttgttgactcgcgcgaagccttttgggcaaaactgtcgtcaataaggatgtcttcagagatcctgctcttaaacgcaaggcccgacgggaggccaaggtcaagtttgaagagagatacaagacaggcaagaacaagtggttcttccagaaactgcggtttactgcggttttagatgctttgttttgatcattaaaaattataaagacaaacacacaacattggcctctttggcctttgtggttt

SEQ ID NO: 431584 - DNA, 259 bp, Homo sapiens
  misc_feature (22)..(22): n is a, c, g, or t
gctactactactactaaattcncggccggtcgacgtgaaagtgtataactacaatcacctaatgcccacaaggtactctgtggatatccccttggacaaaactgtcgtcaataaggatgtcttcagagatcctgctcttaaacgcaaggcccgacgggaggccaaggtcaagtttgaagagagatacaagacaggcaagaacaagtggttcttccagaaactgcggtttcacaaaagattttatcgtcgacgcggccgc

SEQ ID NO: 431585 - DNA, 834 bp, Homo sapiens
tcctcaccggggtgaaaggttagcggaagtgtccttctttcctttttgctgtaggcccgggtggttgctgccgaaatgggcaagttcatgaaacctgggaaggtggtgcttgtcctggctggacgctactccggacgcaaagctgtcatcgtgaagaacattgatgatggcacctcagatcgcccctacagccatgctctggtggctggaattgaccgctacccccgcaaagtgacagctgccatgggcaagaagaagatcgccaagagatcaaagataaaatcttttgtgaaagtgtataactacaatcacctaatgcccacaaggtactctgtggatatccccttggacaaaactgtcgtcaataaggatgtcttcagagatcctgctcttaaacgcaaggcccgacgggaggccaaggtcaagtttgaagagagatacaagacaggcaagaacaagtggttcttccagaaactgcggttttagatgctttgttttgatcattaaaaattataaagaacaaaaacaaaaacacacaaacaaaaaaaaaagaaacaaaaaaaaaaaaaaaaaaaaaagggggggggcaaaaaatacagggaggaccccagcacaagagcagaccccacacttgcggcgacaaaagggggcccactcaaaaagggcggcacgtgaacaaacaacaagacaagccgcgcgccgaacactagacacccgcggacggacagaaccagacgaacgcagggagcagcaggtggaggacacaaaatacgcggggagggaccacgagggcaacaacacacacacgaactgacaagcgcagcgcagaaaaga

SEQ ID NO: 431586 - DNA, 1414 bp, Homo sapiens
tcctcaccggggtgaaaggttagcggaagtgtccttctttcctttttgctgtaggcccgggtggttgctgccgaaatgggcaagttcatgaaacctgggaaggtggtgcttgtcctggctggacgctactccggacgcaaagctgtcatcgtgaagaacattgatgatggcacctcagatcgcccctacagccatgctctggtggctggaattgaccgctacccccgcaaagtgacagctgccatgggcaagaagaagatcgccaagagatcaaagataaaatcttttgtgaaagtgtataactacaatcacctaatgcccacaaggtactctgtggatatccccttggacaaaactgtcgtcaataaggatgtcttcagagatcctgctcttaaacgcaaggcccgacgggaggccaaggtcaagtttgaagagagatacaagacaggcaagaacaagtggttcttccagaaactgcggttttagatgctttgttttgatcattaaaaattataaagaaaaaaaaaaaaaaaaaaaaaaaaaaaaaaaaaaaaaaaaaaaaaaaaaaaaaaaaaaaacaaaaaaaaaaaaataaaaaaaaaaaaaaaaaaaaaaaaaaaaaaacggggggggaatccaatggcgcgggggcgcgcggaaaaacggggtcacgcaaagtgggccaatgggccaaaaggcagtgtacccgagaacccaagtttcctgggtgcacaaaggggcgacaaaatctgcgcaggagacacaccctataaagagaagagcgcatatatacacttccgaaataacgcacggggttacccgggcttatgaatcccgtcgaaacaaaaccaagacaccaacaaccaaacaccacacaaaaaaccacccgcggacgaccaccaacaacgacaacgaccacaaaacaagatgacgacaacagaaccaaagcacacaaacacacaacacacaacccacccaccgaaaacacccgcaccacacacgcaacccaacaacaaaactacacacaacacacaacactacacaggatcaagccaacgaccaactgagagaagcatcacaagcagccaacaagcacaacagcggccaccgcagacacgaagagaagcacgagcgacgggcagagcagctgaggacaccaacctagaggaaaaacaacgaagaagatagcgccaggcgcgaggacaagacgagacggagaaaggaagaaaaagagaaaagaaagacgacgacacgacgaacacgcagaacagaagcaggagggaggaagaccaaggaaaccacgaaaagcaaaagacgaagcgagaaggagcgaagacaaggggcgacggaagaagccagagggagacgcgcgcacgacacacgaaacacgagcgagacggagagaagaagatga

SEQ ID NO: 431587 - DNA, 890 bp, Homo sapiens
tcctcaccggggtgaaaggttagcggaagtgtccttctttcctttttgctgtaggcccgggtggttgctgccgaaatgggcaagttcatgaaacctgggaaggtggtgcttgtcctggctggacgctactccggacgcaaagctgtcatcgtgaagaacattgatgatggcacctcagatcgcccctacagccatgctctggtggctggaattgaccgctacccccgcaaagtgacagctgccatgggcaagaagaagatcgccaagagatcaaagataaaatcttttgtgaaagtgtataactacaatcacctaatgcccacaaggtactctgtggatatccccttggacaaaactgtcgtcaataaggatgtcttcagagatcctgctcttaaacgcaaggcccgacgggaggccaaggtcaagtttgaagagagatacaagacaggcaagaacaagtggttcttccagaaactgcggttttagatgctttgttttgatcattaaaaattataaagaaaaactaaacacagcagaaaacaacacaaaaaacacgtgtgttgggcggccgcggggcctcgagaaaagttttcaaacaacaaactggttgggggcgcggggccccacgcgggcaacagcgcacacgcgggggctcaacagcggtggtcccccaaaagagaaaaccggcggggcagagaaacaaagcgggcccgcgggcgaattcctcacaccagttagaaacaacgcccgcgcggggaaccagcggaggcgtttcggaacacaaaaatccacagaaagagcggatccggagggacccatagcgcgggcccatcaacacggggtgtcccaaggggaactctgctaaatacaaagtaagccgcgcgcggggc

SEQ ID NO: 431588 - DNA, 554 bp, Homo sapiens
tcctcaccggggtgaaaggttagcggaagtgtccttctttcctttttgctgtaggcccgggtggttgctgccgaaatgggcaagttcatgaaacctgggaaggtggtgcttgtcctggctggacgctactccggacgcaaagctgtcatcgtgaagaacattgatgatggcacctcagatcgcccctacagccatgctctggtggctggaattgaccgctacccccgcaaagtgacagctgccatgggcaagaagaagatcgccaagagatcaaagataaaatcttttgtgaaagtgtataactacaatcacctaatgcccacaaggtactctgtggatatccccttggacaaaactgtcgtcaataaggatgtcttcagagatcctgctcttaaacgcaaggcccgacgggaggccaaggtcaagtttgaagagagatacaagacaggcaagaacaagtggttcttccagaaactgcggttttagatgctttgttttgatcattaaaaattataaaacagagaaacaccctggggggtcttcggggggggcgc

SEQ ID NO: 431589 - DNA, 789 bp, Homo sapiens
tcctcaccggggtgaaaggttagcggaagtgtccttctttcctttttgctgtaggcccgggtggttgctgccgaaatgggcaagttcatgaaacctgggaaggtggtgcttgtcctggctggacgctactccggacgcaaagctgtcatcgtgaagaacattgatgatggcacctcagatcgcccctacagccatgctctggtggctggaattgaccgctacccccgcaaagtgacagctgccatgggcaagaagaagatcgccaagagatcaaagataaaatcttttgtgaaagtgtataactacaatcacctaatgcccacaaggtactctgtggatatccccttggacaaaactgtcgtcaataaggatgtcttcagagatcctgctcttaaacgcaaggcccgacgggaggccaaggtcaagtttgaagagagatacaagacaggcaagaacaagtggttcttccagaaactgcggttttagatgctttgttttgatcattaaaaattataaagaagaaaaaaaaaaaaaaaggggcggcccggatacacactcgaattctttgaagatccgagtgtgattggacatcctgcgatttttcccccctgctaactgttacctctattttaattacggtataaataggttactattctgcgattccttactgactttgcatttcgctttttacacaggcgtgtctcacttcttacgcggtttacataacacttatttcccactggtcacaacaaaaacccacacacaaaacaaacacaaaaaaaaaac

SEQ ID NO: 431590 - DNA, 1149 bp, Homo sapiens
ggcacgagctggctctttaatgggaaatgggaggaagggctgtccgcacaggaatggggttaggctgtcagaagcgcagccccctgcgggctaagtcggctcgggcctcctgtatctggctctgcagctcgcgtgcggcgtcctcgcagtcatgaaaagtggccacacgatagcccacagtgcccagggcatagcagccggcggacaccagcaagtaggcgggcagtggccacaggacttcctggcaggacaagggcagctccaggcccaaggctcccgtggtcagggccacccaggtggagcccaggatcgctagtccccaaagccactgcgctaatttcgtcatggtcactgcgagagaaggaagcaatgctcccctctaccccacgtctccccttccccgcgcggcccgggtggttgctgccgaaagtagaagcttgggttgaatctttcaatctgctgccatccgcggcttgggggtcgaaggtccgggcggcgccgggtgcattccttccctaggtctctggcggctacgtatccgatcctgtcctgcgagcagggccctcgggcggccttgaccaaggcgacagtgaacacagtctgaagttccggcccaagacctgggcttgctggcaggagtcagctctgggcatctttggctttacggatttttaagtggccctttctccttgctctctgcagaaatgggcaagttcatgaaacctgggaaggtggtgcttgtcctggctggacgctactccggacgcaaagctgtcatcgtgaagaagaacattgatgatggcacctcagatcgcccctacagccatgctctggtggctggaattgaccgctacccccgcaaagtgacagctgccatgggcaagaagaagatcgccaagagatcaaagataaaatcttttgtgaaagtgtataactacaatcacctaatgcccacaaggtactctgtggatatccccttggacaaaactgtcgtcaataaggatgtcttcagagatcctgctcttaaacgcaaggcccgacgggaggccaaggtcaagtttgaagagagatacaagacaggcaagaacaagtggttcttccagaaactgcggttttagatgctttgttttgatcattaaaaattataaa

SEQ ID NO: 431591 - DNA, 908 bp, Homo sapiens
gcccttcaagggtatgagccccaggtatatgcccccctttgttgttgtgtttgtgtgtgtgttttgaagaatcggagcctgggtggcctaaaccacttgggggttcagatcctccgttttgtctaagattaagaaacggttcttcagaattttgttaagttgggggcaacccatataggccccccagttaatggaggttccttcaactattaggacttttcgcttcgaagcgaaggctttcctcagatgcatgaaaattgattaatattgactgcctgttagagaaatgaatgagcctacagatgataggatgtttcatgtggtgtatgcatcggggtagtccgagtaacgtcggggcattccggatagccgagaaagtgttgtgggaagaaagttagatttacgccgatgaatatgatagtgaaatggatttttgctgtaggcccgggtggttgctgccgaaatgggcaagttcatgaaacctgggaaggtggtgcttgtcctggctggacgctactccggacgcaaagctgtcatcgtgaagaagaacattgatgatggcacctcagatcgcccctacagccatgctctggtggctggaattgaccgctacccccgcaaagtgacagctgccatgggcaagaagaagatcgccaagagatcaaagataaaatcttttgtgaaagtgtataactacaatcacctaatgcccacaaggtactctgtggatatccccttggacaaaactgtcgtcaataaggatgtcttcagagatcctgctcttaaacgcaaggcccgacgggaggccaaggtcaagtttgaagagagatacaagacaggcaagaacaagtggttcttccagaaactgcggttttagatgctttgttttgatcattaaaaattataaa

SEQ ID NO: 431592 - DNA, 595 bp, Homo sapiens
  misc_feature (54)..(54): n is a, c, g, or t
  misc_feature (78)..(79): n is a, c, g, or t
  misc_feature (99)..(99): n is a, c, g, or t
aagagtggtatcaacacagagggcccattacggccgggaagagtggtatcaacncagagtgcccattacggccgggannagtggtatcaacgcagagtngccattacggccggggcctttttgctgtaggcccgggtggttgctgccgaaatgggcaagttcatgaaacctgggaaggtggtgcttgtcctggctggacgctactccggacgcaaagctgtcatcgtgaagaagaacattgatgatggcacctcagatcgcccctacagccatgctctggtggctggaattgaccgctacccccgcaaagtgacagctgccatgggcaagaagaagatcgccaagagatcaaagataaaatcttttgtgaaagtgtataactacaatcacctaatgcccacaaggtactctgtggatatccccttggacaaaactgtcgtcaataaggatgtcttcagagatcctgctcttaaacgcaaggcccgacgggaggccaaggtcaagtttgaagagagatacaagacaggcaagaacaagtggttcttccagaaactgcggttttagatgctttgttttgatcattaaaaattataaa

SEQ ID NO: 431593 - DNA, 476 bp, Homo sapiens
  misc_feature (1)..(1): n is a, c, g, or t
ngggcagcatggaatttgggcacgagccgaaatgggcaagttcatgaaacctgggaaggtggtgcttgtcctggctggacgctactccggacgcaaagctgtcatcgtgaagaagaacattgatgatggcacctcagatcgcccctacagccatgctctggtggctggaattgaccgctacccccgcaaagtgacagctgccatgggcaagaagaagatcgccaagagatcaaagataaaatcttttgtgaaagtgtataactacaatcacctaatgcccacaaggtactctgtggatatccccttggacaaaactgtcgtcaataaggatgtcttcagagatcctgctcttaaacgcaaggcccgacgggaggccaaggtcaagtttgaagagagatacaagacaggcaagaacaagtggttcttccagaaactgcggttttagatgctttgttttgatcattaaaaattataaa

SEQ ID NO: 431594 - DNA, 1227 bp, Homo sapiens
ggcacgagctggctctttaatgggaaatgggaggaagggctgtccgcacaggaatggggttaggctgtcagaagcgcagccccctgcgggctaagtcggctcgggcctcctgtatctggctctgcagctcgcgtgcggcgtcctcgcagtcatgaaaagtggccacacgatagcccacagtgcccagggcatagcagccggcggacaccagcaagtaggcgggcagtggccacaggacttcctggcaggacaagggcagctccaggcccaaggctcccgtggtcagggccacccaggtggagcccaggatcgctagtccccaaagccactgcgctaatttcgtcatggtcactgcgagagaaggaagcaatgctcccctctaccccacgtctccccttccccgcgcggcccgggtggttgctgccgaaagtagaagcttgggttgaatctttcaatctgctgccatccgcggcttgggggtcgaaggtccgggcggcgccgggtgcattccttccctaggtctctggcggctacgtatccgatcctgtcctgcgagcagggccctcgggcggccttgaccaaggcgacagtgaacacagtctgaagttccggcccaagacctgggcttgctggcaggagtcagctctgggcatctttggctttacggatttttaagtggccctttctccttgctctctgcagaaatgggcaagttcatgaaacctgggaaggtggtgcttgtcctggctggacgctactccggacgcaaagctgtcatcgtgaaggtatcagcctcgcgggactctgcgtccttgcatgccgggaccaggctggctgcggcggggcgggcaggcttggaattcaagaacattgatgatggcacctcagatcgcccctacagccatgctctggtggctggaattgaccgctacccccgcaaagtgacagctgccatgggcaagaagaagatcgccaagagatcaaagataaaatcttttgtgaaagtgtataactacaatcacctaatgcccacaaggtactctgtggatatccccttggacaaaactgtcgtcaataaggatgtcttcagagatcctgctcttaaacgcaaggcccgacgggaggccaaggtcaagtttgaagagagatacaagacaggcaagaacaagtggttcttccagaaactgcggttttagatgctttgttttgatcattaaaaattataaa

SEQ ID NO: 431595 - DNA, 1399 bp, Homo sapiens
ggcacgagctggctctttaatgggaaatgggaggaagggctgtccgcacaggaatggggttaggctgtcagaagcgcagccccctgcgggctaagtcggctcgggcctcctgtatctggctctgcagctcgcgtgcggcgtcctcgcagtcatgaaaagtggccacacgatagcccacagtgcccagggcatagcagccggcggacaccagcaagtaggcgggcagtggccacaggacttcctggcaggacaagggcagctccaggcccaaggctcccgtggtcagggccacccaggtggagcccaggatcgctagtccccaaagccactgcgctaatttcgtcatggtcactgcgagagaaggaagcaatgctcccctctaccccacgtctccccttccccgcgcggcccgggtggttgctgccgaaagtagaagcttgggttgaatctttcaatctgctgccatccgcggcttgggggtcgaaggtccgggcggcgccgggtgcattccttccctaggtctctggcggctacgtatccgatcctgtcctgcgagcagggccctcgggcggccttgaccaaggcgacagtgaacacagtctgaagttccggcccaagacctgggcttgctggcaggagtcagctctgggcatctttggctttacggatttttaagtggccctttctccttgctctctgcagaaatgggcaagttcatgaaacctgggaaggtggtgcttgtcctggctggacgctactccggacgcaaagctgtcatcgtgaagaagaacattgatgatggcacctcagatcgcccctacagccatgctctggtggctggaattgaccgctacccccgcaaagtgacagctgccatgggcaagaagaagatcgccaagagatcaaagataaaatcttttgtgaaagtgtataactacaatcacctaatgcccacaaggtactctgtggatatccccttggacaaaactgtcgtcaataaggatgtcttcagagatcctgctcttaaacgcaaggcccgacgggaggccaaggtcaagtttgaagagagatacaagacaggcaagaacaagtggttcttccagaaactgcggttttagatgctttgttttgatcattaaaaattataaagaaaaaaaaaatggaagagacgcccctgctaacgggaatgctaatgaggaaaatggggagcaggaggctgacaatgaggtagacgaagaagaggaagaaggtggggaggaagaggatgaggaagaagaaggtgatggtgaggaagaggatggagatgaagatgaggaagctgaagtcagctacgggcagcgggcagtgaagatgatgaggatgacgatgtcgatacaagaagcgagacgagagatgatta

SEQ ID NO: 431596 - DNA, 1632 bp, Homo sapiens
ggcacgagctggctctttaatgggaaatgggaggaagggctgtccgcacaggaatggggttaggctgtcagaagcgcagccccctgcgggctaagtcggctcgggcctcctgtatctggctctgcagctcgcgtgcggcgtcctcgcagtcatgaaaagtggccacacgatagcccacagtgcccagggcatagcagccggcggacaccagcaagtaggcgggcagtggccacaggacttcctggcaggacaagggcagctccaggcccaaggctcccgtggtcagggccacccaggtggagcccaggatcgctagtccccaaagccactgcgctaatttcgtcatggtcactgcgagagaaggaagcaatgctcccctctaccccacgtctccccttccccgcgcggcccgggtggttgctgccgaaagtagaagcttgggttgaatctttcaatctgctgccatccgcggcttgggggtcgaaggtccgggcggcgccgggtgcattccttccctaggtctctggcggctacgtatccgatcctgtcctgcgagcagggccctcgggcggccttgaccaaggcgacagtgaacacagtctgaagttccggcccaagacctgggcttgctggcaggagtcagctctgggcatctttggctttacggatttttaagtggccctttctccttgctctctgcagaaatgggcaagttcatgaaacctgggaaggtggtgcttgtcctggctggacgctactccggacgcaaagctgtcatcgtgaagaagaacattgatgatggcacctcagatcgcccctacagccatgctctggtggctggaattgaccgctacccccgcaaagtgacagctgccatgggcaagaagaagatcgccaagagatcaaagataaaatcttttgtgaaagtgtataactacaatcacctaatgcccacaaggtactctgtggatatccccttggacaaaactgtcgtcaataaggatgtcttcagagatcctgctcttaaacgcaaggcccgacgggaggccaaggtcaagtttgaagagagatacaagacaggcaagaacaagtggttcttccagaaactgcggttttagatgctttgttttgatcattaaaaattataaagaaaaaaaaaaaaaaaaaaatctcgaaatctagttcctctacgaacgcatggtggccctcgggaaagtctggtggcgtgtgtccaaagtccgatcccagctggggctgtaaactggggcttgggcccccgcttaaaggccccgcacagaggcaaaacgggcaatcgccaaactggctacagcggagcgggagaaggccaagcaataggcccgggggggaaacactctctacaactaatggtgccccaaggtaacagctgggtgccaggaaccagaatcgagacagagcaagtcccggagaaaaggctaccaaaaaagagctgaacccacatgctcgtcggaaccacagggaaccggcagggtccggaaaaagctcactcggaactggcagccatcatgagggcgcatcaagctccgaggaaaacgggacctggaaaggctggaaacggaccaatcgccaactcacaagaaaagacgaaaaaga

SEQ ID NO: 431597 - DNA, 2046 bp, Homo sapiens
ggcacgagctggctctttaatgggaaatgggaggaagggctgtccgcacaggaatggggttaggctgtcagaagcgcagccccctgcgggctaagtcggctcgggcctcctgtatctggctctgcagctcgcgtgcggcgtcctcgcagtcatgaaaagtggccacacgatagcccacagtgcccagggcatagcagccggcggacaccagcaagtaggcgggcagtggccacaggacttcctggcaggacaagggcagctccaggcccaaggctcccgtggtcagggccacccaggtggagcccaggatcgctagtccccaaagccactgcgctaatttcgtcatggtcactgcgagagaaggaagcaatgctcccctctaccccacgtctccccttccccgcgcggcccgggtggttgctgccgaaagtagaagcttgggttgaatctttcaatctgctgccatccgcggcttgggggtcgaaggtccgggcggcgccgggtgcattccttccctaggtctctggcggctacgtatccgatcctgtcctgcgagcagggccctcgggcggccttgaccaaggcgacagtgaacacagtctgaagttccggcccaagacctgggcttgctggcaggagtcagctctgggcatctttggctttacggatttttaagtggccctttctccttgctctctgcagaaatgggcaagttcatgaaacctgggaaggtggtgcttgtcctggctggacgctactccggacgcaaagctgtcatcgtgaagaagaacattgatgatggcacctcagatcgcccctacagccatgctctggtggctggaattgaccgctacccccgcaaagtgacagctgccatgggcaagaagaagatcgccaagagatcaaagataaaatcttttgtgaaagtgtataactacaatcacctaatgcccacaaggtactctgtggatatccccttggacaaaactgtcgtcaataaggatgtcttcagagatcctgctcttaaacgcaaggcccgacgggaggccaaggtcaagtttgaagagagatacaagacaggcaagaacaagtggttcttccagaaactgcggttttagatgctttgttttgatcattaaaaattataaagaaaaaaaaaaaaaaaaaaaaaaaaaaaaaaaaaaaaaaaaaaaaaaaaaaaaaaaaaaaacaaaaaaaaaaaaataaaaaaaaaaaaaaaaaaaaaaaaaaaaaaacggggggggaatccaatggcgcgggggcgcgcggaaaaacggggtcacgcaaagtgggccaatgggccaaaaggcagtgtacccgagaacccaagtttcctgggtgcacaaaggggcgacaaaatctgcgcaggagacacaccctataaagagaagagcgcatatatacacttccgaaataacgcacggggttacccgggcttatgaatcccgtcgaaacaaaaccaagacaccaacaaccaaacaccacacaaaaaaccacccgcggacgaccaccaacaacgacaacgaccacaaaacaagatgacgacaacagaaccaaagcacacaaacacacaacacacaacccacccaccgaaaacacccgcaccacacacgcaacccaacaacaaaactacacacaacacacaacactacacaggatcaagccaacgaccaactgagagaagcatcacaagcagccaacaagcacaacagcggccaccgcagacacgaagagaagcacgagcgacgggcagagcagctgaggacaccaacctagaggaaaaacaacgaagaagatagcgccaggcgcgaggacaagacgagacggagaaaggaagaaaaagagaaaagaaagacgacgacacgacgaacacgcagaacagaagcaggagggaggaagaccaaggaaaccacgaaaagcaaaagacgaagcgagaaggagcgaagacaaggggcgacggaagaagccagagggagacgcgcgcacgacacacgaaacacgagcgagacggagagaagaagatga

SEQ ID NO: 431598 - DNA, 1421 bp, Homo sapiens
ggcacgagctggctctttaatgggaaatgggaggaagggctgtccgcacaggaatggggttaggctgtcagaagcgcagccccctgcgggctaagtcggctcgggcctcctgtatctggctctgcagctcgcgtgcggcgtcctcgcagtcatgaaaagtggccacacgatagcccacagtgcccagggcatagcagccggcggacaccagcaagtaggcgggcagtggccacaggacttcctggcaggacaagggcagctccaggcccaaggctcccgtggtcagggccacccaggtggagcccaggatcgctagtccccaaagccactgcgctaatttcgtcatggtcactgcgagagaaggaagcaatgctcccctctaccccacgtctccccttccccgcgcggcccgggtggttgctgccgaaagtagaagcttgggttgaatctttcaatctgctgccatccgcggcttgggggtcgaaggtccgggcggcgccgggtgcattccttccctaggtctctggcggctacgtatccgatcctgtcctgcgagcagggccctcgggcggccttgaccaaggcgacagtgaacacagtctgaagttccggcccaagacctgggcttgctggcaggagtcagctctgggcatctttggctttacggatttttaagtggccctttctccttgctctctgcagaaatgggcaagttcatgaaacctgggaaggtggtgcttgtcctggctggacgctactccggacgcaaagctgtcatcgtgaagaagaacattgatgatggcacctcagatcgcccctacagccatgctctggtggctggaattgaccgctacccccgcaaagtgacagctgccatgggcaagaagaagatcgccaagagatcaaagataaaatcttttgtgaaagtgtataactacaatcacctaatgcccacaaggtactctgtggatatccccttggacaaaactgtcgtcaataaggatgtcttcagagatcctgctcttaaacgcaaggcccgacgggaggccaaggtcaagtttgaagagagatacaagacaggcaagaacaagtggttcttccagaaactgcggttttagatgctttgttttgatcattaaaaattataaagaagaaaaaaaaaaaaaaaggggcggcccggatacacactcgaattctttgaagatccgagtgtgattggacatcctgcgatttttcccccctgctaactgttacctctattttaattacggtataaataggttactattctgcgattccttactgactttgcatttcgctttttacacaggcgtgtctcacttcttacgcggtttacataacacttatttcccactggtcacaacaaaaacccacacacaaaacaaacacaaaaaaaaaac

SEQ ID NO: 431599 - DNA, 1313 bp, Homo sapiens
ggcacgagctggctctttaatgggaaatgggaggaagggctgtccgcacaggaatggggttaggctgtcagaagcgcagccccctgcgggctaagtcggctcgggcctcctgtatctggctctgcagctcgcgtgcggcgtcctcgcagtcatgaaaagtggccacacgatagcccacagtgcccagggcatagcagccggcggacaccagcaagtaggcgggcagtggccacaggacttcctggcaggacaagggcagctccaggcccaaggctcccgtggtcagggccacccaggtggagcccaggatcgctagtccccaaagccactgcgctaatttcgtcatggtcactgcgagagaaggaagcaatgctcccctctaccccacgtctccccttccccgcgcggcccgggtggttgctgccgaaagtagaagcttgggttgaatctttcaatctgctgccatccgcggcttgggggtcgaaggtccgggcggcgccgggtgcattccttccctaggtctctggcggctacgtatccgatcctgtcctgcgagcagggccctcgggcggccttgaccaaggcgacagtgaacacagtctgaagttccggcccaagacctgggcttgctggcaggagtcagctctgggcatctttggctttacggatttttaagtggccctttctccttgctctctgcagaaatgggcaagttcatgaaacctgggaaggtggtgcttgtcctggctggacgctactccggacgcaaagctgtcatcgtgaagaagaacattgatgatggcacctcagatcgcccctacagccatgctctggtggctggaattgaccgctacccccgcaaagtgacagctgccatgggcaagaagaagatcgccaagagatcaaagataaaatcttttgtgaaagtgtataactacaatcacctaatgcccacaaggtactctgtggatatccccttggacaaaactgtcgtcaataaggatgtcttcagagatcctgctcttaaacgcaaggcccgacgggaggccaaggtcaagtttgaagagagatacaagacaggcaagaacaagtggttcttccagaaactgcggttttagatgctttgttttgatcattaaaaattataaacaacaacaaaaaacccgcgggggcccggtcccatcgcccatagagagtatacaggcggggtacaagccggccggtaaccgtcgtcccataagcggagcacaccctcggggcgggacaggccgacgcccacaggggcagagacagagacagtacagaaggaactg

SEQ ID NO: 431600 - DNA, 2049 bp, Homo sapiens
ggcacgagctggctctttaatgggaaatgggaggaagggctgtccgcacaggaatggggttaggctgtcagaagcgcagccccctgcgggctaagtcggctcgggcctcctgtatctggctctgcagctcgcgtgcggcgtcctcgcagtcatgaaaagtggccacacgatagcccacagtgcccagggcatagcagccggcggacaccagcaagtaggcgggcagtggccacaggacttcctggcaggacaagggcagctccaggcccaaggctcccgtggtcagggccacccaggtggagcccaggatcgctagtccccaaagccactgcgctaatttcgtcatggtcactgcgagagaaggaagcaatgctcccctctaccccacgtctccccttccccgcgcggcccgggtggttgctgccgaaagtagaagcttgggttgaatctttcaatctgctgccatccgcggcttgggggtcgaaggtccgggcggcgccgggtgcattccttccctaggtctctggcggctacgtatccgatcctgtcctgcgagcagggccctcgggcggccttgaccaaggcgacagtgaacacagtctgaagttccggcccaagacctgggcttgctggcaggagtcagctctgggcatctttggctttacggatttttaagtggccctttctccttgctctctgcagaaatgggcaagttcatgaaacctgggaaggtggtgcttgtcctggctggacgctactccggacgcaaagctgtcatcgtgaagaagaacattgatgatggcacctcagatcgcccctacagccatgctctggtggctggaattgaccgctacccccgcaaagtgacagctgccatgggcaagaagaagatcgccaagagatcaaagataaaatcttttgtgaaagtgtataactacaatcacctaatgcccacaaggtactctgtggatatccccttggacaaaactgtcgtcaataaggatgtcttcagagatcctgctcttaaacgcaaggcccgacgggaggccaaggtcaagtttgaagagagatacaagacaggcaagaacaagtggttcttccagaaactgcggttttagatgctttgttttgatcattaaaaattataaagaaaaaaacaaaaaaaacaacaaaaaaacagaaaaaaaaaaaaaaaaaaaaaaaaaaaaaaaaaaaaaaaaaaaaaaaaaaaaaaaaaaaaaaaaaaaaaaaaaaaaaaacggggggggaatccaatggcgcgggggcgcgcggaaaaacggggtcacgcaaagtgggccaatgggccaaaaggcagtgtacccgagaacccaagtttcctgggtgcacaaaggggcgacaaaatctgcgcaggagacacaccctataaagagaagagcgcatatatacacttccgaaataacgcacggggttacccgggcttatgaatcccgtcgaaacaaaaccaagacaccaacaaccaaacaccacacaaaaaaccacccgcggacgaccaccaacaacgacaacgaccacaaaacaagatgacgacaacagaaccaaagcacacaaacacacaacacacaacccacccaccgaaaacacccgcaccacacacgcaacccaacaacaaaactacacacaacacacaacactacacaggatcaagccaacgaccaactgagagaagcatcacaagcagccaacaagcacaacagcggccaccgcagacacgaagagaagcacgagcgacgggcagagcagctgaggacaccaacctagaggaaaaacaacgaagaagatagcgccaggcgcgaggacaagacgagacggagaaaggaagaaaaagagaaaagaaagacgacgacacgacgaacacgcagaacagaagcaggagggaggaagaccaaggaaaccacgaaaagcaaaagacgaagcgagaaggagcgaagacaaggggcgacggaagaagccagagggagacgcgcgcacgacacacgaaacacgagcgagacggagagaagaagatga

SEQ ID NO: 431601 - DNA, 994 bp, Homo sapiens
ggcacgagctggctctttaatgggaaatgggaggaagggctgtccgcacaggaatggggttaggctgtcagaagcgcagccccctgcgggctaagtcggctcgggcctcctgtatctggctctgcagctcgcgtgcggcgtcctcgcagtcatgaaaagtggccacacgatagcccacagtgcccagggcatagcagccggcggacaccagcaagtaggcgggcagtggccacaggacttcctggcaggacaagggcagctccaggcccaaggctcccgtggtcagggccacccaggtggagcccaggatcgctagtccccaaagccactgcgctaatttcgtcatggtcactgcgagagaaggaagcaatgctcccctctaccccacgtctccccttccccgcgcggcccgggtggttgctgccgaagaaatgggcaagttcatgaaacctgggaaggtggtgcttgtcctggctggacgctactccggacgcaaagctgtcatcgtgaagaagaacattgatgatggcacctcagatcgcccctacagccatgctctggtggctggaattgaccgctacccccgcaaagtgacagctgccatgggcaagaagaagatcgccaagagatcaaagataaaatcttttgtgaaagtgtataactacaatcacctaatgcccacaaggtactctgtggatatccccttggacaaaactgtcgtcaataaggatgtcttcagagatcctgctcttaaacgcaaggcccgacgggaggccaaggtcaagtttgaagagagatacaagacaggcaagaacaagtggttcttccagaaactgcggttttagatgctttgttttgatcattaaaaattataaagaaagaaaatgattaaaaggcccattttgtgggaaactatgaggtcacccaccattttgggaagtgctgattcctcttcctttccaagttgccttaagaacctggggacacaagactt

SEQ ID NO: 431602 - DNA, 1133 bp, Homo sapiens
  misc_feature (1111)..(1111): n is a, c, g, or t
  misc_feature (1116)..(1116): n is a, c, g, or t
  misc_feature (1118)..(1118): n is a, c, g, or t
ggcacgagctggctctttaatgggaaatgggaggaagggctgtccgcacaggaatggggttaggctgtcagaagcgcagccccctgcgggctaagtcggctcgggcctcctgtatctggctctgcagctcgcgtgcggcgtcctcgcagtcatgaaaagtggccacacgatagcccacagtgcccagggcatagcagccggcggacaccagcaagtaggcgggcagtggccacaggacttcctggcaggacaagggcagctccaggcccaaggctcccgtggtcagggccacccaggtggagcccaggatcgctagtccccaaagccactgcgctaatttcgtcatggtcactgcgagagaaggaagcaatgctcccctctaccccacgtctccccttccccgcgcggcccgggtggttgctgccgaaagtagaagcttgggttgaatctttcaatctgctgccatccgcggcttgggggtcgaaggtccgggcggcgccgggtgcattccttccctaggtctctggcggctacgtatccgatcctgtcctgcgagcagggccctcgggcggccttgaccaaggcgacagtgaacacagtctgaagttccggcccaagacctgggcttgctggcaggagtcagctctgggcatctttggctttacggatttttaagtggccctttctccttgctctctgcagaaatgggcaagttcatgaaacctgggaaggtggtgcttgtcctggctggacgctactccggacgcaaagctgtcatcgtgaagaagaacattgatgatggcacctcagatcgcccctacagccatgctctggtggctggaattgaccgctacccccgcaaagtgacagctgccatgggcaagaagaagatcgccaagagatcaaagataaaatcttttgtgaaagtgtataactacaatcacctaatgcccacaaggtactctgtggatatccccttggacaaaactgtcgtcaataaggatgtcttcagagatcctgctcttaaacgcaaggcccgacgggaggccaaggtcaagtttgaagagagatacaagacaggcaagaacaagtggttcttccagaactgctnatcangncttgttgtcataata

SEQ ID NO: 431603 - DNA, 1619 bp, Homo sapiens
aaatgcagaagcctggttaatggcgagcttctctgtgcatcgcggttgggggtcgaagtccgggcggcgccggtgcattgcttccctaggtctctggcggctacgtatccgatcctgtcctgcgagcagggccctcgggcggccttgaccaaggcgacagtgaacacagtctgaagttccggcccaagacctgggcttgctggcaggagtcagctctgggcatctttggctttacggatttttaagtggccctttctccttgctctctgcagaaatgggcaagttcatgaaacctgggaaggtggtgcttgtcctggctggacgctactccggacgcaaagctgtcatcgtgaagaagaacattgatgatggcacctcagatcgcccctacagccatgctctggtggctggaattgaccgctacccccgcaaagtgacagctgccatgggcaagaagaagatcgccaagagatcaaagataaaatcttttgtgaaagtgtataactacaatcacctaatgcccacaaggtactctgtggatatccccttggacaaaactgtcgtcaataaggatgtcttcagagatcctgctcttaaacgcaaggcccgacgggaggccaaggtcaagtttgaagagagatacaagacaggcaagaacaagtggttcttccagaaactgcggttttagatgctttgttttgatcattaaaaattataaagaaaaaaacaaaaaaaacaacaaaaaaacagaaaaaaaaaaaaaaaaaaaaaaaaaaaaaaaaaaaaaaaaaaaaaaaaaaaaaaaaaaaaaaaaaaaaaaaaaaaaaaacggggggggaatccaatggcgcgggggcgcgcggaaaaacggggtcacgcaaagtgggccaatgggccaaaaggcagtgtacccgagaacccaagtttcctgggtgcacaaaggggcgacaaaatctgcgcaggagacacaccctataaagagaagagcgcatatatacacttccgaaataacgcacggggttacccgggcttatgaatcccgtcgaaacaaaaccaagacaccaacaaccaaacaccacacaaaaaaccacccgcggacgaccaccaacaacgacaacgaccacaaaacaagatgacgacaacagaaccaaagcacacaaacacacaacacacaacccacccaccgaaaacacccgcaccacacacgcaacccaacaacaaaactacacacaacacacaacactacacaggatcaagccaacgaccaactgagagaagcatcacaagcagccaacaagcacaacagcggccaccgcagacacgaagagaagcacgagcgacgggcagagcagctgaggacaccaacctagaggaaaaacaacgaagaagatagcgccaggcgcgaggacaagacgagacggagaaaggaagaaaaagagaaaagaaagacgacgacacgacgaacacgcagaacagaagcaggagggaggaagaccaaggaaaccacgaaaagcaaaagacgaagcgagaaggagcgaagacaaggggcgacggaagaagccagagggagacgcgcgcacgacacacgaaacacgagcgagacggagagaagaagatga

SEQ ID NO: 431604 - DNA, 1137 bp, Homo sapiens
  misc_feature (1081)..(1081): n is a, c, g, or t
  misc_feature (1113)..(1113): n is a, c, g, or t
ggcacgagctggctctttaatgggaaatgggaggaagggctgtccgcacaggaatggggttaggctgtcagaagcgcagccccctgcgggctaagtcggctcgggcctcctgtatctggctctgcagctcgcgtgcggcgtcctcgcagtcatgaaaagtggccacacgatagcccacagtgcccagggcatagcagccggcggacaccagcaagtaggcgggcagtggccacaggacttcctggcaggacaagggcagctccaggcccaaggctcccgtggtcagggccacccaggtggagcccaggatcgctagtccccaaagccactgcgctaatttcgtcatggtcactgcgagagaaggaagcaatgctcccctctaccccacgtctccccttccccgcgcggcccgggtggttgctgccgaaagtagaagcttgggttgaatctttcaatctgctgccatccgcggcttgggggtcgaaggtccgggcggcgccgggtgcattccttccctaggtctctggcggctacgtatccgatcctgtcctgcgagcagggccctcgggcggccttgaccaaggcgacagtgaacacagtctgaagttccggcccaagacctgggcttgctggcaggagtcagctctgggcatctttggctttacggatttttaagtggccctttctccttgctctctgcagaaatgggcaagttcatgaaacctgggaaggtggtgcttgtcctggctggacgctactccggacgcaaagctgtcatcgtgaagaagaacattgatgatggcacctcagatcgcccctacagccatgctctggtggctggaattgaccgctacccccgcaaagtgacagctgccatgggcaagaagaagatcgccaagagatcaaagataaaatcttttgtgaaagtgtataactacaatcacctaatgcccacaaggtactctgtggatatccccttggacaaaactgtcgtcaataaggatgtcttcagagatcctgctcttaaacgcaaggcccgacgggaggccaaggtcaagtttgaagaggaggaggtaccaanggtcaaggcaatgtccaaagtgggttctttcnagaaaccttgtggttttttagggt

SEQ ID NO: 431605 - DNA, 1277 bp, Homo sapiens
gcggccgcctactactactactgctcgaattcaagcttctaacgatgtacggggacatgctctggtggctggaattgaccgctacccccgcaaagtgacagctgccatgggcaagaagaagatcgccaagagatcaaagataaaatcttttgtgaaagtgtataactacaatcacctaatgcccacaaggtactctgtggatatccccttggacaaaactgtcgtcaataaggatgtcttcagagatcctgctcttaaacgcaaggcccgacgggaggccaaggtcaagtttgaagagagatacaagacaggcaagaacaagtggttcttccagaaactgcggttttagatgctttgttttgatcattaaaaattataaagaaaaaaaaaaaaaaaaaaaaaaaaaaaaaaaaaaaaaaaaaaaaaaaaaaaaaaaaaaaacaaaaaaaaaaaaataaaaaaaaaaaaaaaaaaaaaaaaaaaaaaacggggggggaatccaatggcgcgggggcgcgcggaaaaacggggtcacgcaaagtgggccaatgggccaaaaggcagtgtacccgagaacccaagtttcctgggtgcacaaaggggcgacaaaatctgcgcaggagacacaccctataaagagaagagcgcatatatacacttccgaaataacgcacggggttacccgggcttatgaatcccgtcgaaacaaaaccaagacaccaacaaccaaacaccacacaaaaaaccacccgcggacgaccaccaacaacgacaacgaccacaaaacaagatgacgacaacagaaccaaagcacacaaacacacaacacacaacccacccaccgaaaacacccgcaccacacacgcaacccaacaacaaaactacacacaacacacaacactacacaggatcaagccaacgaccaactgagagaagcatcacaagcagccaacaagcacaacagcggccaccgcagacacgaagagaagcacgagcgacgggcagagcagctgaggacaccaacctagaggaaaaacaacgaagaagatagcgccaggcgcgaggacaagacgagacggagaaaggaagaaaaagagaaaagaaagacgacgacacgacgaacacgcagaacagaagcaggagggaggaagaccaaggaaaccacgaaaagcaaaagacgaagcgagaaggagcgaagacaaggggcgacggaagaagccagagggagacgcgcgcacgacacacgaaacacgagcgagacggagagaagaagatga

SEQ ID NO: 431606 - DNA, 1697 bp, Homo sapiens
ggcacgagctggctctttaatgggaaatgggaggaagggctgtccgcacaggaatggggttaggctgtcagaagcgcagccccctgcgggctaagtcggctcgggcctcctgtatctggctctgcagctcgcgtgcggcgtcctcgcagtcatgaaaagtggccacacgatagcccacagtgcccagggcatagcagccggcggacaccagcaagtaggcgggcagtggccacaggacttcctggcaggacaagggcagctccaggcccaaggctcccgtggtcagggccacccaggtggagcccaggatcgctagtccccaaagccactgcgctaatttcgtcatggtcactgcgagagaaggaagcaatgctcccctctaccccacgtctccccttccccgcgcggcccgggtggttgctgccgaagaaatgggcaagttcatgaaacctgggaaggtggtgcttgtcctggctggacgctactccggacgcaaagctgtcatcgtgaagaagaacattgatgatggcacctcagatcgcccctacagccatgctctggtggctggaattgaccgctacccccgcaaagtgacagctgccatgggcaagaagaagatcgccaagagatcaaagataaaatcttttgtgaaagtgtataactacaatcacctaatgcccacaaggtactctgtggatatccccttggaccgacgggaggccaaggtcaagtttgaagagagatacaagacaggcaagaacaagtggttcttccagaaactgcggttttagatgctttgttttgatcattaaaaattataaagaaacaaaaaaaaaaaaaaaaaaaaaaaaaaaaaaaaaacaaaaaaaaaaaaataaaaaaaaaaaaaaaaaaaaaaaaaaaaaaacggggggggaatccaatggcgcgggggcgcgcggaaaaacggggtcacgcaaagtgggccaatgggccaaaaggcagtgtacccgagaacccaagtttcctgggtgcacaaaggggcgacaaaatctgcgcaggagacacaccctataaagagaagagcgcatatatacacttccgaaataacgcacggggttacccgggcttatgaatcccgtcgaaacaaaaccaagacaccaacaaccaaacaccacacaaaaaaccacccgcggacgaccaccaacaacgacaacgaccacaaaacaagatgacgacaacagaaccaaagcacacaaacacacaacacacaacccacccaccgaaaacacccgcaccacacacgcaacccaacaacaaaactacacacaacacacaacactacacaggatcaagccaacgaccaactgagagaagcatcacaagcagccaacaagcacaacagcggccaccgcagacacgaagagaagcacgagcgacgggcagagcagctgaggacaccaacctagaggaaaaacaacgaagaagatagcgccaggcgcgaggacaagacgagacggagaaaggaagaaaaagagaaaagaaagacgacgacacgacgaacacgcagaacagaagcaggagggaggaagaccaaggaaaccacgaaaagcaaaagacgaagcgagaaggagcgaagacaaggggcgacggaagaagccagagggagacgcgcgcacgacacacgaaacacgagcgagacggagagaagaagatga

SEQ ID NO: 431607 - DNA, 818 bp, Homo sapiens
ggcacgagctggctctttaatgggaaatgggaggaagggctgtccgcacaggaatggggttaggctgtcagaagcgcagccccctgcgggctaagtcggctcgggcctcctgtatctggctctgcagctcgcgtgcggcgtcctcgcagtcatgaaaagtggccacacgatagcccacagtgcccagggcatagcagccggcggacaccagcaagtaggcgggcagtggccacaggacttcctggcaggacaagggcagctccaggcccaaggctcccgtggtcagggccacccaggtggagcccaggatcgctagtccccaaagccactgcgctaatttcgtcatggtcactgcgagagaaggaagcaatgctcccctctaccccacgtctccccttccccgcgcggcccgggtggttgctgccgaagaaatgggcaagttcatgaaacctgggaaggtggtgcttgtcctggctggacgctactccggacgcaaagctgtcatcgtgaagaagaacattgatgatggcacctcagatcgcccctacagccatgctctggtggctggaattgaccgctacccccgcaaagtgacagctgccatgggcaagaagaagatcgccaagagatcaaagataaaatcttttgtgaaagtgtataactacaatcacctaatgcccacaaggtactctgtggatatccccttggaccgacgggaggccaaggtcaagtttgaagagagatacaagacaggcaagaacaagtggttcttccagaaactgcggtttcacaaaagattttatcgtcgacgcggccgc

SEQ ID NO: 431608 - DNA, 716 bp, Homo sapiens
ggcacgagctggctctttaatgggaaatgggaggaagggctgtccgcacaggaatggggttaggctgtcagaagcgcagccccctgcgggctaagtcggctcgggcctcctgtatctggctctgcagctcgcgtgcggcgtcctcgcagtcatgaaaagtggccacacgatagcccacagtgcccagggcatagcagccggcggacaccagcaagtaggcgggcagtggccacaggacttcctggcaggacaagggcagctccaggcccaaggctcccgtggtcagggccacccaggtggagcccaggatcgctagtccccaaagccactgcgctaatttcgtcatggtcactgcgagagaaggaagcaatgctcccctctaccccacgtctccccttccccgcgcggcccgggtggttgctgccgaagaaatgggcaagttcatgaaacctgggaaggtggtgcttgtcctggctggacgctactccggacgcaaagctgtcatcgtgaagaaggtactctgtggatatccccttggacaaaactgtcgtcaataaggatgtcttcagagatcctgctcttaaacgcaaggcccgacgggaggccaaggtcaagtttgaagagagatacaagacaggcaagaacaagtggttcttccagaaactgcggtttactgcggttttagatgctttgttttgatcattaaaaattataaa

SEQ ID NO: 431609 - DNA, 511 bp, Homo sapiens
aacttgcaatgagctgagatcacaccactgcagtccagcctggacgaaagattcagactccgtctcaaaaaaaaaaaagtgtgaattttcagataatgtcatcgggacatggcttttgatggttgcttctaaggagtcagaccctgattccctagtgtcccacaaggatttgggctgtataggggccccggcagtatgtgggctaatcctgcctctccacctttgtcccaaggtactctgtggatatccccttggacaaaactgtcgtcaataaggatgtcttcagagatcctgctcttaaacgcaaggcccgacgggaggccaaggtcaagtttgaagagaggtaagtaggctttggtagtgaatggtggagtatggtttcactatttccattcctttcctcattggtgtcctctttttttcccttctagatacaagacaggcaagaacaagtggttcttccagaaactgcggttttagatgctttgttttgatcattaaaaattataaa

SEQ ID NO: 431610 - DNA, 524 bp, Homo sapiens
  misc_feature (26)..(26): n is a, c, g, or t
  misc_feature (31)..(31): n is a, c, g, or t
  misc_feature (36)..(36): n is a, c, g, or t
ccggccgcgcgacacggctgcgagangacgncaganggggagtgtccccctgctgtaggcccgggtggttgctgccgaaatgggcaagttcatgaaacctgggaaggtggtgcttgtcctggctggacgctactccggacgcaaagctgtcatcgtgaagaagaacattgatgatggcacctcagatcgcccctacagccatgctctggtggctggaattgaccgctacccccgcaaagtgacagctgccatgggcaagaagaagatcgccaagagatcaaagataaaatcttttgtgaaagtgtataactacaatcacctaatgcccacaaggtactctgtggatatccccttggacaaaactgtcgtcaataaggatgtcttcagagatcctgctcttaaacgcaaggcccgacgggaggccaaggtcaagtttgaagagagatacaagacaggcaagaacaagtggttcttccagaaactgcggttttagatgctttgttttgatcattaaaaattataaa

SEQ ID NO: 431611 - DNA, 333 bp, Homo sapiens
gcggccgcctactactactactgctcgaattcaagcttctaacgatgtacggggagaaatgggcaagttcatgaaacctgggaaggtggtgcttgtcctggctggacgctactccggacgcaaagctgtcatcgtgaagaaggtactctgtggatatccccttggacaaaactgtcgtcaataaggatgtcttcagagatcctgctcttaaacgcaaggcccgacgggaggccaaggtcaagtttgaagagagatacaagacaggcaagaacaagtggttcttccagaaactgcggttttagatgctttgttttgatcattaaaaattataaa

SEQ ID NO: 431612 - DNA, 767 bp, Homo sapiens
tcctcaccggggtgaaaggttagcggaagtgtccttctttcctttttgctgtaggcccgggtggttgctgccgaaatgggcaagttcatgaaacctgggaaggtggtgcttgtcctggctggacgctactccggacgcaaagctgtcatcgtgaagaacattgatgatggcacctcagatcgcccctacagccatgctctggtggctggaattgaccgctacccccgcaaagtgacagctgccatgggcaagaagaagatcgccaagagatcaaagataaaatcttttgtgaaagtgtataactacaatcacctaatgcccacaaggtactctgtggatatccccttggacaaaactgtcgtcaataaggatgtcttcagagatcctgctcttaaacgcaaggcccgacgggaggccaaggtcaagtttgaagagagatacaagacaggcaagaacaagtggttcttccagaaactgcggttttagatgctttgttttgatcattaaaaattataaagaaaaaaaaaatggaagagacgcccctgctaacgggaatgctaatgaggaaaatggggagcaggaggctgacaatgaggtagacgaagaagaggaagaaggtggggaggaagaggatgaggaagaagaaggtgatggtgaggaagaggatggagatgaagatgaggaagctgaagtcagctacgggcagcgggcagtgaagatgatgaggatgacgatgtcgatacaagaagcgagacgagagatgatta

SEQ ID NO: 431613 - DNA, 1392 bp, Homo sapiens
tcctcaccggggtgaaaggttagcggaagtgtccttctttcctttttgctgtaggcccgggtggttgctgccgaaatgggcaagttcatgaaacctgggaaggtggtgcttgtcctggctggacgctactccggacgcaaagctgtcatcgtgaagaacattgatgatggcacctcagatcgcccctacagccatgctctggtggctggaattgaccgctacccccgcaaagtgacagctgccatgggcaagaagaagatcgccaagagatcaaagataaaatcttttgtgaaagtgtataactacaatcacctaatgcccacaaggtactctgtggatatccccttggacaaaactgtcgtcaataaggatgtcttcagagatcctgctcttaaacgcaaggcccgacgggaggccaaggtcaagtttgaagagagatacaagacaggcaagaacaagtggttcttccagaaactgcggttttagatgctttgttttgatcattaaaaattataaagaaacaaaaaaaaaaaaaaaaaaaaaaaaaaaaaaaaaacaaaaaaaaaaaaataaaaaaaaaaaaaaaaaaaaaaaaaaaaaaacggggggggaatccaatggcgcgggggcgcgcggaaaaacggggtcacgcaaagtgggccaatgggccaaaaggcagtgtacccgagaacccaagtttcctgggtgcacaaaggggcgacaaaatctgcgcaggagacacaccctataaagagaagagcgcatatatacacttccgaaataacgcacggggttacccgggcttatgaatcccgtcgaaacaaaaccaagacaccaacaaccaaacaccacacaaaaaaccacccgcggacgaccaccaacaacgacaacgaccacaaaacaagatgacgacaacagaaccaaagcacacaaacacacaacacacaacccacccaccgaaaacacccgcaccacacacgcaacccaacaacaaaactacacacaacacacaacactacacaggatcaagccaacgaccaactgagagaagcatcacaagcagccaacaagcacaacagcggccaccgcagacacgaagagaagcacgagcgacgggcagagcagctgaggacaccaacctagaggaaaaacaacgaagaagatagcgccaggcgcgaggacaagacgagacggagaaaggaagaaaaagagaaaagaaagacgacgacacgacgaacacgcagaacagaagcaggagggaggaagaccaaggaaaccacgaaaagcaaaagacgaagcgagaaggagcgaagacaaggggcgacggaagaagccagagggagacgcgcgcacgacacacgaaacacgagcgagacggagagaagaagatga

SEQ ID NO: 431614 - DNA, 876 bp, Homo sapiens
ggcacgagctggctctttaatgggaaatgggaggaagggctgtccgcacaggaatggggttaggctgtcagaagcgcagccccctgcgggctaagtcggctcgggcctcctgtatctggctctgcagctcgcgtgcggcgtcctcgcagtcatgaaaagtggccacacgatagcccacagtgcccagggcatagcagccggcggacaccagcaagtaggcgggcagtggccacaggacttcctggcaggacaagggcagctccaggcccaaggctcccgtggtcagggccacccaggtggagcccaggatcgctagtccccaaagccactgcgctaatttcgtcatggtcactgcgagagaaggaagcaatgctcccctctaccccacgtctccccttccccgcgcggcccgggtggttgctgccgaagaaatgggcaagttcatgaaacctgggaaggtggtgcttgtcctggctggacgctactccggacgcaaagctgtcatcgtgaagaagaacattgatgatggcacctcagatcgcccctacagccatgctctggtggctggaattgaccgctacccccgcaaagtgacagctgccatgggcaagaagaagatcgccaagagatcaaagataaaatcttttgtgaaagtgtataactacaatcacctaatgcccacaaggtactctgtggatatccccttggacaaaactgtcgtcaataaggatgtcttcagagatcctgctcttaaacgcaaggcccgacgggaggccaaggtcaagtttgaagagagatacaagacaggcaagaacaagtggttcttccagaaactgcggttttagatgctttgttttgatcattaaaaattataaa

SEQ ID NO: 431615 - DNA, 1348 bp, Homo sapiens
tcctcaccggggtgaaaggttagcggaagtgtccttctttcctttttgctgtaggcccgggtggttgctgccgaaatgggcaagttcatgaaacctgggaaggtggtgcttgtcctggctggacgctactccggacgcaaagctgtcatcgtgaagaacattgatgatggcacctcagatcgcccctacagccatgctctggtggctggaattgaccgctacccccgcaaagtgacagctgccatgggcaagaagaagatcgccaagagatcaaagataaaatcttttgtgaaagtgtataactacaatcacctaatgcccacaaggtactctgtggatatccccttggacaaaactgtcgtcaataaggatgtcttcagagatcctgctcttaaacgcaaggcccgacgggaggccaaggtcaagtttgaagagagatacaagacaggcaagaacaagtggttcttccagaaactgcggtttactgcggttttagatgctttgttttgatcattaaaaattataaaaaaaaaaaaaaaaaaaaaaaaaaaaaaaaaacggggggggaatccaatggcgcgggggcgcgcggaaaaacggggtcacgcaaagtgggccaatgggccaaaaggcagtgtacccgagaacccaagtttcctgggtgcacaaaggggcgacaaaatctgcgcaggagacacaccctataaagagaagagcgcatatatacacttccgaaataacgcacggggttacccgggcttatgaatcccgtcgaaacaaaaccaagacaccaacaaccaaacaccacacaaaaaaccacccgcggacgaccaccaacaacgacaacgaccacaaaacaagatgacgacaacagaaccaaagcacacaaacacacaacacacaacccacccaccgaaaacacccgcaccacacacgcaacccaacaacaaaactacacacaacacacaacactacacaggatcaagccaacgaccaactgagagaagcatcacaagcagccaacaagcacaacagcggccaccgcagacacgaagagaagcacgagcgacgggcagagcagctgaggacaccaacctagaggaaaaacaacgaagaagatagcgccaggcgcgaggacaagacgagacggagaaaggaagaaaaagagaaaagaaagacgacgacacgacgaacacgcagaacagaagcaggagggaggaagaccaaggaaaccacgaaaagcaaaagacgaagcgagaaggagcgaagacaaggggcgacggaagaagccagagggagacgcgcgcacgacacacgaaacacgagcgagacggagagaagaagatga

SEQ ID NO: 431616 - DNA, 1411 bp, Homo sapiens
  misc_feature (1156)..(1156): n is a, c, g, or t
ggcacgagctggctctttaatgggaaatgggaggaagggctgtccgcacaggaatggggttaggctgtcagaagcgcagccccctgcgggctaagtcggctcgggcctcctgtatctggctctgcagctcgcgtgcggcgtcctcgcagtcatgaaaagtggccacacgatagcccacagtgcccagggcatagcagccggcggacaccagcaagtaggcgggcagtggccacaggacttcctggcaggacaagggcagctccaggcccaaggctcccgtggtcagggccacccaggtggagcccaggatcgctagtccccaaagccactgcgctaatttcgtcatggtcactgcgagagaaggaagcaatgctcccctctaccccacgtctccccttccccgcgcggcccgggtggttgctgccgaaagtagaagcttgggttgaatctttcaatctgctgccatccgcggcttgggggtcgaaggtccgggcggcgccgggtgcattccttccctaggtctctggcggctacgtatccgatcctgtcctgcgagcagggccctcgggcggccttgaccaaggcgacagtgaacacagtctgaagttccggcccaagacctgggcttgctggcaggagtcagctctgggcatctttggctttacggatttttaagtggccctttctccttgctctctgcagaaatgggcaagttcatgaaacctgggaaggtggtgcttgtcctggctggacgctactccggacgcaaagctgtcatcgtgaagaagaacattgatgatggcacctcagatcgcccctacagccatgctctggtggctggaattgaccgctacccccgcaaagtgacagctgccatgggcaagaagaagatcgccaagagatcaaagataaaatcttttgtgaaagtgtataactacaatcacctaatgcccacaaggtactctgtggatatccccttggacaaaactgtcgtcaataaggatgtcttcagagatcctgctcttaaacgcaaggcccgacgggaggccaaggtcaagtttgaagagagatacaagacaggcaagaacaagtggttcttccagaaactgcggttttagatgctttgttttgatcattaaaaattataaagagaaanagaagaactagtctcgagttttttttttttttttttctcatttaacttttaaaggggtctcaaaattcggggacaaattttgggtcaacgtgggttcccattaaaaggtacgggttttaaaaactaataccttaaaagtgcacacgcaaaaaagaaagaccaagggggtccacaaaacattctcctttccttctgaaggtccacgaggcatggtatcattaaccagtctttactactaaacttaagtgggcactg

SEQ ID NO: 431617 - DNA, 2024 bp, Homo sapiens
ggcacgagctggctctttaatgggaaatgggaggaagggctgtccgcacaggaatggggttaggctgtcagaagcgcagccccctgcgggctaagtcggctcgggcctcctgtatctggctctgcagctcgcgtgcggcgtcctcgcagtcatgaaaagtggccacacgatagcccacagtgcccagggcatagcagccggcggacaccagcaagtaggcgggcagtggccacaggacttcctggcaggacaagggcagctccaggcccaaggctcccgtggtcagggccacccaggtggagcccaggatcgctagtccccaaagccactgcgctaatttcgtcatggtcactgcgagagaaggaagcaatgctcccctctaccccacgtctccccttccccgcgcggcccgggtggttgctgccgaaagtagaagcttgggttgaatctttcaatctgctgccatccgcggcttgggggtcgaaggtccgggcggcgccgggtgcattccttccctaggtctctggcggctacgtatccgatcctgtcctgcgagcagggccctcgggcggccttgaccaaggcgacagtgaacacagtctgaagttccggcccaagacctgggcttgctggcaggagtcagctctgggcatctttggctttacggatttttaagtggccctttctccttgctctctgcagaaatgggcaagttcatgaaacctgggaaggtggtgcttgtcctggctggacgctactccggacgcaaagctgtcatcgtgaagaagaacattgatgatggcacctcagatcgcccctacagccatgctctggtggctggaattgaccgctacccccgcaaagtgacagctgccatgggcaagaagaagatcgccaagagatcaaagataaaatcttttgtgaaagtgtataactacaatcacctaatgcccacaaggtactctgtggatatccccttggacaaaactgtcgtcaataaggatgtcttcagagatcctgctcttaaacgcaaggcccgacgggaggccaaggtcaagtttgaagagagatacaagacaggcaagaacaagtggttcttccagaaactgcggttttagatgctttgttttgatcattaaaaattataaagaaacaaaaaaaaaaaaaaaaaaaaaaaaaaaaaaaaaacaaaaaaaaaaaaataaaaaaaaaaaaaaaaaaaaaaaaaaaaaaacggggggggaatccaatggcgcgggggcgcgcggaaaaacggggtcacgcaaagtgggccaatgggccaaaaggcagtgtacccgagaacccaagtttcctgggtgcacaaaggggcgacaaaatctgcgcaggagacacaccctataaagagaagagcgcatatatacacttccgaaataacgcacggggttacccgggcttatgaatcccgtcgaaacaaaaccaagacaccaacaaccaaacaccacacaaaaaaccacccgcggacgaccaccaacaacgacaacgaccacaaaacaagatgacgacaacagaaccaaagcacacaaacacacaacacacaacccacccaccgaaaacacccgcaccacacacgcaacccaacaacaaaactacacacaacacacaacactacacaggatcaagccaacgaccaactgagagaagcatcacaagcagccaacaagcacaacagcggccaccgcagacacgaagagaagcacgagcgacgggcagagcagctgaggacaccaacctagaggaaaaacaacgaagaagatagcgccaggcgcgaggacaagacgagacggagaaaggaagaaaaagagaaaagaaagacgacgacacgacgaacacgcagaacagaagcaggagggaggaagaccaaggaaaccacgaaaagcaaaagacgaagcgagaaggagcgaagacaaggggcgacggaagaagccagagggagacgcgcgcacgacacacgaaacacgagcgagacggagagaagaagatga

SEQ ID NO: 431618 - DNA, 1997 bp, Homo sapiens
ggcacgagctggctctttaatgggaaatgggaggaagggctgtccgcacaggaatggggttaggctgtcagaagcgcagccccctgcgggctaagtcggctcgggcctcctgtatctggctctgcagctcgcgtgcggcgtcctcgcagtcatgaaaagtggccacacgatagcccacagtgcccagggcatagcagccggcggacaccagcaagtaggcgggcagtggccacaggacttcctggcaggacaagggcagctccaggcccaaggctcccgtggtcagggccacccaggtggagcccaggatcgctagtccccaaagccactgcgctaatttcgtcatggtcactgcgagagaaggaagcaatgctcccctctaccccacgtctccccttccccgcgcggcccgggtggttgctgccgaaagtagaagcttgggttgaatctttcaatctgctgccatccgcggcttgggggtcgaaggtccgggcggcgccgggtgcattccttccctaggtctctggcggctacgtatccgatcctgtcctgcgagcagggccctcgggcggccttgaccaaggcgacagtgaacacagtctgaagttccggcccaagacctgggcttgctggcaggagtcagctctgggcatctttggctttacggatttttaagtggccctttctccttgctctctgcagaaatgggcaagttcatgaaacctgggaaggtggtgcttgtcctggctggacgctactccggacgcaaagctgtcatcgtgaagaagaacattgatgatggcacctcagatcgcccctacagccatgctctggtggctggaattgaccgctacccccgcaaagtgacagctgccatgggcaagaagaagatcgccaagagatcaaagataaaatcttttgtgaaagtgtataactacaatcacctaatgcccacaaggtactctgtggatatccccttggacaaaactgtcgtcaataaggatgtcttcagagatcctgctcttaaacgcaaggcccgacgggaggccaaggtcaagtttgaagagagatacaagacaggcaagaacaagtggttcttccagaaactgcggttttagatgctttgttttgatcattaaaaattataaaaaaaaaaaaaaacaaaaaaaaaaaaataaaaaaaaaaaaaaaaaaaaaaaaaaaaaaacggggggggaatccaatggcgcgggggcgcgcggaaaaacggggtcacgcaaagtgggccaatgggccaaaaggcagtgtacccgagaacccaagtttcctgggtgcacaaaggggcgacaaaatctgcgcaggagacacaccctataaagagaagagcgcatatatacacttccgaaataacgcacggggttacccgggcttatgaatcccgtcgaaacaaaaccaagacaccaacaaccaaacaccacacaaaaaaccacccgcggacgaccaccaacaacgacaacgaccacaaaacaagatgacgacaacagaaccaaagcacacaaacacacaacacacaacccacccaccgaaaacacccgcaccacacacgcaacccaacaacaaaactacacacaacacacaacactacacaggatcaagccaacgaccaactgagagaagcatcacaagcagccaacaagcacaacagcggccaccgcagacacgaagagaagcacgagcgacgggcagagcagctgaggacaccaacctagaggaaaaacaacgaagaagatagcgccaggcgcgaggacaagacgagacggagaaaggaagaaaaagagaaaagaaagacgacgacacgacgaacacgcagaacagaagcaggagggaggaagaccaaggaaaccacgaaaagcaaaagacgaagcgagaaggagcgaagacaaggggcgacggaagaagccagagggagacgcgcgcacgacacacgaaacacgagcgagacggagagaagaagatga

SEQ ID NO: 431619 - DNA, 1069 bp, Homo sapiens
ggcacgagctggctctttaatgggaaatgggaggaagggctgtccgcacaggaatggggttaggctgtcagaagcgcagccccctgcgggctaagtcggctcgggcctcctgtatctggctctgcagctcgcgtgcggcgtcctcgcagtcatgaaaagtggccacacgatagcccacagtgcccagggcatagcagccggcggacaccagcaagtaggcgggcagtggccacaggacttcctggcaggacaagggcagctccaggcccaaggctcccgtggtcagggccacccaggtggagcccaggatcgctagtccccaaagccactgcgctaatttcgtcatggtcactgcgagagaaggaagcaatgctcccctctaccccacgtctccccttccccgcgcggcccgggtggttgctgccgaagaaatgggcaagttcatgaaacctgggaaggtggtgcttgtcctggctggacgctactccggacgcaaagctgtcatcgtgaagaagaacattgatgatggcacctcagatcgcccctacagccatgctctggtggctggaattgaccgctacccccgcaaagtgacagctgccatgggcaagaagaagatcgccaagagatcaaagataaaatcttttgtgaaagtgtataactacaatcacctaatgcccacaaggtactctgtggatatccccttggacaaaactgtcgtcaataaggatgtcttcagagatcctgctcttaaacgcaaggcccgacgggaggccaaggtcaagtttgaagagagatacaagacaggcaagaacaagtggttcttccagaaactgcggttttagatgctttgttttgatcattaaaaattataaaaaaaaaaaaaaacaaaaaaaaaaaaattcgggggtttatttgttgggggggggaaaaaggggtattggaatgggcccttgggttctatagcttgtttcctgacccaagttttttgtgtacaagggggaaattcggcggggcccccaaaagggaggggcgataaatttgaaaaggcgggttaccgggtagaaga

SEQ ID NO: 431620 - DNA, 1091 bp, Homo sapiens
ggcacgagctggctctttaatgggaaatgggaggaagggctgtccgcacaggaatggggttaggctgtcagaagcgcagccccctgcgggctaagtcggctcgggcctcctgtatctggctctgcagctcgcgtgcggcgtcctcgcagtcatgaaaagtggccacacgatagcccacagtgcccagggcatagcagccggcggacaccagcaagtaggcgggcagtggccacaggacttcctggcaggacaagggcagctccaggcccaaggctcccgtggtcagggccacccaggtggagcccaggatcgctagtccccaaagccactgcgctaatttcgtcatggtcactgcgagagaaggaagcaatgctcccctctaccccacgtctccccttccccgcgcggcccgggtggttgctgccgaaagtagaagcttgggttgaatctttcaatctgctgccatccgcggcttgggggtcgaaggtccgggcggcgccgggtgcattccttccctaggtctctggcggctacgtatccgatcctgtcctgcgagcagggccctcgggcggccttgaccaaggcgacagtgaacacagtctgaagttccggcccaagacctgggcttgctggcaggagtcagctctgggcatctttggctttacggatttttaagtggccctttctccttgctctctgcagaaatgggcaagttcatgaaacctgggaaggtggtgcttgtcctggctggacgctactccggacgcaaagctgtcatcgtgaagaagaacattgatgatggcacctcagatcgcccctacagccatgctctggtggctggaattgaccgctacccccgcaaagtgacagctgccatgggcaagaagaagatcgccaagagatcaaagataaaatcttttgtgaaagtgtataactacaatcacctaatgcccacaaggtactctgtggatatccccttggaccgacgggaggccaaggtcaagtttgaagagagatacaagacaggcaagaacaagtggttcttccagaaactgcggtttcacaaaagattttatcgtcgacgcggccgc

SEQ ID NO: 431621 - DNA, 834 bp, Homo sapiens
  misc_feature (822)..(822): n is a, c, g, or t
ggcacgagctggctctttaatgggaaatgggaggaagggctgtccgcacaggaatggggttaggctgtcagaagcgcagccccctgcgggctaagtcggctcgggcctcctgtatctggctctgcagctcgcgtgcggcgtcctcgcagtcatgaaaagtggccacacgatagcccacagtgcccagggcatagcagccggcggacaccagcaagtaggcgggcagtggccacaggacttcctggcaggacaagggcagctccaggcccaaggctcccgtggtcagggccacccaggtggagcccaggatcgctagtccccaaagccactgcgctaatttcgtcatggtcactgcgagagaaggaagcaatgctcccctctaccccacgtctccccttccccgcgcggcccgggtggttgctgccgaagaaatgggcaagttcatgaaacctgggaaggtggtgcttgtcctggctggacgctactccggacgcaaagctgtcatcgtgaagaagaacattgatgatggcacctcagatcgcccctacagccatgctctggtggctggaattgaccgctacccccgcaaagtgacagctgccatgggcaagaagaagatcgccaagagatcaaagataaaatcttttgtgaaagtgtataactacaatcacctaatgcccacaaggtactctgtggatatccccttggacaaactgtgtcaataagatgcttcagggtctctctaacgaaggccgcggcgcaggcagttgagagtcagcagcagccagtgtctcagactcggttagtctttttacataattntaaaaaaaaacc

SEQ ID NO: 431622 - DNA, 1209 bp, Homo sapiens
ggcacgagctggctctttaatgggaaatgggaggaagggctgtccgcacaggaatggggttaggctgtcagaagcgcagccccctgcgggctaagtcggctcgggcctcctgtatctggctctgcagctcgcgtgcggcgtcctcgcagtcatgaaaagtggccacacgatagcccacagtgcccagggcatagcagccggcggacaccagcaagtaggcgggcagtggccacaggacttcctggcaggacaagggcagctccaggcccaaggctcccgtggtcagggccacccaggtggagcccaggatcgctagtccccaaagccactgcgctaatttcgtcatggtcactgcgagagaaggaagcaatgctcccctctaccccacgtctccccttccccgcgcggcccgggtggttgctgccgaaagtagaagcttgggttgaatctttcaatctgctgccatccgcggcttgggggtcgaaggtccgggcggcgccgggtgcattccttccctaggtctctggcggctacgtatccgatcctgtcctgcgagcagggccctcgggcggccttgaccaaggcgacagtgaacacagtctgaagttccggcccaagacctgggcttgctggcaggagtcagctctgggcatctttggctttacggatttttaagtggccctttctccttgctctctgcagaaatgggcaagttcatgaaacctgggaaggtggtgcttgtcctggctggacgctactccggacgcaaagctgtcatcgtgaagaaggtactctgtggatatccccttggacaaaactgtcgtcaataaggatgtcttcagagatcctgctcttaaacgcaaggcccgacgggaggccaaggtcaagtttgaagagagatacaagacaggcaagaacaagtggttcttccagaaactgcggttttagatgctttgttttgatcattaaaaattataaagaaaaaaacaaaaaaaacaacaaaaaaacagaaaaaaaaaaaaaaaaaaaaaaaaaaaaaaaaaaaaaaaaaaaaaaaaaaagaaaaagaaaaaagaaggagagagagaaaaggaggaagcgaaaacacgaagcaaagacagacggacaaaagagcaaaaaaaaaagaccgcggagagaaaaaggagacgcacaacgaaagagaagggggggaggaaaagaaacaaacag

SEQ ID NO: 431623 - DNA, 2566 bp, Homo sapiens
ctcctcatcttcagcagcatctcgtggatgggtggcaagaaccccttcctgggcatcgcctacctggtcgtcggctccctctgcatcctcaccggctttgtcatgctggtcgtctacattcgctaccaggaccaggacgacgacgacgaggagtgattccggctttccagggatccctcctgcttcttgccaaaactcttgcaaggtgcttttggcatctcctcctcgcccgtcacccaattccaacctcgcctagcttttcctccctttgtgaatgaggggaccagataagggaattaccccccttgctcttggggggctgctagactgtcttgccgcggggagggatgttgactgcagagtgaaacatccttgcaaactcttcccacctccttcacgacactgagttgccatgtgaggttcttcaagtctgagagtggaagggatccctatggagactcctattaaacccctattagaggaagagattgagagacctagcaatgtgaagtaacaaagatcaggcagctgcaagtgactcctgaatcttgagtccagggctttcgccactacagtacagtggttttcttttctttggtcggggagagtgggctggaatggagagtgaggcccacaaattacctgcagagacgtggaggcgtgagggagaacatgcttgttaaatatgcaggtagattaggagacaccaaacagagattcagacacagtaaggctgggatgagatcctcgaagctgtgttttaacaaactccactggagagtcccatattccctcaaatttgggaatcacgaccctgaaccaggttgggcctgaagcagtcaactgaattcactttttcggatagtaatttgttcccaggggcagtgacaaccatgatgttccaggtttggtctggcactctgccttgaacgtaggaagctcttgatgatttgtggaatgaatttttaaaaaattactatctggggaaaactagttggcatacagagttgtaggacagggtttatgtgattcatttgatattttagtattttggtgtaaaagccaacaggcaaactttgccaggtactgtgtagaaactcgaaaatgtgaggccagtttgtacagttcagaggaaatgctttaacgtagaatcagatagctggaagagatcttcgagggaaagtaagttccctaaagtcacatctatgtctcctagctcagtgttctttgtcattgtgtgtgtgtgtgtgtgtgtgtgtgtgtgtgtgtgtgattagaaagggcttcattcataccttttcccttggacctggaaaaaaaatttttttatcttttcaaatgaaatctattgatttctagtaatcatatttgaatcaatgttaaagcatatatagtcttatatgtaaactagattcttaagattatttgaacctttgagatgaagtttacactcaactaaaatcattccattgattttattgattaacatcaatcagtatgtttaaagttattctaagaagcaatagtttatttttaaaaaccttgtatagcaaaataacttaaaaccctttgtgatatcatcttaccagtttatttggtaaaaacaaacagttatttggtatttgtcagaattcttcagtgcctgctattacagctattttccaattactaatttgattatactcactcaaggcagtgcaagatcttgaagtactttttagcagttaagtaatattgaattgtattgaatagtttacatagtttattctagtctttgaaaattactgaacatggacaatgtgcatgtcattgacatctgccttagaacttctgggacaatcctgattcgagagattctatcccattatttacatataccaaaaatactttgttaatttaatgtgttggcttcccaactcctgaacacgacacaattttattattagattttgtatggtgattttaggctatgaaaacatgatcattatatgtatatagatacatttttatttgttacaaatgtttgagcagctcactagcccacccctcctctattttgggtaagagaatttactaccttttttaactatgtagttgagagcaacatgtattttgttatttttagaatggtcagtatattgctataaaattttaaatgagactatgaaagttaaagtattctgattctggttaaattaacgaatatggttccaggccctgttctctgggtttttgagagagaataaaggttatgtttgtcttacctttgttatcgagtttgctgaattcttttgaacgatgatcttaaaggcacaaacaccaccagccactttgctaatttcttaatagcagatttacattgcagcaagaaaaccatcttttatagtaacattcagttaaaatgaactcaattcattgttaacttcctaaaacagaatttgaactttatcaacctcaacgtgtatataaactagatagtcctcaatactttatcaacctcaacatgtatataaactagatagtcctcaaatactgtttgaatttaataaatgtcaatttaaaaatt

SEQ ID NO: 431624 - DNA, 2263 bp, Homo sapiens
ctcctcatcttcagcagcatctcgtggatgggtggcaagaaccccttcctgggcatcgcctacctggtcgtcggctccctctgcatcctcaccggctttgtcatgctggtcgtctacattcgctaccaggaccaggacgacgacgacgaggagtgattccggctttccagggatccctcctgcttcttgccaaaactcttgcaaggtgcttttggcatctcctcctcgcccgtcacccaattccaacctcgcctagcttttcctccctttgtgaatgaggggaccagataagggaattaccccccttgctcttggggggctgctagactgtcttgccgcggggagggatgttgactgcagagtgaaacatccttgcaaactcttcccacctccttcacgacactgagttgccatgtgaggttcttcaagtctgagagtggaagggatccctatggagactcctattaaacccctattagaggaagagattgagagacctagcaatgtgaagtaacaaagatcaggcagctgcaagtgactcctgaatcttgagtccagggctttcgccactacagtacagtggttttcttttctttggtcggggagagtgggctggaatggagagtgaggcccacaaattacctgcagagacgtggaggcgtgagggagaacatgcttgttaaatatgcaggtagattaggagacaccaaacagagattcagacacagtaaggctgggatgagatcctcgaagctgtgttttaacaaactccactggagagtcccatattccctcaaatttgggaatcacgaccctgaaccaggttgggcctgaagcagtcaactgaattcactttttcggatagtaatttgttcccaggggcagtgacaaccatgatgttccaggtttggtctggcactctgccttgaacgtaggaagctcttgatgatttgtggaatgaatttttaaaaaattactatctggggaaaactagttggcatacagagttgtaggacagggtttatgtgattcatttgatattttagtattttggtgtaaaagccaacaggcaaactttgccaggtactgtgtagaaactcgaaaatgtgaggccagtttgtacagttcagaggaaatgctttaacgtagaatcagatagctggaagagatcttcgagggaaagtaagttccctaaagtcacatctatgtctcctagctcagtgttctttgtcattgtgtgtgtgtgtgtgtgtgtgtgtgtgtgtgtgtgtgattagaaagggcttcattcataccttttcccttggacctggaaaaaaaatttttttatcttttcaaatgaaatctattgatttctagtaatcatatttgaatcaatgttaaagcatatatagtcttatatgtaaactagattcttaagattatttgaacctttgagatgaagtttacactcaactaaaatcattccattgattttattgattaacatcaatcagtatgtttaaagttattctaagaagcaatagtttatttttaaaaaccttgtatagcaaaataacttaaaaccctttgtgatatcatcttaccagtttatttggtaaaaacaaacagttatttggtatttgtcagaattcttcagtgcctgctattacagctattttccaattactaatttgattatactcactcaaggcagtgcaagatcttgaagtactttttagcagttaagtaatattgaattgtattgaatagtttacatagtttattctagtctttgaaaattactgaacatggacaatgtgcatgtcattgacatctgccttagaacttctgggacaatcctgattcgagagattctatcccattatttacatataccaaaaatactttgttaatttaatgtgttggcttcccaactcctgaacacgacacaattttattattagattttgtatggtgattttaggctatgaaaacatgatcattatatgtatatagatacatttttatttgttacaaatgtttgagcagctcactagcccacccctcctctattttgggtaagagaatttactaccttttttaactatgtagttgagagcaacatgtattttgttatttttagaatggtcagtatattgctataaaattttaaatgagactatgaaagttaaagtattctgattctggttaaattaacgaatatggttccaggccctgttctctgggtttttgagagagaataaaggttatgtttgtctta

SEQ ID NO: 431625 - DNA, 1613 bp, Homo sapiens
ggcgtgggggggggcagaagcaggaagcaggcagaagcaggaagcaggcagaagcaggaagcagagattcagacacagtaaggctgggatgagatcctcgaagctgtgttttaacaaactccactggagagtcccatattccctcaaatttgggaatcacgaccctgaaccaggttgggcctgaagcagtcaactgaattcactttttcggatagtaatttgttcccaggggcagtgacaaccatgatgttccaggtttggtctggcactctgccttgaacgtaggaagctcttgatgatttgtggaatgaatttttaaaaaattactatctggggaaaactagttggcatacagagttgtaggacagggtttatgtgattcatttgatattttagtattttggtgtaaaagccaacaggcaaactttgccaggtactgtgtagaaactcgaaaatgtgaggccagtttgtacagttcagaggaaatgctttaacgtagaatcagatagctggaagagatcttcgagggaaagtaagttccctaaagtcacatctatgtctcctagctcagtgttctttgtcattgtgtgtgtgtgtgtgtgtgtgtgtgtgtgtgtgtgtgattagaaagggcttcattcataccttttcccttggacctggaaaaaaaatttttttatcttttcaaatgaaatctattgatttctagtaatcatatttgaatcaatgttaaagcatatatagtcttatatgtaaactagattcttaagattatttgaacctttgagatgaagtttacactcaactaaaatcattccattgattttattgattaacatcaatcagtatgtttaaagttattctaagaagcaatagtttatttttaaaaaccttgtatagcaaaataacttaaaaccctttgtgatatcatcttaccagtttatttggtaaaaacaaacagttatttggtatttgtcagaattcttcagtgcctgctattacagctattttccaattactaatttgattatactcactcaaggcagtgcaagatcttgaagtactttttagcagttaagtaatattgaattgtattgaatagtttacatagtttattctagtctttgaaaattactgaacatggacaatgtgcatgtcattgacatctgccttagaacttctgggacaatcctgattcgagagattctatcccattatttacatataccaaaaatactttgttaatttaatgtgttggcttcccaactcctgaacacgacacaattttattattagattttgtatggtgattttaggctatgaaaacatgatcattatatgtatatagatacatttttatttgttacaaatgtttgagcagctcactagcccacccctcctctattttgggtaagagaatttactaccttttttaactatgtagttgagagcaacatgtattttgttatttttagaatggtcagtatattgctataaaattttaaatgagactatgaaagttaaagtattctgattctggttaaattaacgaatatggttccaggccctgttctctgggtttttgagagagaataaaggttatgtttgtctta

SEQ ID NO: 431626 - DNA, 1091 bp, Homo sapiens
caattccatctagggcgctctgaatgcctttatttcattcctttttatggctgagtagtattccacggtgtgtgtgtgtgtgtgtgtgtgtgtgtgtgtgattagaaagggcttcattcataccttttcccttggacctggaaaaaaaatttttttatcttttcaaatgaaatctattgatttctagtaatcatatttgaatcaatgttaaagcatatatagtcttatatgtaaactagattcttaagattatttgaacctttgagatgaagtttacactcaactaaaatcattccattgattttattgattaacatcaatcagtatgtttaaagttattctaagaagcaatagtttatttttaaaaaccttgtatagcaaaataacttaaaaccctttgtgatatcatcttaccagtttatttggtaaaaacaaacagttatttggtatttgtcagaattcttcagtgcctgctattacagctattttccaattactaatttgattatactcactcaaggcagtgcaagatcttgaagtactttttagcagttaagtaatattgaattgtattgaatagtttacatagtttattctagtctttgaaaattactgaacatggacaatgtgcatgtcattgacatctgccttagaacttctgggacaatcctgattcgagagattctatcccattatttacatataccaaaaatactttgttaatttaatgtgttggcttcccaactcctgaacacgacacaattttattattagattttgtatggtgattttaggctatgaaaacatgatcattatatgtatatagatacatttttatttgttacaaatgtttgagcagctcactagcccacccctcctctattttgggtaagagaatttactaccttttttaactatgtagttgagagcaacatgtattttgttatttttagaatggtcagtatattgctataaaattttaaatgagactatgaaagttaaagtattctgattctggttaaattaacgaatatggttccaggccctgttctctgggtttttgagagagaataaaggttatgtttgtctta

SEQ ID NO: 431627 - DNA, 2876 bp, Homo sapiens
ctcctcatcttcagcagcatctcgtggatgggtggcaagaaccccttcctgggcatcgcctacctggtcgtcggctccctctgcatcctcaccggctttgtcatgctggtcgtctacattcgctaccaggaccaggacgacgacgacgaggagtgattccggctttccagggatccctcctgcttcttgccaaaactcttgcaaggtgcttttggcatctcctcctcgcccgtcacccaattccaacctcgcctagcttttcctccctttgtgaatgaggggaccagataagggaattaccccccttgctcttggggggctgctagactgtcttgccgcggggagggatgttgactgcagagtgaaacatccttgcaaactcttcccacctccttcacgacactgagttgccatgtgaggttcttcaagtctgagagtggaagggatccctatggagactcctattaaacccctattagaggaagagattgagagacctagcaatgtgaagtaacaaagatcaggcagctgcaagtgactcctgaatcttgagtccagggctttcgccactacagtacagtggttttcttttctttggtcggggagagtgggctggaatggagagtgaggcccacaaattacctgcagagacgtggaggcgtgagggagaacatgcttgttaaatatgcaggtagattaggagacaccaaacagagattcagacacagtaaggctgggatgagatcctcgaagctgtgttttaacaaactccactggagagtcccatattccctcaaatttgggaatcacgaccctgaaccaggttgggcctgaagcagtcaactgaattcactttttcggatagtaatttgttcccaggggcagtgacaaccatgatgttccaggtttggtctggcactctgccttgaacgtaggaagctcttgatgatttgtggaatgaatttttaaaaaattactatctggggaaaactagttggcatacagagttgtaggacagggtttatgtgattcatttgatattttagtattttggtgtaaaagccaacaggcaaactttgccaggtactgtgtagaaactcgaaaatgtgaggccagtttgtacagttcagaggaaatgctttaacgtagaatcagatagctggaagagatcttcgagggaaagtaagttccctaaagtcacatctatgtctcctagctcagtgttctttgtcattgtgtgtgtgtgtgtgtgtgtgtgtgtgtgtgtgtgtgattagaaagggcttcattcataccttttcccttggacctggaaaaaaaatttttttatcttttcaaatgaaatctattgatttctagtaatcatatttgaatcaatgttaaagcatatatagtcttatatgtaaactagattcttaagattatttgaacctttgagatgaagtttacactcaactaaaatcattccattgattttattgattaacatcaatcagtatgtttaaagttattctaagaagcaatagtttatttttaaaaaccttgtatagcaaaataacttaaaaccctttgtgatatcatcttaccagtttatttggtaaaaacaaacagttatttggtatttgtcagaattcttcagtgcctgctattacagctattttccaattactaatttgattatactcactcaaggcagtgcaagatcttgaagtactttttagcagttaagtaatattgaattgtattgaatagtttacatagtttattctagtctttgaaaattactgaacatggacaatgtgcatgtcattgacatctgccttagaacttctgggacaatcctgattcgagagattctatcccattatttacatataccaaaaatactttgttaatttaatgtgttggcttcccaactcctgaacacgacacaattttattattagattttgtatggtgattttaggctatgaaaacatgatcattatatgtatatagatacatttttatttgttacaaatgtttgagcagctcactagcccacccctcctctattttgggtaagagaatttactaccttttttaactatgtagttgagagcaacatgtattttgttatttttagaatggtcagtatattgctataaaattttaaatgagactatgaaagttaaagtattctgattctggttaaattaacgaatatggttccaggccctgttctctgggtttttgagagagaataaaggttatgtttgtcttacctttgttatcgagtttgctgaattcttttgaacgatgatcttaaaggcacaaacaccaccagccactttgctaatttcttaatagcagatttacattgcagcaagaaaaccatcttttatagtaacattcagttaaaatgaactcaattcattgttaacttcctaaaacagaatttgaactttatcaacctcaacgtgtatataaactagatagtcctcaatactttatcaacctcaacatgtatataaactagatagtcctcaaatactgtttgaatttaataaatgtcaatttaaaaatttttgtagtagtcttctgcattttacttcaattataaattgcaattatttattggatattttggacttcaaagcagcagaaactttaaaactgaaatgggaaacgttttcctgcaatgatccctgtgctgtaacattttgtctggtgtctcaggcttccaggttcttgttggcctgaattcccttgttgcccagtaaatgttcactagctagaagtatcttcaggaagtgagatagaaaagagtgaacctcaacaattggactggaaatgagctttgacctaactttgtaaaataaaagcataaaagagaa

SEQ ID NO: 431628 - DNA, 2838 bp, Homo sapiens
ctcctcatcttcagcagcatctcgtggatgggtggcaagaaccccttcctgggcatcgcctacctggtcgtcggctccctctgcatcctcaccggctttgtcatgctggtcgtctacattcgctaccaggaccaggacgacgacgacgaggagtgattccggctttccagggatccctcctgcttcttgccaaaactcttgcaaggtgcttttggcatctcctcctcgcccgtcacccaattccaacctcgcctagcttttcctccctttgtgaatgaggggaccagataagggaattaccccccttgctcttggggggctgctagactgtcttgccgcggggagggatgttgactgcagagtgaaacatccttgcaaactcttcccacctccttcacgacactgagttgccatgtgaggttcttcaagtctgagagtggaagggatccctatggagactcctattaaacccctattagaggaagagattgagagacctagcaatgtgaagtaacaaagatcaggcagctgcaagtgactcctgaatcttgagtccagggctttcgccactacagtacagtggttttcttttctttggtcggggagagtgggctggaatggagagtgaggcccacaaattacctgcagagacgtggaggcgtgagggagaacatgcttgttaaatatgcaggtagattaggagacaccaaacagagattcagacacagtaaggctgggatgagatcctcgaagctgtgttttaacaaactccactggagagtcccatattccctcaaatttgggaatcacgaccctgaaccaggttgggcctgaagcagtcaactgaattcactttttcggatagtaatttgttcccaggggcagtgacaaccatgatgttccaggtttggtctggcactctgccttgaacgtaggaagctcttgatgatttgtggaatgaatttttaaaaaattactatctggggaaaactagttggcatacagagttgtaggacagggtttatgtgattcatttgatattttagtattttggtgtaaaagccaacaggcaaactttgccaggtactgtgtagaaactcgaaaatgtgaggccagtttgtacagttcagaggaaatgctttaacgtagaatcagatagctggaagagatcttcgagggaaagtaagttccctaaagtcacatctatgtctcctagctcagtgttctttgtcattgtgtgtgtgtgtgtgtgtgtgtgtgtgtgtgtgtgtgattagaaagggcttcattcataccttttcccttggacctggaaaaaaaatttttttatcttttcaaatgaaatctattgatttctagtaatcatatttgaatcaatgttaaagcatatatagtcttatatgtaaactagattcttaagattatttgaacctttgagatgaagtttacactcaactaaaatcattccattgattttattgattaacatcaatcagtatgtttaaagttattctaagaagcaatagtttatttttaaaaaccttgtatagcaaaataacttaaaaccctttgtgatatcatcttaccagtttatttggtaaaaacaaacagttatttggtatttgtcagaattcttcagtgcctgctattacagctattttccaattactaatttgattatactcactcaaggcagtgcaagatcttgaagtactttttagcagttaagtaatattgaattgtattgaatagtttacatagtttattctagtctttgaaaattactgaacatggacaatgtgcatgtcattgacatctgccttagaacttctgggacaatcctgattcgagagattctatcccattatttacatataccaaaaatactttgttaatttaatgtgttggcttcccaactcctgaacacgacacaattttattattagattttgtatggtgattttaggctatgaaaacatgatcattatatgtatatagatacatttttatttgttacaaatgtttgagcagctcactagcccacccctcctctattttgggtaagagaatttactaccttttttaactatgtagttgagagcaacatgtattttgttatttttagaatggtcagtatattgctataaaattttaaatgagactatgaaagttaaagtattctgattctggttaaattaacgaatatggttccaggccctgttctctgggtttttgagagagaataaaggttatgtttgtcttaaaaaaaaaaaaaaaaaaaaaaaaaaaaaaaaaaaaaaaaaaaaaaaaaaaaaaaaaaaaaaaaaaaaaaaaacagaggacgcgacacaccaaaccccacaaaaaaaaaaaacaaaccgcaaaaaaacaaggacccaacaatgacacgagcacgccactactccactacacccacaacgaccaacccagccacacacccatcaacaacaccccacgacacgccccgcagagaaccacaccgccgccacacacgccaggcaacactccccgcacagagaccgacaaccatcaacccagcgaggccacgcgtcaccaccaccaacccggccacccaccaaacccaccacccacaccccggccgccactacaccgccccccacacggacgcacaacccaacaccacacacatagcagccccccacacacaccacgccaacaacccccagccgccaccagccgccgcccgcgccgccaaccagacgacaatcgcgcgcgccccacactcggccgacatgccacacccagacaacaacacgacaccacagcacacgaaacccacaaaaacaaccgccccca

SEQ ID NO: 431629 - DNA, 2318 bp, Homo sapiens
ctcctcatcttcagcagcatctcgtggatgggtggcaagaaccccttcctgggcatcgcctacctggtcgtcggctccctctgcatcctcaccggctttgtcatgctggtcgtctacattcgctaccaggaccaggacgacgacgacgaggagtgattccggctttccagggatccctcctgcttcttgccaaaactcttgcaaggtgcttttggcatctcctcctcgcccgtcacccaattccaacctcgcctagcttttcctccctttgtgaatgaggggaccagataagggaattaccccccttgctcttggggggctgctagactgtcttgccgcggggagggatgttgactgcagagtgaaacatccttgcaaactcttcccacctccttcacgacactgagttgccatgtgaggttcttcaagtctgagagtggaagggatccctatggagactcctattaaacccctattagaggaagagattgagagacctagcaatgtgaagtaacaaagatcaggcagctgcaagtgactcctgaatcttgagtccagggctttcgccactacagtacagtggttttcttttctttggtcggggagagtgggctggaatggagagtgaggcccacaaattacctgcagagacgtggaggcgtgagggagaacatgcttgttaaatatgcaggtagattaggagacaccaaacagagattcagacacagtaaggctgggatgagatcctcgaagctgtgttttaacaaactccactggagagtcccatattccctcaaatttgggaatcacgaccctgaaccaggttgggcctgaagcagtcaactgaattcactttttcggatagtaatttgttcccaggggcagtgacaaccatgatgttccaggtttggtctggcactctgccttgaacgtaggaagctcttgatgatttgtggaatgaatttttaaaaaattactatctggggaaaactagttggcatacagagttgtaggacagggtttatgtgattcatttgatattttagtattttggtgtaaaagccaacaggcaaactttgccaggtactgtgtagaaactcgaaaatgtgaggccagtttgtacagttcagaggaaatgctttaacgtagaatcagatagctggaagagatcttcgagggaaagtaagttccctaaagtcacatctatgtctcctagctcagtgttctttgtcattgtgtgtgtgtgtgtgtgtgtgtgtgtgtgtgtgtgtgattagaaagggcttcattcataccttttcccttggacctggaaaaaaaatttttttatcttttcaaatgaaatctattgatttctagtaatcatatttgaatcaatgttaaagcatatatagtcttatatgtaaactagattcttaagattatttgaacctttgagatgaagtttacactcaactaaaatcattccattgattttattgattaacatcaatcagtatgtttaaagttattctaagaagcaatagtttatttttaaaaaccttgtatagcaaaataacttaaaaccctttgtgatatcatcttaccagtttatttggtaaaaacaaacagttatttggtatttgtcagaattcttcagtgcctgctattacagctattttccaattactaatttgattatactcactcaaggcagtgcaagatcttgaagtactttttagcagttaagtaatattgaattgtattgaatagtttacatagtttattctagtctttgaaaattactgaacatggacaatgtgcatgtcattgacatctgccttagaacttctgggacaatcctgattcgagagattctatcccattatttacatataccaaaaatactttgttaatttaatgtgttggcttcccaactcctgaacacgacacaattttattattagattttgtatggtgattttaggctatgaaaacatgatcattatatgtatatagatacatttttatttgttacaaatgtttgagcagctcactagcccacccctcctctattttgggtaagagaatttactaccttttttaactatgtagttgagagcaacatgtattttgttatttttagaatggtcagtatattgctataaaattttaaatgagactatgaaagttaaagtattctgattctggttaaattaacgaatatggttccaggccctgttctctgggtttttgagagagaataaaggttatgtttgtcttataccaaaaagaaccatttggccatgatttttataaaaaccttcagggggggccct

SEQ ID NO: 431630 - DNA, 521 bp, Homo sapiens
ttgaggcacatttcctgtcccctggcaactctgtgtgtaacgtttcaaacccaaggcattgtacaagggagaggagtactttgggtttacatggttgagggtgatgatgaatcctcttatttcatgtgtaagaagaccgggttatttgttgccatgccccacactgatgctggggccaaggcaagcaaaaggggacgcctaagtcctagcctaatgtctgtcttctgtagagcaagctgaactttcaaaggtatttctcgttttacctgttttgtaaatgaatatgctaactttgcacgccgcagaggaatgtgagatatagagagcaggccgaggtccatggggcttcataaagggcattttgagcagctggaggcttgtggttaccatgtccaggctcttcccctgctctccttaactatcctacagatgcctctgacctgggaggaaggaagagaagccctcatctcctgactgagagtgggaagtggcagtcactaaatgtgctgacgtgtgacatt

SEQ ID NO: 431631 - DNA, 1420 bp, Homo sapiens
ggcctgggctgtccggcccactcccctgggagcgcgagcggtggacccaggcggccatgtcccgccctcgcatgcgcctggtggtcaccgcggacgactttggttactgcccgcgacgcgatgagggtatcgtggaggcctttctggccggggctgtgaccagcgtgtccctgctggtcaacggtgcggccacggagagcgcggcggagctggcccgcaggcacagcatccccacgggcctccacgccaacctgtccgagggccgccccgtgggtccggcccgccgtggcgcctcatcgctgctcggcccggaaggcttcttccttggcaagatgggattccgggaggcggtggcggccggagacgtggatttgcctcaggtgcggagccgcagctacaggaggatgctcgcgaggacccccagagctccgcccggagggtgcgggaggagctcgaggcccaactaagctgcttccgggagctgctgggcagggcccccacgcacgcggacgggcaccagcacgtgcacgtgctcccaggcgtgtgccaggtgttcgccgaggcgctgcaggcctatggggtgcgctttacgcgactgccgctggagcgcggtgtgggtggctgcacttggctggaggcccccgcgcgtgccttcgcctgcgccgtggagcgcgacgcccgggccgccgtgggccccttctcccgccacggcctgcggtggacagacgccttcgtgggcctgagcacttgcggccggcacatgtccgctcaccgcgtgtccggggccctggcgcgggtcctggaaggtaccctagcgggccacaccctgacagccgagctgatggcgcaccccggctaccccagtgtgcctcccaccggcggctgcggtgaaggccccgacgctttctcttgctcttgggagcggctgcatgagctgcgcgtcctcaccgcgcccacgctgcgggcccagcttgcccaggatggcgtgcagctttgcgccctcgacgacctggactccaagaggccaggggaggaggtcccctgtgagcccactctggaacccttcctggaaccctccctactctgaccccctacagacaaccaagcactaatccccttagtaccaagaaaggggagccaggatttagtcctggcccagcccagagctgggacctggagcacgatctgttgacttccctgggtaggacactgccacctctgggctcaggtcctcatgcctccaaatggcatctagagtttgagcagccttcttggctgcaggcaggcctagcctgtggcagcgggctagggcccgcagagcatttggtgcccctccatgttgcaatgcaaacaccttcaccactggggcagtggggagagatggctatattaataaaataacgtgtgtctttcaaaaaag

SEQ ID NO: 431632 - DNA, 1361 bp, Homo sapiens
ggcctgggctgtccggcccactcccctgggagcgcgagcggtggacccaggcggccatgtcccgccctcgcatgcgcctggtggtcaccgcggacgactttggttactgcccgcgacgcgatgagggtatcgtggaggcctttctggccggggctgtgaccagcgtgtccctgctggtcaacggtgcggccacggagagcgcggcggagctggcccgcaggcacagcatccccacgggcctccacgccaacctgtccgagggccgccccgtgggtccggcccgccgtggcgcctcatcgctgctcggcccggaaggcttcttccttggcaagatgggattccgggaggcggtggcggccggagacgtggatttgcctcaggtgcgggaggagctcgaggcccaactaagctgcttccgggagctgctgggcagggcccccacgcacgcggacgggcaccagcacgtgcacgtgctcccaggcgtgtgccaggtgttcgccgaggcgctgcaggcctatggggtgcgctttacgcgactgccgctggagcgcggtgtgggtggctgcacttggctggaggcccccgcgcgtgccttcgcctgcgccgtggagcgcgacgcccgggccgccgtgggccccttctcccgccacggcctgcggtggacagacgccttcgtgggcctgagcacttgcggccggcacatgtccgctcaccgcgtgtccggggccctggcgcgggtcctggaaggtaccctagcgggccacaccctgacagccgagctgatggcgcaccccggctaccccagtgtgcctcccaccggcggctgcggtgaaggccccgacgctttctcttgctcttgggagcggctgcatgagctgcgcgtcctcaccgcgcccacgctgcgggcccagcttgcccaggatggcgtgcagctttgcgccctcgacgacctggactccaagaggccaggggaggaggtcccctgtgagcccactctggaacccttcctggaaccctccctactctgaccccctacagacaaccaagcactaatccccttagtaccaagaaaggggagccaggatttagtcctggcccagcccagagctgggacctggagcacgatctgttgacttccctgggtaggacactgccacctctgggctcaggtcctcatgcctccaaatggcatctagagtttgagcagccttcttggctgcaggcaggcctagcctgtggcagcgggctagggcccgcagagcatttggtgcccctccatgttgcaatgcaaacaccttcaccactggggcagtggggagagatggctatattaataaaataacgtgtgtctttcaaaaaag

SEQ ID NO: 431633 - DNA, 1555 bp, Homo sapiens
ggcctgggctgtccggcccactcccctgggagcgcgagcggtggacccaggcggccatgtcccgccctcgcatgcgcctggtggtcaccgcggacgactttggttactgcccgcgacgcgatgagggtatcgtggaggcctttctggccggggctgtgaccagcgtgtccctgctggtcaacggtgcggccacggagagcgcggcggagctggcccgcaggcacagcatccccacgggcctccacgccaacctgtccgagggccgccccgtgggtccggcccgccgtggcgcctcatcgctgctcggcccggaaggcttcttccttggcaagatgggattccgggaggcggtggcggccggagacgtggatttgcctcaggtgcggagccgcagctacaggaggatgctcgcgaggacccccagagctccgcccggagggtactgtgaggccgttaggagctggcggtggatgacttccgcattcaaacactggagccatcacacggaagcacgaggagggtatcctcggcagctactcccggtcgctcaaggtgtctctcgctcgccctctaggtgcgggaggagctcgaggcccaactaagctgcttccgggagctgctgggcagggcccccacgcacgcggacgggcaccagcacgtgcacgtgctcccaggcgtgtgccaggtgttcgccgaggcgctgcaggcctatggggtgcgctttacgcgactgccgctggagcgcggtgtgggtggctgcacttggctggaggcccccgcgcgtgccttcgcctgcgccgtggagcgcgacgcccgggccgccgtgggccccttctcccgccacggcctgcggtggacagacgccttcgtgggcctgagcacttgcggccggcacatgtccgctcaccgcgtgtccggggccctggcgcgggtcctggaaggtaccctagcgggccacaccctgacagccgagctgatggcgcaccccggctaccccagtgtgcctcccaccggcggctgcggtgaaggccccgacgctttctcttgctcttgggagcggctgcatgagctgcgcgtcctcaccgcgcccacgctgcgggcccagcttgcccaggatggcgtgcagctttgcgccctcgacgacctggactccaagaggccaggggaggaggtcccctgtgagcccactctggaacccttcctggaaccctccctactctgaccccctacagacaaccaagcactaatccccttagtaccaagaaaggggagccaggatttagtcctggcccagcccagagctgggacctggagcacgatctgttgacttccctgggtaggacactgccacctctgggctcaggtcctcatgcctccaaatggcatctagagtttgagcagccttcttggctgcaggcaggcctagcctgtggcagcgggctagggcccgcagagcatttggtgcccctccatgttgcaatgcaaacaccttcaccactggggcagtggggagagatggctatattaataaaataacgtgtgtctttcaaaaaag

SEQ ID NO: 431634 - DNA, 1644 bp, Homo sapiens
ggcctgggctgtccggcccactcccctgggagcgcgagcggtggacccaggcggccatgtcccgccctcgcatgcgcctggtggtcaccgcggacgactttggttactgcccgcgacgcgatgagggtatcgtggaggcctttctggccggggctgtgaccagcgtgtccctgctggtcaacggtgcggccacggagagcgcggcggagctggcccgcaggtgaggggagggcctctagcagggcggcgatcggcttggggcgcgcggctccgcggccgctagtgctccagctcgcgctccgccctcaggcacagcatccccacgggcctccacgccaacctgtccgagggccgccccgtgggtccggcccgccgtggcgcctcatcgctgctcggcccggaaggcttcttccttggcaagatgggattccgggaggcggtggcggccggagacgtggatttgcctcaggtgcggagccgcagctacaggaggatgctcgcgaggacccccagagctccgcccggagggtactgtgaggccgttaggagctggcggtggatgacttccgcattcaaacactggagccatcacacggaagcacgaggagggtatcctcggcagctactcccggtcgctcaaggtgtctctcgctcgccctctaggtgcgggaggagctcgaggcccaactaagctgcttccgggagctgctgggcagggcccccacgcacgcggacgggcaccagcacgtgcacgtgctcccaggcgtgtgccaggtgttcgccgaggcgctgcaggcctatggggtgcgctttacgcgactgccgctggagcgcggtgtgggtggctgcacttggctggaggcccccgcgcgtgccttcgcctgcgccgtggagcgcgacgcccgggccgccgtgggccccttctcccgccacggcctgcggtggacagacgccttcgtgggcctgagcacttgcggccggcacatgtccgctcaccgcgtgtccggggccctggcgcgggtcctggaaggtaccctagcgggccacaccctgacagccgagctgatggcgcaccccggctaccccagtgtgcctcccaccggcggctgcggtgaaggccccgacgctttctcttgctcttgggagcggctgcatgagctgcgcgtcctcaccgcgcccacgctgcgggcccagcttgcccaggatggcgtgcagctttgcgccctcgacgacctggactccaagaggccaggggaggaggtcccctgtgagcccactctggaacccttcctggaaccctccctactctgaccccctacagacaaccaagcactaatccccttagtaccaagaaaggggagccaggatttagtcctggcccagcccagagctgggacctggagcacgatctgttgacttccctgggtaggacactgccacctctgggctcaggtcctcatgcctccaaatggcatctagagtttgagcagccttcttggctgcaggcaggcctagcctgtggcagcgggctagggcccgcagagcatttggtgcccctccatgttgcaatgcaaacaccttcaccactggggcagtggggagagatggctatattaataaaataacgtgtgtctttcaaaaaag

SEQ ID NO: 431635 - DNA, 1675 bp, Homo sapiens
ggcctgggctgtccggcccactcccctgggagcgcgagcggtggacccaggcggccatgtcccgccctcgcatgcgcctggtggtcaccgcggacgactttggttactgcccgcgacgcgatgagggtatcgtggaggcctttctggccggggctgtgaccagcgtgtccctgctggtcaacggtgcggccacggagagcgcggcggagctggcccgcaggcacagcatccccacgggcctccacgccaacctgtccgagggccgccccgtgggtccggcccgccgtggcgcctcatcgctgctcggcccggaaggcttcttccttggcaagatgggattccgggaggcggtggcggccggagacgtggatttgcctcaggtgcggagccgcagctacaggaggatgctcgcgaggacccccagagctccgcccggagggtactgtgaggccgttaggagctggcggtggatgacttccgcattcaaacactggagccatcacacggaagcacgaggagggtatcctcggcagctactcccggtcgctcaaggtgtctctcgctcgccctctaggtgcgggaggagctcgaggcccaactaagctgcttccgggagctgctgggcagggcccccacgcacgcggacgggcaccagcacgtgcacgtgctcccaggtgcgtggttagtgatcccagtttggagggcgttactcccaggcggggctgggggagtaggggaagttcgatgcccccaggtgaaaggacgtgctcctccctgacccgctccgcccgcaggcgtgtgccaggtgttcgccgaggcgctgcaggcctatggggtgcgctttacgcgactgccgctggagcgcggtgtgggtggctgcacttggctggaggcccccgcgcgtgccttcgcctgcgccgtggagcgcgacgcccgggccgccgtgggccccttctcccgccacggcctgcggtggacagacgccttcgtgggcctgagcacttgcggccggcacatgtccgctcaccgcgtgtccggggccctggcgcgggtcctggaaggtaccctagcgggccacaccctgacagccgagctgatggcgcaccccggctaccccagtgtgcctcccaccggcggctgcggtgaaggccccgacgctttctcttgctcttgggagcggctgcatgagctgcgcgtcctcaccgcgcccacgctgcgggcccagcttgcccaggatggcgtgcagctttgcgccctcgacgacctggactccaagaggccaggggaggaggtcccctgtgagcccactctggaacccttcctggaaccctccctactctgaccccctacagacaaccaagcactaatccccttagtaccaagaaaggggagccaggatttagtcctggcccagcccagagctgggacctggagcacgatctgttgacttccctgggtaggacactgccacctctgggctcaggtcctcatgcctccaaatggcatctagagtttgagcagccttcttggctgcaggcaggcctagcctgtggcagcgggctagggcccgcagagcatttggtgcccctccatgttgcaatgcaaacaccttcaccactggggcagtggggagagatggctatattaataaaataacgtgtgtctttcaaaaaag

SEQ ID NO: 431636 - DNA, 1898 bp, Homo sapiens
ggcctgggctgtccggcccactcccctgggagcgcgagcggtggacccaggcggccatgtcccgccctcgcatgcgcctggtggtcaccgcggacgactttggttactgcccgcgacgcgatgagggtatcgtggaggcctttctggccggggctgtgaccagcgtgtccctgctggtcaacggtgcggccacggagagcgcggcggagctggcccgcaggcacagcatccccacgggcctccacgccaacctgtccgagggccgccccgtgggtccggcccgccgtggcgcctcatcgctgctcggcccggaaggcttcttccttggcaagatgggattccgggaggcggtggcggccggagacgtggatttgcctcaggtgcggagccgcagctacaggaggatgctcgcgaggacccccagagctccgcccggagggtactgtgaggccgttaggagctggcggtggatgacttccgcattcaaacactggagccatcacacggaagcacgaggagggtatcctcggcagctactcccggtcgctcaaggtgtctctcgctcgccctctaggtgcgggaggagctcgaggcccaactaagctgcttccgggagctgctgggcagggcccccacgcacgcggacgggcaccagcacgtgcacgtgctcccaggtgcgtggttagtgatcccagtttggagggcgttactcccaggcggggctgggggagtaggggaagttcgatgcccccaggtgaaaggacgtgctcctccctgacccgctccgcccgcaggcgtgtgccaggtgttcgccgaggcgctgcaggcctatggggtgcgctttacgcgactgccgctggagcgcggtgtgggtggctgcacttggctggaggcccccgcgcgtgccttcgcctgcgccgtggagcgcgacgcccgggccgccgtgggccccttctcccgccacggcctgcgggtgaggctccccgccccgtctcctaccatagctgcctctgtccctccgcactggctgttcacctggctagctgtgtccgtttctcaacccggaagcgagtctggcgtcgaccgctgccgccaccccagttaccccctcccaccccgccgtcccttccctagcctacctagcccttggccatggcccggcctggtcccacctctgatgtcccgccccccacaggtggacagacgccttcgtgggcctgagcacttgcggccggcacatgtccgctcaccgcgtgtccggggccctggcgcgggtcctggaaggtaccctagcgggccacaccctgacagccgagctgatggcgcaccccggctaccccagtgtgcctcccaccggcggctgcggtgaaggccccgacgctttctcttgctcttgggagcggctgcatgagctgcgcgtcctcaccgcgcccacgctgcgggcccagcttgcccaggatggcgtgcagctttgcgccctcgacgacctggactccaagaggccaggggaggaggtcccctgtgagcccactctggaacccttcctggaaccctccctactctgaccccctacagacaaccaagcactaatccccttagtaccaagaaaggggagccaggatttagtcctggcccagcccagagctgggacctggagcacgatctgttgacttccctgggtaggacactgccacctctgggctcaggtcctcatgcctccaaatggcatctagagtttgagcagccttcttggctgcaggcaggcctagcctgtggcagcgggctagggcccgcagagcatttggtgcccctccatgttgcaatgcaaacaccttcaccactggggcagtggggagagatggctatattaataaaataacgtgtgtctttcaaaaaag

SEQ ID NO: 431637 - DNA, 1377 bp, Homo sapiens
ggcctgggctgtccggcccactcccctgggagcgcgagcggtggacccaggcggccatgtcccgccctcgcatgcgcctggtggtcaccgcggacgactttggttactgcccgcgacgcgatgagggtatcgtggaggcctttctggccggggctgtgaccagcgtgtccctgctggtcaacggtgcggccacggagagcgcggcggagctggcccgcaggcacagcatccccacgggcctccacgccaacctgtccgagggccgccccgtgggtccggcccgccgtggcgcctcatcgctgctcggcccggaaggcttcttccttggcaagatgggattccgggaggcggtggcggccggagacgtggatttgcctcaggtgcggagccgcagctacaggaggatgctcgcgaggacccccagagctccgcccggagggtactgtgaggccgttaggagctggcggtggatgacttccgcattcaaacactggagccatcacacggaagcacgaggagggtatcctcggcagctactcccggtcgctcaaggtgtctctcgctcgccctctaggtgcgggaggagctcgaggcccaactaagctgcttccgggagctgctgggcagggcccccacgcacgcggacgggcaccagcacgtgcacgtgctcccaggtggacagacgccttcgtgggcctgagcacttgcggccggcacatgtccgctcaccgcgtgtccggggccctggcgcgggtcctggaaggtaccctagcgggccacaccctgacagccgagctgatggcgcaccccggctaccccagtgtgcctcccaccggcggctgcggtgaaggccccgacgctttctcttgctcttgggagcggctgcatgagctgcgcgtcctcaccgcgcccacgctgcgggcccagcttgcccaggatggcgtgcagctttgcgccctcgacgacctggactccaagaggccaggggaggaggtcccctgtgagcccactctggaacccttcctggaaccctccctactctgaccccctacagacaaccaagcactaatccccttagtaccaagaaaggggagccaggatttagtcctggcccagcccagagctgggacctggagcacgatctgttgacttccctgggtaggacactgccacctctgggctcaggtcctcatgcctccaaatggcatctagagtttgagcagccttcttggctgcaggcaggcctagcctgtggcagcgggctagggcccgcagagcatttggtgcccctccatgttgcaatgcaaacaccttcaccactggggcagtggggagagatggctatattaataaaataacgtgtgtctttcaaaaaag

SEQ ID NO: 431638 - DNA, 1466 bp, Homo sapiens
ggcctgggctgtccggcccactcccctgggagcgcgagcggtggacccaggcggccatgtcccgccctcgcatgcgcctggtggtcaccgcggacgactttggttactgcccgcgacgcgatgagggtatcgtggaggcctttctggccggggctgtgaccagcgtgtccctgctggtcaacggtgcggccacggagagcgcggcggagctggcccgcaggtgaggggagggcctctagcagggcggcgatcggcttggggcgcgcggctccgcggccgctagtgctccagctcgcgctccgccctcaggcacagcatccccacgggcctccacgccaacctgtccgagggccgccccgtgggtccggcccgccgtggcgcctcatcgctgctcggcccggaaggcttcttccttggcaagatgggattccgggaggcggtggcggccggagacgtggatttgcctcaggtgcggagccgcagctacaggaggatgctcgcgaggacccccagagctccgcccggagggtactgtgaggccgttaggagctggcggtggatgacttccgcattcaaacactggagccatcacacggaagcacgaggagggtatcctcggcagctactcccggtcgctcaaggtgtctctcgctcgccctctaggtgcgggaggagctcgaggcccaactaagctgcttccgggagctgctgggcagggcccccacgcacgcggacgggcaccagcacgtgcacgtgctcccaggtggacagacgccttcgtgggcctgagcacttgcggccggcacatgtccgctcaccgcgtgtccggggccctggcgcgggtcctggaaggtaccctagcgggccacaccctgacagccgagctgatggcgcaccccggctaccccagtgtgcctcccaccggcggctgcggtgaaggccccgacgctttctcttgctcttgggagcggctgcatgagctgcgcgtcctcaccgcgcccacgctgcgggcccagcttgcccaggatggcgtgcagctttgcgccctcgacgacctggactccaagaggccaggggaggaggtcccctgtgagcccactctggaacccttcctggaaccctccctactctgaccccctacagacaaccaagcactaatccccttagtaccaagaaaggggagccaggatttagtcctggcccagcccagagctgggacctggagcacgatctgttgacttccctgggtaggacactgccacctctgggctcaggtcctcatgcctccaaatggcatctagagtttgagcagccttcttggctgcaggcaggcctagcctgtggcagcgggctagggcccgcagagcatttggtgcccctccatgttgcaatgcaaacaccttcaccactggggcagtggggagagatggctatattaataaaataacgtgtgtctttcaaaaaag

SEQ ID NO: 431639 - DNA, 1183 bp, Homo sapiens
ggcctgggctgtccggcccactcccctgggagcgcgagcggtggacccaggcggccatgtcccgccctcgcatgcgcctggtggtcaccgcggacgactttggttactgcccgcgacgcgatgagggtatcgtggaggcctttctggccggggctgtgaccagcgtgtccctgctggtcaacggtgcggccacggagagcgcggcggagctggcccgcaggcacagcatccccacgggcctccacgccaacctgtccgagggccgccccgtgggtccggcccgccgtggcgcctcatcgctgctcggcccggaaggcttcttccttggcaagatgggattccgggaggcggtggcggccggagacgtggatttgcctcaggtgcgggaggagctcgaggcccaactaagctgcttccgggagctgctgggcagggcccccacgcacgcggacgggcaccagcacgtgcacgtgctcccaggtggacagacgccttcgtgggcctgagcacttgcggccggcacatgtccgctcaccgcgtgtccggggccctggcgcgggtcctggaaggtaccctagcgggccacaccctgacagccgagctgatggcgcaccccggctaccccagtgtgcctcccaccggcggctgcggtgaaggccccgacgctttctcttgctcttgggagcggctgcatgagctgcgcgtcctcaccgcgcccacgctgcgggcccagcttgcccaggatggcgtgcagctttgcgccctcgacgacctggactccaagaggccaggggaggaggtcccctgtgagcccactctggaacccttcctggaaccctccctactctgaccccctacagacaaccaagcactaatccccttagtaccaagaaaggggagccaggatttagtcctggcccagcccagagctgggacctggagcacgatctgttgacttccctgggtaggacactgccacctctgggctcaggtcctcatgcctccaaatggcatctagagtttgagcagccttcttggctgcaggcaggcctagcctgtggcagcgggctagggcccgcagagcatttggtgcccctccatgttgcaatgcaaacaccttcaccactggggcagtggggagagatggctatattaataaaataacgtgtgtctttcaaaaaag

SEQ ID NO: 431640 - DNA, 873 bp, Homo sapiens
ggcctgggctgtccggcccactcccctgggagcgcgagcggtggacccaggcggccatgtcccgccctcgcatgcgcctggtggtcaccgcggacgactttggttactgcccgcgacgcgatgagggtatcgtggaggcctttctggccggggctgtgaccagcgtgtccctgctggtcaacggtgcggccacggagagcgcggcggagctggcccgcaggcacagcatccccacgggcctccacgccaacctgtccgagggccgccccgtgggtccggcccgccgtggcgcctcatcgctgctcggcccggaaggcttcttccttggcaagatgggattccgggaggcggtggcggccggagacgtggatttgcctcaggtgcggagccgcagctacaggaggatgctcgcgaggacccccagagctccgcccggagggtactgtgaggccgttaggagctggcggtggatgacttccgcattcaaacactggagccatcacacggaagcacgaggagggtatcctcggcagctactcccggtcgctcaaggtgtctctcgctcgccctctaggtgcgggaggagctcgaggcccaactaagctgcttccgggagctgctgggcagggcccccacgcacgcggacgggcaccagcacgtgcacgtgctcccaggtggacagacgccttcgtgggcctgagcacttgcggccggcacatgtccgctcaccgcgtgtccggggccctggcgcgggtcctggaaggtaccctagcgggcaaaccggcgactgatggcacccggaacccaggggccccacgggggggggaagccccccacacatgcccggaagacgccgaggcaacaggccggccc

SEQ ID NO: 431641 - DNA, 1109 bp, Homo sapiens
ggcctgggctgtccggcccactcccctgggagcgcgagcggtggacccaggcggccatgtcccgccctcgcatgcgcctggtggtcaccgcggacgactttggttactgcccgcgacgcgatgagggtatcgtggaggcctttctggccggggctgtgaccagcgtgtccctgctggtcaacggtgcggccacggagagcgcggcggagctggcccgcaggcacagcatccccacgggcctccacgccaacctgtccgagggccgccccgtgggtccggcccgccgtggcgcctcatcgctgctcggcccggaaggcttcttccttggcaagatgggattccgggaggcggtggcggccggagacgtggatttgcctcaggtgcggagccgcagctacaggaggatgctcgcgaggacccccagagctccgcccggagggtgcgggaggagctcgaggcccaactaagctgcttccgggagctgctgggcagggcccccacgcacgcggacgggcaccagcacgtgcacgtgctcccaggtggacagacgccttcgtgggcctgagcacttgcggccggcacatgtccgctcaccgcgtgtccggggccctggcgcgggtcctggaaggtaccctagcgggccacaccctgacagccgagctgatggcgcaccccggctaccccagtgtgcctcccaccggcggctgcggtgaaggccccgacgctttctcttgctcttgggagcggctgcatgagctgcgcgtcctcaccgcgcccacgctgcgggcccagcttgcccaggatggcgtgcagctttgcgccctcgacgacctggactccaagaggccaggggaggaggtcccctgtgagcccactctggaacccttcctggaaccctccctactctgaccctaagaaacaagatatccctagtacagaagggacagaatatcctggcagcaagtggctgacacgacgtgataccggtgacgccctggcagccctgccaaggtaattggacctggggagcaacgggggagccaatggcctggaccggggggggttaaggttcaaaaccttggggggtctctcattttgtagtaggtcac

SEQ ID NO: 431642 - DNA, 3443 bp, Homo sapiens
  misc_feature (1606)..(1606): n is a, c, g, or t
aagagcagccattgtcccgcgcgcggacgcttgctgtcgccgagcagctcggcccttcagacttaacccccagcggccttgcggatgctgactaggagaggggaccgaactagcttaacccgagtcggccgtgttgcagaatcggggcagggggttgcctaacccgagttcgtcctgccgcagagccgtgctaggcactgaggcggtgacaggcccagcctgggctgcgggccagcggacgcccaggttggtaggggcgtggggcagcgcttggtgtccgatgcgcgcatgcgcagggtctacgcgggaagctggaagtggtgcagctcaggacctcagcaccctgctgtgcctggaggagagcatggaagagcaggatgagaagcccccagagcccccgaaggtctgtgcacaggattctttccttcctcaagagattatcatcaaagtcgagggagaagacactgggtctctgaccatcccatctcaggaaggagtgaacttcaaaattgtgactgtggacttcacacgggaggaacagggtacttgcaaccctgctcagaggaccctggacagagatgtgatcctggagaaccacagggacctagtctcttgggacttggcaactgcagttggaaaaaaagattcaacttcaaagcagaggatttttgatgaagaaccagctaatggagtgaagatagaaaggtttacaagggatgatccttggttatcttcatgtgaagaagtggatgattgtaaagaccagttggagaagcaacaggaaaaacaagagatacttttgcaggaagtggcattcactcaaaggaaagcagttattcatgagagagtctgcaaaagtgatgaaactggggagaagagtggtctgaattccagtctattttcatccccagttatacccataagaaaccattttcataaacatgtatcacatgctaaaaaatggcatcttaatgctgctgtaaacagtcatcagaagattaatgagaatgagacactatatgaaaataatgaatgtggaaaaccccctcagagcattcaccttattcagtttacaagaactcaaacaaaagataaatcctatggatttagtgaccgtattcaatctttttgccatggtacacccctacatatacatgaaaaaattcatggaggaggaaaaacctttgattttaaagaatgtgggcaggttttgaaccccaaaatatcccataatgaacaacagagaattccttttgaagagagtcaatataaatgtagtgaaacctctcatagttcctcccttactcaaaacatgagaaataattctgaagagaaaccttttgaatgtaatcagtgtgggaaatccttcagctggagctcgcatcttgttgcacatcagagaactcacacaggggagaaaccttatgaatgtagtgaatgtggaaaatccttcagccggagctcgcaccttgtttcccatcagagaactcatactggagagaaaccttacaggtgtaatcaatgtgggaaatcctttagccagagttatgtccttgttgtgcatcaaagaactcatactggggagaagccttatgaatgcaatcantgtggaaagtcattcaggcagagctataaacttattgcacatcaaagaacacataccggagagaagccctatgaatgtaatcaatgtgggaaatcatttatccagagctataaacttattgcacatcaaagaattcatactggggaaaaaccctatgaatgcaatcagtgtgggaaatcctttagtcaaagttataaacttgttgctcatcagagaactcacacaggagaaaaaccctttgaatgtaatcagtgtgggaaatccttcagctggagctctcagcttgttgcacatcaaagaactcacactggagagaaaccgtatgaatgtagtgaatgtggaaaatcttttaaccgcagttctcaccttgttatgcatcagagaattcacactggggaaaaaccgtatgaatgtaatcagtgtgggaaatccttcagccagagttatgttcttgttgtacatcagagaactcatactggagaaaagccctatgaatgcagtcaatgtgggaagtccttcagacagagttcatgccttactcaacatcagagaactcatactggagagaaaccatttgaatgtaatcagtgtggaaaaacatttagcttgagtgctcgacttattgtgcatcaaagaactcatactggagagaaaccctttacatgtattcagtgtggaaaagctttcattaatagctataaacttattaggcatcaggcaactcatactgaagagaaactctatgaatgtaactagtttgtaaatcagctgggatttcttcctttttatttcattcttttaaaaaatttattttaaggtagtacatgtagttggaagaactactataaaaacaatatatgtgggaaaacttccagccctctgttaattgtgtgtctcaaatttgttctggaaaagaaagggggaaagtctatgaacgacttttcaacctggcaattccatatacaatgttaaacttgattcttatgacatattcctatgaaaataataaatactggcacttttccttgcagaaagcactcagacctgaatcagagaaaatcatatgccaaagccaactgccagtgttagacctctttttccataaagagtaaatggaatgctaacactagtgggcttattgagaaaatttaaaggttgctgtagtgtttagaacttaggctggaaaaccatattttagtgcatcattttactacatgatcttccaattagatagcttgtaatctgttccttacagcacttgctgttgttacatgtgaagattttataaattttaggaaagtgtctatgatatatagtgaaaagtgtgggaaaagaatatagaaataatattcacttctaaaaccattatgataaaatatttgtgtatggattagaatagaaagggattatggatgtatctattcaatttctcagtttatgttgggccttcctttttggaatgtacgctgttatgctatgataaatgatataatgagtaaaaattattcaaagccaaaaatgaaatacaaagatttccttctttgactatttaggaaagactaagcaaccaaatagcaaagatccctcaggataatgaggtttatgtttggaatagcatgagcagattactacttaggacacagattcctaggaacattcctcattgaaaataaaatggattcctgggaaataggtaactagaaattttggccagaaatggtttcatatgaagaactgagaatgcgtgggaagtatagagggcaagtgggcttattttcatatatgcaaagcaatattaaggaactctattttcatgttttagttcttcccctcatgt

SEQ ID NO: 431643 - DNA, 3366 bp, Homo sapiens
  misc_feature (1529)..(1529): n is a, c, g, or t
aagagcagccattgtcccgcgcgcggacgcttgctgtcgccgagcagctcggcccttcagacttaacccccagcggccttgcggatgctgactaggagaggggaccgaactagcttaacccgagtcggccgtgttgcagaatcggggcagggggttgcctaacccgagttcgtcctgccgcagagccgtgctaggcactgaggcggtgacaggcccagcctgggctgcgggccagcggacgcccagcagctcaggacctcagcaccctgctgtgcctggaggagagcatggaagagcaggatgagaagcccccagagcccccgaaggtctgtgcacaggattctttccttcctcaagagattatcatcaaagtcgagggagaagacactgggtctctgaccatcccatctcaggaaggagtgaacttcaaaattgtgactgtggacttcacacgggaggaacagggtacttgcaaccctgctcagaggaccctggacagagatgtgatcctggagaaccacagggacctagtctcttgggacttggcaactgcagttggaaaaaaagattcaacttcaaagcagaggatttttgatgaagaaccagctaatggagtgaagatagaaaggtttacaagggatgatccttggttatcttcatgtgaagaagtggatgattgtaaagaccagttggagaagcaacaggaaaaacaagagatacttttgcaggaagtggcattcactcaaaggaaagcagttattcatgagagagtctgcaaaagtgatgaaactggggagaagagtggtctgaattccagtctattttcatccccagttatacccataagaaaccattttcataaacatgtatcacatgctaaaaaatggcatcttaatgctgctgtaaacagtcatcagaagattaatgagaatgagacactatatgaaaataatgaatgtggaaaaccccctcagagcattcaccttattcagtttacaagaactcaaacaaaagataaatcctatggatttagtgaccgtattcaatctttttgccatggtacacccctacatatacatgaaaaaattcatggaggaggaaaaacctttgattttaaagaatgtgggcaggttttgaaccccaaaatatcccataatgaacaacagagaattccttttgaagagagtcaatataaatgtagtgaaacctctcatagttcctcccttactcaaaacatgagaaataattctgaagagaaaccttttgaatgtaatcagtgtgggaaatccttcagctggagctcgcatcttgttgcacatcagagaactcacacaggggagaaaccttatgaatgtagtgaatgtggaaaatccttcagccggagctcgcaccttgtttcccatcagagaactcatactggagagaaaccttacaggtgtaatcaatgtgggaaatcctttagccagagttatgtccttgttgtgcatcaaagaactcatactggggagaagccttatgaatgcaatcantgtggaaagtcattcaggcagagctataaacttattgcacatcaaagaacacataccggagagaagccctatgaatgtaatcaatgtgggaaatcatttatccagagctataaacttattgcacatcaaagaattcatactggggaaaaaccctatgaatgcaatcagtgtgggaaatcctttagtcaaagttataaacttgttgctcatcagagaactcacacaggagaaaaaccctttgaatgtaatcagtgtgggaaatccttcagctggagctctcagcttgttgcacatcaaagaactcacactggagagaaaccgtatgaatgtagtgaatgtggaaaatcttttaaccgcagttctcaccttgttatgcatcagagaattcacactggggaaaaaccgtatgaatgtaatcagtgtgggaaatccttcagccagagttatgttcttgttgtacatcagagaactcatactggagaaaagccctatgaatgcagtcaatgtgggaagtccttcagacagagttcatgccttactcaacatcagagaactcatactggagagaaaccatttgaatgtaatcagtgtggaaaaacatttagcttgagtgctcgacttattgtgcatcaaagaactcatactggagagaaaccctttacatgtattcagtgtggaaaagctttcattaatagctataaacttattaggcatcaggcaactcatactgaagagaaactctatgaatgtaactagtttgtaaatcagctgggatttcttcctttttatttcattcttttaaaaaatttattttaaggtagtacatgtagttggaagaactactataaaaacaatatatgtgggaaaacttccagccctctgttaattgtgtgtctcaaatttgttctggaaaagaaagggggaaagtctatgaacgacttttcaacctggcaattccatatacaatgttaaacttgattcttatgacatattcctatgaaaataataaatactggcacttttccttgcagaaagcactcagacctgaatcagagaaaatcatatgccaaagccaactgccagtgttagacctctttttccataaagagtaaatggaatgctaacactagtgggcttattgagaaaatttaaaggttgctgtagtgtttagaacttaggctggaaaaccatattttagtgcatcattttactacatgatcttccaattagatagcttgtaatctgttccttacagcacttgctgttgttacatgtgaagattttataaattttaggaaagtgtctatgatatatagtgaaaagtgtgggaaaagaatatagaaataatattcacttctaaaaccattatgataaaatatttgtgtatggattagaatagaaagggattatggatgtatctattcaatttctcagtttatgttgggccttcctttttggaatgtacgctgttatgctatgataaatgatataatgagtaaaaattattcaaagccaaaaatgaaatacaaagatttccttctttgactatttaggaaagactaagcaaccaaatagcaaagatccctcaggataatgaggtttatgtttggaatagcatgagcagattactacttaggacacagattcctaggaacattcctcattgaaaataaaatggattcctgggaaataggtaactagaaattttggccagaaatggtttcatatgaagaactgagaatgcgtgggaagtatagagggcaagtgggcttattttcatatatgcaaagcaatattaaggaactctattttcatgttttagttcttcccctcatgt

SEQ ID NO: 431644 - DNA, 3830 bp, Homo sapiens
agtactaggggacttcctctgcgcgccggcttcctgcccagctggcatttaaaccaccgcctggggctgcaggatgctgctgcggatgcagagctgtccgcgggctgggcagcgtcgccgtctcccctgagccgcctcggtccggcaggagcggagccgaagcatcccttgctgcacgcagggcagagcaggcgagggctgggggccgatcggggaccccggcatctggcagtttccttgcaggttcaactttaattgccaagatttcacccctcctcctcaagcccagattatttatcctccctccggcctgggctgctggatgcagcagcggctgggcttggtcccaggagcagggagagtgcgctcccggccctcctagccgcgtgcccgggccatggtgcggctgagccccgcgcttgggtgaggcggcggcgcggctcggagcccggcggaccggtcctacgggacatcttcccctgaggaggagtcttcccctggggctgcgtgccgggggcgagcggcggccgcgatgttcagctggctgggtacggacgaccgccggaggaaggaccccgaggttttccagacggtgagtgaggggctcaagaaactctacaagagcaagctgctgcccttggaagagcattaccgcttccacgagttccactcgcccgccctggaggatgccgacttcgacaacaagcccatggttctgctggtgggccagtactccactgggaagaccaccttcatcaggtacctgctggaacaggacttcccaggcatgaggattgggcctgagcccaccacagactccttcattgcggtgatgcagggagacatggaggggatcatccctgggaacgccctggtggtggatcccaagaaacccttcaggaaactcaacgcctttggcaacgccttcttgaacaggttcgtgtgtgcccagctacctaaccctgtgctggagagcatcagcgtcatcgacacaccagggatcctctctggggagaagcagaggatcagccgggggtatgactttgcagctgtccttgagtggtttgccgagcgggttgaccgcatcattctgctcttcgatgcccacaaactggacatctctgatgagttctcagaagtcatcaaagccctcaagaaccacgaggacaagatgcgagtggtgctgaacaaagctgaccagatcgagacgcagcagctgatgcgggtgtacggggccctcatgtggtccttggggaagatcgtgaacaccccagaggtgatccgggtctacatcggctccttctggtcccaccccctcctcatccctgacaaccggaagctctttgaggctgaggaacaggacctattcagggacatccagagtctgccccgaaatgctgccctgcgcaagctcaacgacctcatcaaaagggccaggctggccaaggtccacgcctacatcatcagctctctgaagaaggagatgccctcggtgttcgggaaggacaacaagaagaaggagctggtcaacaacctggccgagatctatggccggatcgagcgggagcaccagatctcacctggggacttccccaatctgaagaggatgcaggaccagctgcaggcccaggactttagcaagttccagccgctgaagagcaagctgctggaggtagtggacgacatgctggcccatgacattgcccagctcatggtgctagtgcgccaggaggagtcacagcggcccatccagatggtgaagggcggagcgttcgagggcaccctgcacggcccctttgggcatggctatggggagggggctggagaaggtatcgatgatgctgagtgggtggtggccagggacaagcccatgtacgacgagatcttctacaccctgtcaccggtggatggcaagatcacaggcgctaatgccaagaaggagatggtgcgctccaagctgcccaacagtgtgctgggcaagatctggaagctggccgacattgacaaggatggcatgctggacgacgacgagtttgcactggccaaccacctcatcaaagtcaagctggaggggcacgagctgcccaacgagctgcctgcccacctcctgcccccgtccaagaggaaagttgccgagtgatggggtggggggacattcagacgggcagtgttagaggaggagatgggagcggtgactacacacacacacacacacacacacacacacacaaacatgcacacacacatatgcatatcttgacattgctctgtaggtgagagaggaccatgacgcccacgtttgcagctgatacttgtttgggcacacctccaagttctcgggattagaaggacaagagcactcccaggccccagagtctaagcctaagtctctatcgctcttcccctctcctcggccactccccagataccagacctgaggcaattcacttgccagcacagatggccaacccacctccagattccccagtgcttccacacccgggctctgagcaaatggaaaagacttttcatttagtagacaattcacttctttttctgtgcttcccctatctgctttggcttcctaataagaaatccattcaagagctaggagatctgagggcaggcgggcagctgcagggaggagaggtgagaaaggaagcgtcttctagagacattggcccaggagctctgttctttcctaatctaagcctctgtcttcttcggcaaaccttgctttgaactctgccagtatttcattttaaagaatcccagagcgggagagagaagagaaaaaaattgataagagtgaggaaattgtcctgtagtctattgaaaaccagtcaaggtggttttagttcatagattttgttagatgttctttccacctggcctatgatgtttagatgttcatacttgactcacatttacccagcccctcctgcgtaccaggagctgtgttaggcactttatatacattattctatgtggccctcactgatgccccagggaagtatgcattagccttcccattttgcagttgaggaggctgagtagcctcagaagggtttaggcgaccttctgaaactcacagaagtcacgtgatggagagaggattcaaagccagggcctcagaccctcacacacttgtctgtgctatgatgtatgcaggatcccagcattgatacccaatgacaaactatggagaacaagcaaagtatgcaggccccctgcagcctcccaggacaggctggcaagggaggagggccggccagcatttggtgggccatcagtctggccatctgtcacgtcacagaagcaaaccgtgccttctggctctgcgccccatattcccagcatcatagacatccaacagcaccagcaggagagtgggctagcctgctggatgctgttcgtgcctgtccctgctctgcctcccacccagttgcctgaatcatcccagctcagatgcagccactgtctcttgtcaagtgggacctcatactattctcagaaggctaacttgagaggtttggggccttgttccccagagggtccccagggactctgcagtgtccttggcaaatccccactgtactcaatgccctacattctcttctgtggtctctcccctggcttgcttcatggccactgaaccaatcactttgtatgctatgctcctactgtgatggaaaacaaaatgagtataacttattttatatccatattcagactatatagagaatattctatgcatctatgacgtgcttactactgcagtgcatttgtcattagtcttcatgttaatacagtacatttattctttggta

SEQ ID NO: 431645 - DNA, 237 bp, Homo sapiens
  misc_feature (4)..(4): n is a, c, g, or t
  misc_feature (13)..(13): n is a, c, g, or t
  misc_feature (34)..(34): n is a, c, g, or t
  misc_feature (45)..(45): n is a, c, g, or t
  misc_feature (61)..(61): n is a, c, g, or t
  misc_feature (69)..(69): n is a, c, g, or t
  misc_feature (73)..(73): n is a, c, g, or t
  misc_feature (79)..(79): n is a, c, g, or t
aganagaaacaanaggatgtatagtgccttctancagcagacctntttttctctctctctntctctctntctntctctntctctctcctactgtgatggaaaacaaaatgagtataacttattttatatccatattcagactatatagagaatattctatgcatctatgacgtgcttactactgcagtgcatttgtcattagtcttcatgttaatacagtacatttattctttggta

SEQ ID NO: 431646 - DNA, 3524 bp, Homo sapiens
atattaaagaactaaccggttaaataaagacctatgaaaacccagcagagtctacggaaggtttagttctaaccatgcctttgtgtgggtacttcagcaggttaccttcagttatggagtctgtaatactctgtgtaagaatcatttcaatccatgctttgtttttgagcccaaaccttgctccttctacccccgcccaccagcccccaaccaattgagaaagggaaaaagataaggaccaaaaaacagaatattttaagttcagctgaaattccacctcctctacaaggttctttggacttgttatccagcaggcatttctcccggccatgagatcttgctgcggtggccctgccctcccctctgactcgcatgttgtctgccttatagtagacatgccgtgttgatctttgcgcagaacgcctgcattaggactgtgcttcttcctgctaggtacctgctggaacaggacttcccaggcatgaggattgggcctgagcccaccacagactccttcattgcggtgatgcagggagacatggaggggatcatccctgggaacgccctggtggtggatcccaagaaacccttcaggaaactcaacgcctttggcaacgccttcttgaacaggttcgtgtgtgcccagctacctaaccctgtgctggagagcatcagcgtcatcgacacaccagggatcctctctggggagaagcagaggatcagccgggggtatgactttgcagctgtccttgagtggtttgccgagcgggttgaccgcatcattctgctcttcgatgcccacaaactggacatctctgatgagttctcagaagtcatcaaagccctcaagaaccacgaggacaagatgcgagtggtgctgaacaaagctgaccagatcgagacgcagcagctgatgcgggtgtacggggccctcatgtggtccttggggaagatcgtgaacaccccagaggtgatccgggtctacatcggctccttctggtcccaccccctcctcatccctgacaaccggaagctctttgaggctgaggaacaggacctattcagggacatccagagtctgccccgaaatgctgccctgcgcaagctcaacgacctcatcaaaagggccaggctggccaaggtccacgcctacatcatcagctctctgaagaaggagatgccctcggtgttcgggaaggacaacaagaagaaggagctggtcaacaacctggccgagatctatggccggatcgagcgggagcaccagatctcacctggggacttccccaatctgaagaggatgcaggaccagctgcaggcccaggactttagcaagttccagccgctgaagagcaagctgctggaggtagtggacgacatgctggcccatgacattgcccagctcatggtgctagtgcgccaggaggagtcacagcggcccatccagatggtgaagggcggagcgttcgagggcaccctgcacggcccctttgggcatggctatggggagggggctggagaaggtatcgatgatgctgagtgggtggtggccagggacaagcccatgtacgacgagatcttctacaccctgtcaccggtggatggcaagatcacaggcgctaatgccaagaaggagatggtgcgctccaagctgcccaacagtgtgctgggcaagatctggaagctggccgacattgacaaggatggcatgctggacgacgacgagtttgcactggccaaccacctcatcaaagtcaagctggaggggcacgagctgcccaacgagctgcctgcccacctcctgcccccgtccaagaggaaagttgccgagtgatggggtggggggacattcagacgggcagtgttagaggaggagatgggagcggtgactacacacacacacacacacacacacacacacacaaacatgcacacacacatatgcatatcttgacattgctctgtaggtgagagaggaccatgacgcccacgtttgcagctgatacttgtttgggcacacctccaagttctcgggattagaaggacaagagcactcccaggccccagagtctaagcctaagtctctatcgctcttcccctctcctcggccactccccagataccagacctgaggcaattcacttgccagcacagatggccaacccacctccagattccccagtgcttccacacccgggctctgagcaaatggaaaagacttttcatttagtagacaattcacttctttttctgtgcttcccctatctgctttggcttcctaataagaaatccattcaagagctaggagatctgagggcaggcgggcagctgcagggaggagaggtgagaaaggaagcgtcttctagagacattggcccaggagctctgttctttcctaatctaagcctctgtcttcttcggcaaaccttgctttgaactctgccagtatttcattttaaagaatcccagagcgggagagagaagagaaaaaaattgataagagtgaggaaattgtcctgtagtctattgaaaaccagtcaaggtggttttagttcatagattttgttagatgttctttccacctggcctatgatgtttagatgttcatacttgactcacatttacccagcccctcctgcgtaccaggagctgtgttaggcactttatatacattattctatgtggccctcactgatgccccagggaagtatgcattagccttcccattttgcagttgaggaggctgagtagcctcagaagggtttaggcgaccttctgaaactcacagaagtcacgtgatggagagaggattcaaagccagggcctcagaccctcacacacttgtctgtgctatgatgtatgcaggatcccagcattgatacccaatgacaaactatggagaacaagcaaagtatgcaggccccctgcagcctcccaggacaggctggcaagggaggagggccggccagcatttggtgggccatcagtctggccatctgtcacgtcacagaagcaaaccgtgccttctggctctgcgccccatattcccagcatcatagacatccaacagcaccagcaggagagtgggctagcctgctggatgctgttcgtgcctgtccctgctctgcctcccacccagttgcctgaatcatcccagctcagatgcagccactgtctcttgtcaagtgggacctcatactattctcagaaggctaacttgagaggtttggggccttgttccccagagggtccccagggactctgcagtgtccttggcaaatccccactgtactcaatgccctacattctcttctgtggtctctcccctggcttgcttcatggccactgaaccaatcactttgtatgctatgctcctactgtgatggaaaacaaaatgagtataacttattttatatccatattcagactatatagagaatattctatgcatctatgacgtgcttactactgcagtgcatttgtcattagtcttcatgttaatacagtacatttattctttggta

SEQ ID NO: 431647 - DNA, 1808 bp, Homo sapiens
acttctccagtcagattaaaacttgagagaagtaacacactcaataatagagaaaaacatagcagtgacctaatgtgtcaagtattgagagaagtttgcaggggtgggattctcttgcacatgtgaactgcaaaatgtttttttgagctgcaaattttaagtagacatttctttctctcttacacacacacacacacacacacacacaaacatgcacacacacatatgcatatcttgacattgctctgtaggtgagagaggaccatgacgcccacgtttgcagctgatacttgtttgggcacacctccaagttctcgggattagaaggacaagagcactcccaggccccagagtctaagcctaagtctctatcgctcttcccctctcctcggccactccccagataccagacctgaggcaattcacttgccagcacagatggccaacccacctccagattccccagtgcttccacacccgggctctgagcaaatggaaaagacttttcatttagtagacaattcacttctttttctgtgcttcccctatctgctttggcttcctaataagaaatccattcaagagctaggagatctgagggcaggcgggcagctgcagggaggagaggtgagaaaggaagcgtcttctagagacattggcccaggagctctgttctttcctaatctaagcctctgtcttcttcggcaaaccttgctttgaactctgccagtatttcattttaaagaatcccagagcgggagagagaagagaaaaaaattgataagagtgaggaaattgtcctgtagtctattgaaaaccagtcaaggtggttttagttcatagattttgttagatgttctttccacctggcctatgatgtttagatgttcatacttgactcacatttacccagcccctcctgcgtaccaggagctgtgttaggcactttatatacattattctatgtggccctcactgatgccccagggaagtatgcattagccttcccattttgcagttgaggaggctgagtagcctcagaagggtttaggcgaccttctgaaactcacagaagtcacgtgatggagagaggattcaaagccagggcctcagaccctcacacacttgtctgtgctatgatgtatgcaggatcccagcattgatacccaatgacaaactatggagaacaagcaaagtatgcaggccccctgcagcctcccaggacaggctggcaagggaggagggccggccagcatttggtgggccatcagtctggccatctgtcacgtcacagaagcaaaccgtgccttctggctctgcgccccatattcccagcatcatagacatccaacagcaccagcaggagagtgggctagcctgctggatgctgttcgtgcctgtccctgctctgcctcccacccagttgcctgaatcatcccagctcagatgcagccactgtctcttgtcaagtgggacctcatactattctcagaaggctaacttgagaggtttggggccttgttccccagagggtccccagggactctgcagtgtccttggcaaatccccactgtactcaatgccctacattctcttctgtggtctctcccctggcttgcttcatggccactgaaccaatcactttgtatgctatgctcctactgtgatggaaaacaaaatgagtataacttattttatatccatattcagactatatagagaatattctatgcatctatgacgtgcttactactgcagtgcatttgtcattagtcttcatgttaatacagtacatttattctttggta

SEQ ID NO: 431648 - DNA, 422 bp, Homo sapiens
gctggtcaacaacctggccgagatctatggccggatcgagcgggagcaccagatctcacctggggacttccccaatctgaagaggatgcaggtagcgagggctggggtctctaagacaagggacagtgtcccgagagctggctgagcagcctgagtatggaggaggccactcttggagccccccagggagaaccccgcccagaatctgcaggcaaggaggtggccctggatctacactcctagctgggccatcactggcccaacaggggccatgtctgggcctggggagaaacacggagcccaccgccccagtggtgcaggtgtgttagatgatgctggggggctgacacctccagttaatgaccttctctagtcacagccaccacaggcttgacgtccccaccatctctggtgcagtggga

SEQ ID NO: 431649 - DNA, 1430 bp, Homo sapiens
agtactaggggacttcctctgcgcgccggcttcctgcccagctggcatttaaaccaccgcctggggctgcaggatgctgctgcggatgcagagctgtccgcgggctgggcagcgtcgccgtctcccctgagccgcctcggtccggcaggagcggagccgaagcatcccttgctgcacgcagggcagagcaggcgagggctgggggccgatcggggaccccggcatctggcagtttccttgcaggttcaactttaattgccaagatttcacccctcctcctcaagcccagattatttatcctccctccggcctgggctgctggatgcagcagcggctgggcttggtcccaggagcagggagagtgcgctcccggccctcctagccgcgtgcccgggccatggtgcggctgagccccgcgcttgggtgaggcggcggcgcggctcggagcccggcggaccggtcctacgggacatcttcccctgaggaggagtcttcccctggggctgcgtgccgggggcgagcggcggccgcgatgttcagctggctgggtacggacgaccgccggaggaaggaccccgaggttttccagacggtgagtgaggggctcaagaaactctacaagagcaagctgctgcccttggaagagcattaccgcttccacgagttccactcgcccgccctggaggatgccgacttcgacaacaagcccatggttctgctggtgggccagtactccactgggaagaccaccttcatcaggtgagccggcccagggtcctggcagcccaccccggagcccagcgcctagtccctccggtcactcctggtgctccatcccagacaggggaccaatgggaagccctcagttgagggctctgaagagatctgtgtttgtgcaggcgtcaaaatcttaccccacaatttttgctggtcccccttcccatcctacccaatacctgtccactctacttggcccttggctgtggtggtcaacctgaagtattcaagtgtaaagccattcccagtctccccatcttatggatgatgaaaccgaggcccaggaggcacaatggaagagctcctggtctctggagcgccttatgttggtggggatgtcttacgtcttcactttttagcaacacatcattcacgggcaaaacctcttcccttgtttttcaaggggcttggcactcacatgggggcctcacagttgcagctgagttctgatgggtgcgggcctgggaacggaggtggcctggggatgctacttgtcctccttttatcatttccttctctaaagcagagctcctgtgtatatatcttggagactcaacagaagctgagtccagaagcagaatgctttttttttcccctttctcttatttgatcttaatggcttaataataatattaaagacgcttagagatgga

SEQ ID NO: 431650 - DNA, 3777 bp, Homo sapiens
agtactaggggacttcctctgcgcgccggcttcctgcccagctggcatttaaaccaccgcctggggctgcaggatgctgctgcggatgcagagctgtccgcgggctgggcagcgtcgccgtctcccctgagccgcctcggtccggcaggagcggagccgaagcatcccttgctgcacgcagggcagagcaggcgagggctgggggccgatcggggaccccggcatctggcagtttccttgcaggttcaactttaattgccaagatttcacccctcctcctcaagcccagattatttatcctccctccggcctgggctgctggatgcagcagcggctgggcttggtcccaggagcagggagagtgcgctcccggccctcctagccgcgtgcccgggccatggtgcggctgagccccgcgcttgggtgaggcggcggcgcggctcggagcccggcggaccggtcctacgggacatcttcccctgaggaggagtcttcccctggggctgcgtgccgggggcgagcggcggccgcgatgttcagctggctgggtacggacgaccgccggaggaaggaccccgaggttttccagacggtgagtgaggggctcaagaaactctacaagagcaagctgctgcccttggaagagcattaccgcttccacgagttccactcgcccgccctggaggatgccgacttcgacaacaagcccatggttctgctggtgggccagtactccactgggaagaccaccttcatcaggtacctgctggaacaggacttcccaggcatgaggattgggcctgagcccaccacagactccttcattgcggtgatgcagggagacatggaggggatcatccctgggaacgccctggtggtggatcccaagaaacccttcaggaaactcaacgcctttggcaacgccttcttgaacaggttcgtgtgtgcccagctacctaaccctgtgctggagagcatcagcgtcatcgacacaccagggatcctctctggggagaagcagaggatcagccgggggtatgactttgcagctgtccttgagtggtttgccgagcgggttgaccgcatcattctgctcttcgatgcccacaaactggacatctctgatgagttctcagaagtcatcaaagccctcaagaaccacgaggacaagatgcgagtggtgctgaacaaagctgaccagatcgagacgcagcagctgatgcgggtgtacggggccctcatgtggtccttggggaagatcgtgaacaccccagaggtgatccgggtctacatcggctccttctggtcccaccccctcctcatccctgacaaccggaagctctttgaggctgaggaacaggacctattcagggacatccagagtctgccccgaaatgctgccctgcgcaagctcaacgacctcatcaaaagggccaggctggccaaggtccacgcctacatcatcagctctctgaagaaggagatgccctcggtgttcgggaaggacaacaagaagaaggagctggtcaacaacctggccgagatctatggccggatcgagcgggagcaccagatctcacctggggacttccccaatctgaagaggatgcaggaccagctgcaggcccaggactttagcaagttccagccgctgaagagcaagctgctggaggtagtggacgacatgctggcccatgacattgcccagctcatggtgctagtgcgccaggaggagtcacagcggcccatccagatggtgaagggcggagcgttcgagggcaccctgcacggcccctttgggcatggctatggggagggggctggagaaggtatcgatgatgctgagtgggtggtggccagggacaagcccatgtacgacgagatcttctacaccctgtcaccggtggatggcaagatcacaggcgctaatgccaagaaggagatggtgcgctccaagctgcccaacagtgtgctgggcaagatctggaagctggccgacattgacaaggatggcatgctggacgacgacgagtttgcactggccaaccacctcatcaaagtcaagctggaggggcacgagctgcccaacgagctgcctgcccacctcctgcccccgtccaagaggaaagttgccgagtgatggggtggggggacattcagacgggcagtgttagaggaggagatgggagcggtgactacacacacacacacacacacacacacacacacaaacatgcacacacacatatgcatatcttgacattgctctgtaggtgagagaggaccatgacgcccacgtttgcagctgatacttgtttgggcacacctccaagttctcgggattagaaggacaagagcactcccaggccccagagtctaagcctaagtctctatcgctcttcccctctcctcggccactccccagataccagacctgaggcaattcacttgccagcacagatggccaacccacctccagattccccagtgcttccacacccgggctctgagcaaatggaaaagacttttcatttagtagacaattcacttctttttctgtgcttcccctatctgctttggcttcctaataagaaatccattcaagagctaggagatctgagggcaggcgggcagctgcagggaggagaggtgagaaaggaagcgtcttctagagacattggcccaggagctctgttctttcctaatctaagcctctgtcttcttcggcaaaccttgctttgaactctgccagtatttcattttaaagaatcccagagcgggagagagaagagaaaaaaattgataagagtgaggaaattgtcctgtagtctattgctggcctatgatgtttagatgttcatacttgactcacatttacccagcccctcctgcgtaccaggagctgtgttaggcactttatatacattattctatgtggccctcactgatgccccagggaagtatgcattagccttcccattttgcagttgaggaggctgagtagcctcagaagggtttaggcgaccttctgaaactcacagaagtcacgtgatggagagaggattcaaagccagggcctcagaccctcacacacttgtctgtgctatgatgtatgcaggatcccagcattgatacccaatgacaaactatggagaacaagcaaagtatgcaggccccctgcagcctcccaggacaggctggcaagggaggagggccggccagcatttggtgggccatcagtctggccatctgtcacgtcacagaagcaaaccgtgccttctggctctgcgccccatattcccagcatcatagacatccaacagcaccagcaggagagtgggctagcctgctggatgctgttcgtgcctgtccctgctctgcctcccacccagttgcctgaatcatcccagctcagatgcagccactgtctcttgtcaagtgggacctcatactattctcagaaggctaacttgagaggtttggggccttgttccccagagggtccccagggactctgcagtgtccttggcaaatccccactgtactcaatgccctacattctcttctgtggtctctcccctggcttgcttcatggccactgaaccaatcactttgtatgctatgctcctactgtgatggaaaacaaaatgagtataacttattttatatccatattcagactatatagagaatattctatgcatctatgacgtgcttactactgcagtgcatttgtcattagtcttcatgttaatacagtacatttattctttggta

SEQ ID NO: 431651 - DNA, 2116 bp, Homo sapiens
agtactaggggacttcctctgcgcgccggcttcctgcccagctggcatttaaaccaccgcctggggctgcaggatgctgctgcggatgcagagctgtccgcgggctgggcagcgtcgccgtctcccctgagccgcctcggtccggcaggagcggagccgaagcatcccttgctgcacgcagggcagagcaggcgagggctgggggccgatcggggaccccggcatctggcagtttccttgcaggttcaactttaattgccaagatttcacccctcctcctcaagcccagattatttatcctccctccggcctgggctgctggatgcagcagcggctgggcttggtcccaggagcagggagagtgcgctcccggccctcctagccgcgtgcccgggccatggtgcggctgagccccgcgcttgggtgaggcggcggcgcggctcggagcccggcggaccggtcctacgggacatcttcccctgaggaggagtcttcccctggggctgcgtgccgggggcgagcggcggccgcgatgttcagctggctgggtacggacgaccgccggaggaaggaccccgaggttttccagacggtgagtgaggggctcaagaaactctacaagagcaagctgctgcccttggaagagcattaccgcttccacgagttccactcgcccgccctggaggatgccgacttcgacaacaagcccatggttctgctggtgggccagtactccactgggaagaccaccttcatcaggtacctgctggaacaggacttcccaggcatgaggattgggcctgagcccaccacagactccttcattgcggtgatgcagggagacatggaggggatcatccctgggaacgccctggtggtggatcccaagaaacccttcaggaaactcaacgcctttggcaacgccttcttgaacaggttcgtgtgtgcccagctacctaaccctgtgctggagagcatcagcgtcatcgacacaccagggatcctctctggggagaagcagaggatcagccgggggtatgactttgcagctgtccttgagtggtttgccgagcgggttgaccgcatcattctgctcttcgatgcccacaaactggacatctctgatgagttctcagaagtcatcaaagccctcaagaaccacgaggacaagatgcgagtggtgctgaacaaagctgaccagatcgagacgcagcagctgatgcgggtgtacggggccctcatgtggtccttggggaagatcgtgaacaccccagaggtgatccgggtctacatcggctccttctggtcccaccccctcctcatccctgacaaccggaagctctttgaggctgaggaacaggacctattcagggacatccagagtctgccccgaaatgctgccctgcgcaagctcaacgacctcatcaaaagggccaggctggccaaggtccacgcctacatcatcagctctctgaagaaggagatgccctcggtgttcgggaaggacaacaagaagaaggagctggtcaacaacctggccgagatctatggccggatcgagcgggagcaccagatctcacctggggacttccccaatctgaagaggatgcaggaccagctgcaggcccaggactttagcaagttccagccgctgaagagcaagctgctggaggtagtggacgacatgctggcccatgacattgcccagctcatggtgctagtgcgccaggaggagtcacagcggcccatccagatggtgaagggcggagcgttcgagggcaccctgcacggcccctttgggcatggctatggggagggggctggagaaggtatcgatgatgctgagtgggtggtggccagggacaagcccatgtacgacgagatcttctacaccctgtcaccggtggatggcaagatcacaggcgctaatgccaagaaggagatggtgcgctccaagctgcccaacagtgtgctgggcaagatctggaagctggccgacattgacaaggatggcatgctggacgacgacggctccttcttcctctacagcccgcctatccaattgacaagagcaggtgtcaccgagggcgcatgtcttctcatgccccccgatgca

SEQ ID NO: 431652 - DNA, 845 bp, Homo sapiens
tccaggtcttgtcttcactgctgtgtgtcctctgctcctagaggcccagcctctgtggccctgtgtcctgcaggtattgggagatccacagctaagacgcccgggagcccctggaagcctagaaatggggccattgcaatttagagacgtggccatagaattctctctggaggagtggcattgcctggacactgcacagcggaatttatataggaatgtgatgttagagaactacagaaacctggtcttccttggtattgttgtctctaagccagacctcatcacctgtctggagcagaggttgcagtggggcaagattgtgcgattgcactccagtctgggcaacaagagcaaaactctgtctcaaaaaaaaaaaagtttgttagattatttgtgaacttaattttattttatttttaccatggtaagactaccgtgcgtttaatgaaccattattgtgccactaactgtatcccactttactcaagggtgtaggtacaatattgtaggaatatactatttcatacattgtaaaataacatctttagtaatcactgtcagtggctttaaactgcaaatgagttaaatattgttcccatagattaaattttgactctttattatttaaattttttatttgtattcgtgggtatataatatgtgtatatatttatgccttatatggcatcttttgactcaggcctacaatatgtagtaattacattatggtaaataaggtatccatcacctctagcatttatcttttgtattaccaatagtgtaattatatgcttttattcattttaaaatgtacaattaaattgttattgactacagaaaaattt

SEQ ID NO: 431653 - DNA, 2713 bp, Homo sapiens
  misc_feature (2319)..(2321): n is a, c, g, or t
  misc_feature (2326)..(2326): n is a, c, g, or t
  misc_feature (2340)..(2340): n is a, c, g, or t
  misc_feature (2343)..(2343): n is a, c, g, or t
  misc_feature (2353)..(2353): n is a, c, g, or t
  misc_feature (2359)..(2361): n is a, c, g, or t
  misc_feature (2376)..(2377): n is a, c, g, or t
  misc_feature (2394)..(2394): n is a, c, g, or t
  misc_feature (2396)..(2396): n is a, c, g, or t
  misc_feature (2398)..(2399): n is a, c, g, or t
  misc_feature (2409)..(2409): n is a, c, g, or t
  misc_feature (2414)..(2414): n is a, c, g, or t
  misc_feature (2417)..(2417): n is a, c, g, or t
  misc_feature (2420)..(2420): n is a, c, g, or t
  misc_feature (2433)..(2433): n is a, c, g, or t
  misc_feature (2438)..(2439): n is a, c, g, or t
  misc_feature (2441)..(2442): n is a, c, g, or t
  misc_feature (2445)..(2445): n is a, c, g, or t
  misc_feature (2451)..(2451): n is a, c, g, or t
  misc_feature (2454)..(2454): n is a, c, g, or t
  misc_feature (2461)..(2461): n is a, c, g, or t
  misc_feature (2482)..(2482): n is a, c, g, or t
  misc_feature (2487)..(2488): n is a, c, g, or t
  misc_feature (2496)..(2496): n is a, c, g, or t
  misc_feature (2498)..(2498): n is a, c, g, or t
  misc_feature (2510)..(2510): n is a, c, g, or t
  misc_feature (2512)..(2512): n is a, c, g, or t
  misc_feature (2520)..(2520): n is a, c, g, or t
  misc_feature (2527)..(2527): n is a, c, g, or t
  misc_feature (2542)..(2544): n is a, c, g, or t
  misc_feature (2567)..(2567): n is a, c, g, or t
  misc_feature (2576)..(2576): n is a, c, g, or t
  misc_feature (2578)..(2578): n is a, c, g, or t
  misc_feature (2584)..(2585): n is a, c, g, or t
  misc_feature (2607)..(2608): n is a, c, g, or t
  misc_feature (2623)..(2623): n is a, c, g, or t
  misc_feature (2629)..(2630): n is a, c, g, or t
  misc_feature (2632)..(2632): n is a, c, g, or t
  misc_feature (2635)..(2635): n is a, c, g, or t
  misc_feature (2639)..(2639): n is a, c, g, or t
  misc_feature (2646)..(2647): n is a, c, g, or t
  misc_feature (2651)..(2652): n is a, c, g, or t
  misc_feature (2670)..(2671): n is a, c, g, or t
  misc_feature (2676)..(2676): n is a, c, g, or t
  misc_feature (2693)..(2693): n is a, c, g, or t
  misc_feature (2700)..(2700): n is a, c, g, or t
  misc_feature (2708)..(2708): n is a, c, g, or t
tccaggtcttgtcttcactgctgtgtgtcctctgctcctagaggcccagcctctgtggccctgtgtcctgcaggtattgggagatccacagctaagacgcccgggagcccctggaagcctagaaatggggccattgcaatttagagacgtggccatagaattctctctggaggagtggcattgcctggacactgcacagcggaatttatataggaatgtgatgttagagaactacagaaacctggtcttccttggtattgttgtctctaagccagacctcatcacctgtctggagcaaggaaaaaaacctttgaccatgaagaaacatgagatggtagccaacccctcagttacgtgttctcattttgcccgagatctttggccagagcagagcataaaagattctttccaaaaagtgacactgagaagatatgaaaactatggacatgacaatttacagtttaaaaagggctgtgaaagtgtagatgagtgtaaggtgcacaaaagaggttataatggacttaaccaatatttgacaactactcaaagcaaaatatttcagtgtgataaatatgtgaaagtcattcataaattttcaaattcaaacagacataagataagacatactggaaaaaaacctttcaaatgtatagaatgtggcaaagcttttaaccagtcttcaacccttactacacataagaaaattcatactggggagaaacccttcaaatgtgaagaatgtggcaaagccttcaactggtcctcacaccttactacacataagagaattcatactggagagaaacggtacaaatgtgaagactgtggcaaagcctttagccggttttcataccttactgcacataagataattcatagtggagagaaaccctacaaatgtgaagaatgtggcaaggcctttaagcgctcctctaaccttactacacataagataattcatactggagagaaaccctacaaatgtgaagaatgtggcaaggcctttaagcgctcctctatccttactgcgcataagataattcatagcggagagaaaccctacaaatgtgaagaatgtggcaaagcctttaagcacccctctgtccttactacacataaaagaattcatactggagagaaaccctacaaatgtgaagaatgtggcagagcctttaagtacttctcatcccttactacacacaagataattcatagtggagagaaaccctacaaatgtgaagaatgtggcaaagccttcaactggtcctcacaccttactacacataagagaattcatactggagagaaaccctacaaatgtgaagaatgtggcgaagcctttaagtactcctcttcccttactacacataagataatccatactggacagcaacccttcaagtgtgaagaatgtggcaaggcctttaagtgcttctctatccttactacacataagagaattcatactggagagaaaccctacaaatgtgaagaatgtggcaaagccttcaactcgtcctcacaccttactgcacataagagaattcatactggagagaaaccctacaaatgtgaacgatgtggcaaggcttttaagcgctcctttatccttactagacataagagaattcatactggagagaaaccctacaaatgtgaagaatgtggcgaaggctttaagtgcccctctacccttactacacataaggtaattcatactggagagaaactataaatgtgaggaatgtggcaaagctttaagctatcccactatgcttttttcacataagaaaattcatattggagggaaactgtacaagtgtgataaatgtggcaaagcctttatttcatcctcaaaccttagtagacattagataattcatgcgggaaagaaacccaacaaataagaaaatgcagcaaagcctttaaggacacctctgcccttactagacataagataattcgtactggagagaaaccctgtgagtctgatgaatgtgggaaagcctttaaccagctatcaacttttactaaatatgagaatttatatggaacataaaccctacaaatataaagaatgtgacaacgcttttaggaagttctgaacccttcttacacataattcatgctggacaaaaatcctacaagtttgaggaatgtggcaaatcctataacaagttttcaatatttttttttttgagatgaagtttcatgcttgtcatccaagctggagtacagtgccatgatctcggctcactgcaacctctgcctcctgggtttaagccattctcctacctcagaggctgaggcaggagaatnnnttgancccaggaggcagangtngcagtgagcngagatnnngccactgcactccannctggcgacagagtgagncncnntctcaaaaanaaaanaanaanaaaaaaaaaaaanaggcnngnngcngtggcncangcctgtnatcccagcactttgggaggcngaggnnggtggatnangaggtcaggagntngagaccancctggcnaacatggtgaaaccnnntctctactaaaaatacaaaaatnagccgggcntngtggcnngcacctgtagtcccagctactnnggaggctgaggcagnagaatnncntgnaccnaggaggnngagnntgcagtgagccgagatcnngccantgcactccagcctgggngacagangagactcngtctc

SEQ ID NO: 431654 - DNA, 869 bp, Homo sapiens
tgcacacgccgagaatcatactcgtcttacctttcgggagcgaacctcaacctctcctgccactcggcctctcaaagtgctggattacaggcatgagccaccatgcttgacctgtttattgttaaagtagcaatagcacgacgtgctttcctaggacctgctggcctgtttttcactgatataaagtgaaggaggcattgaaatagcagaggcaggtgatataaattgaatacttatatgaaataaaattttaaataaaaattagcatttgatgttgtacaactataggtgagactattagtgtgaggtcatatttttacttatattgacaaaataaccattcacaatattcttatttagaacaattttccttttctactgtgcttttgctagcttttgatcaaatattacaggaactcaatagaaatcaacaaaattaatctttattttactagaagggttactgatgcatatgctaattttttttcagttttttgtttattgcagagaagtggctgtcctactagaaaactgctactctcatctgtatccacattgaataatagtgaatggaagtgaagcggataaaaggtaaatgtgtcttctctgtatcttttttcatccattggctgaagaacaggaaaatgtggaaaataaaagaaaatataacccctgaaaaatcctgaagaagctctcttaaccagacaaaaaaccttataggggattttttgtttgttttattattgtaccatctgcttctatgagtttaattttttttttttttttacactttacatagaaataggattatgtgggctgggcacagggactgacgcctgtaatcccaacacttggaggggctgaggtgg

SEQ ID NO: 431655 - DNA, 2947 bp, Homo sapiens
tccaggtcttgtcttcactgctgtgtgtcctctgctcctagaggcccagcctctgtggccctgtgtcctgcaggtattgggagatccacagctaagacgcccgggagcccctggaagcctagaaatggggccattgcaatttagagacgtggccatagaattctctctggaggagtggcattgcctggacactgcacagcggaatttatataggaatgtgatgttagagaactacagaaacctggtcttccttggtattgttgtctctaagccagacctcatcacctgtctggagcaaggaaaaaaacctttgaccatgaagaaacatgagatggtagccaacccctcagttacgtgttctcattttgcccgagatctttggccagagcagagcataaaagattctttccaaaaagtgacactgagaagatatgaaaactatggacatgacaatttacagtttaaaaagggctgtgaaagtgtagatgagtgtaaggtgcacaaaagaggttataatggacttaaccaatatttgacaactactcaaagcaaaatatttcagtgtgataaatatgtgaaagtcattcataaattttcaaattcaaacagacataagataagacatactggaaaaaaacctttcaaatgtatagaatgtggcaaagcttttaaccagtcttcaacccttactacacataagaaaattcatactggggagaaacccttcaaatgtgaagaatgtggcaaagccttcaactggtcctcacaccttactacacataagagaattcatactggagagaaacggtacaaatgtgaagactgtggcaaagcctttagccggttttcataccttactgcacataagataattcatagtggagagaaaccctacaaatgtgaagaatgtggcaaggcctttaagcgctcctctaaccttactacacataagataattcatactggagagaaaccctacaaatgtgaagaatgtggcaaggcctttaagcgctcctctatccttactgcgcataagataattcatagcggagagaaaccctacaaatgtgaagaatgtggcaaagcctttaagcacccctctgtccttactacacataaaagaattcatactggagagaaaccctacaaatgtgaagaatgtggcagagcctttaagtacttctcatcccttactacacacaagataattcatagtggagagaaaccctacaaatgtgaagaatgtggcaaagccttcaactggtcctcacaccttactacacataagagaattcatactggagagaaaccctacaaatgtgaagaatgtggcgaagcctttaagtactcctcttcccttactacacataagataatccatactggacagcaacccttcaagtgtgaagaatgtggcaaggcctttaagtgcttctctatccttactacacataagagaattcatactggagagaaaccctacaaatgtgaagaatgtggcaaagccttcaactcgtcctcacaccttactgcacataagagaattcatactggagagaaaccctacaaatgtgaacgatgtggcaaggcttttaagcgctcctttatccttactagacataagagaattcatactggagagaaaccctacaaatgtgaagaatgtggcgaaggctttaagtgcccctctacccttactacacataaggtaattcatactggagagaaactataaatgtgaggaatgtggcaaagctttaagctatcccactatgcttttttcacataagaaaattcatattggagggaaactgtacaagtgtgataaatgtggcaaagcctttatttcatcctcaaaccttagtagacattagataattcatgcgggaaagaaacccaacaaataagaaaatgcagcaaagcctttaaggacacctctgcccttactagacataagataattcgtactggagagaaaccctgtgagtctgatgaatgtgggaaagcctttaaccagctatcaacttttactaaatatgagaatttatatggaacataaaccctacaaatataaagaatgtgacaacgcttttaggaagttctgaacccttcttacacataattcatgctggacaaaaatcctacaagtttgaggaatgtggcaaatcctataacaagttttcaatatttttttttttgagatgaagtttcatgcttgtcatccaagctggagtacagtgccatgatctcggctcactgcaacctctgcctcctgggtttaagccattctcctacctcagcttcctgagtagctgggattacaggtgtcctccaacatgcccagctaatttttttatttttagtagagatgcgacttcgccatgtttgccaggctggtctcgaactcctgacctcaggtgatccacccaccttggcctcctaaagtgctgggattacaggcgtgagccacgacgcccagccacaagttctcaattcttaagaggcatggcaataattcatgttgaagaggaaatccgcaaagctaaaaaatgtgacattgcttttacgaacacctccaacttctctacacataacaataattatactagtgtgaaaccctagaaatatataaaatgtgacaaagcctttatatggttgccactcttgattgtaggttggataattcatactggcaaaactcctacaagtgtgaagaatgtggcaaaacttttaatcagttcttacaccttatctcacagaaaagctagtatccttgagaaaaattgtacaaatagaaggaatatgggaaaacctattaattcctactcacatctaactcaacataaaaatcttccttttaataaaaggcatttaaaatgggcaattactgtcaaaactttcagcaagtataaggccttttaaagtggaggagggagtatttattgtg

SEQ ID NO: 431656 - DNA, 2820 bp, Homo sapiens
tccaggtcttgtcttcactgctgtgtgtcctctgctcctagaggcccagcctctgtggccctgtgtcctgcaggtattgggagatccacagctaagacgcccgggagcccctggaagcctagaaatggtattgttgtctctaagccagacctcatcacctgtctggagcaaggaaaaaaacctttgaccatgaagaaacatgagatggtagccaacccctcagttacgtgttctcattttgcccgagatctttggccagagcagagcataaaagattctttccaaaaagtgacactgagaagatatgaaaactatggacatgacaatttacagtttaaaaagggctgtgaaagtgtagatgagtgtaaggtgcacaaaagaggttataatggacttaaccaatatttgacaactactcaaagcaaaatatttcagtgtgataaatatgtgaaagtcattcataaattttcaaattcaaacagacataagataagacatactggaaaaaaacctttcaaatgtatagaatgtggcaaagcttttaaccagtcttcaacccttactacacataagaaaattcatactggggagaaacccttcaaatgtgaagaatgtggcaaagccttcaactggtcctcacaccttactacacataagagaattcatactggagagaaacggtacaaatgtgaagactgtggcaaagcctttagccggttttcataccttactgcacataagataattcatagtggagagaaaccctacaaatgtgaagaatgtggcaaggcctttaagcgctcctctaaccttactacacataagataattcatactggagagaaaccctacaaatgtgaagaatgtggcaaggcctttaagcgctcctctatccttactgcgcataagataattcatagcggagagaaaccctacaaatgtgaagaatgtggcaaagcctttaagcacccctctgtccttactacacataaaagaattcatactggagagaaaccctacaaatgtgaagaatgtggcagagcctttaagtacttctcatcccttactacacacaagataattcatagtggagagaaaccctacaaatgtgaagaatgtggcaaagccttcaactggtcctcacaccttactacacataagagaattcatactggagagaaaccctacaaatgtgaagaatgtggcgaagcctttaagtactcctcttcccttactacacataagataatccatactggacagcaacccttcaagtgtgaagaatgtggcaaggcctttaagtgcttctctatccttactacacataagagaattcatactggagagaaaccctacaaatgtgaagaatgtggcaaagccttcaactcgtcctcacaccttactgcacataagagaattcatactggagagaaaccctacaaatgtgaacgatgtggcaaggcttttaagcgctcctttatccttactagacataagagaattcatactggagagaaaccctacaaatgtgaagaatgtggcgaaggctttaagtgcccctctacccttactacacataaggtaattcatactggagagaaactataaatgtgaggaatgtggcaaagctttaagctatcccactatgcttttttcacataagaaaattcatattggagggaaactgtacaagtgtgataaatgtggcaaagcctttatttcatcctcaaaccttagtagacattagataattcatgcgggaaagaaacccaacaaataagaaaatgcagcaaagcctttaaggacacctctgcccttactagacataagataattcgtactggagagaaaccctgtgagtctgatgaatgtgggaaagcctttaaccagctatcaacttttactaaatatgagaatttatatggaacataaaccctacaaatataaagaatgtgacaacgcttttaggaagttctgaacccttcttacacataattcatgctggacaaaaatcctacaagtttgaggaatgtggcaaatcctataacaagttttcaatatttttttttttgagatgaagtttcatgcttgtcatccaagctggagtacagtgccatgatctcggctcactgcaacctctgcctcctgggtttaagccattctcctacctcagcttcctgagtagctgggattacaggtgtcctccaacatgcccagctaatttttttatttttagtagagatgcgacttcgccatgtttgccaggctggtctcgaactcctgacctcaggtgatccacccaccttggcctcctaaagtgctgggattacaggcgtgagccacgacgcccagccacaagttctcaattcttaagaggcatggcaataattcatgttgaagaggaaatccgcaaagctaaaaaatgtgacattgcttttacgaacacctccaacttctctacacataacaataattatactagtgtgaaaccctagaaatatataaaatgtgacaaagcctttatatggttgccactcttgattgtaggttggataattcatactggcaaaactcctacaagtgtgaagaatgtggcaaaacttttaatcagttcttacaccttatctcacagaaaagctagtatccttgagaaaaattgtacaaatagaaggaatatgggaaaacctattaattcctactcacatctaactcaacataaaaatcttccttttaataaaaggcatttaaaatgggcaattactgtcaaaactttcagcaagtataaggccttttaaagtggaggagggagtatttattgtg

SEQ ID NO: 431657 - DNA, 2087 bp, Homo sapiens
tccaggtcttgtcttcactgctgtgtgtcctctgctcctagaggcccagcctctgtggccctgtgtcctgcaggtattgggagatccacagctaagacgcccgggagcccctggaagcctagaaatggggccattgcaatttagagacgtggccatagaattctctctggaggagtggcattgcctggacactgcacagcggaatttatataggaatgtgatgttagagaactacagaaacctggtcttccttggtattgttgtctctaagccagacctcatcacctgtctggagcaaggaaaaaaacctttgaccatgaagaaacatgagatggtagccaacccctcagttacgtgttctcattttgcccgagatctttggccagagcagagcataaaagattctttccaaaaagtgacactgagaagatatgaaaactatggacatgacaatttacagtttaaaaagggctgtgaaagtgtagatgagtgtaaggtgcacaaaagaggttataatggacttaaccaatatttgacaactactcaaagcaaaatatttcagtgtgataaatatgtgaaagtcattcataaattttcaaattcaaacagacataagataagacatactggaaaaaaacctttcaaatgtatagaatgtggcaaagcttttaaccagtcttcaacccttactacacataagaaaattcatactggggagaaacccttcaaatgtgaagaatgtggcaaagccttcaactggtcctcacaccttactacacataagagaattcatactggagagaaacggtacaaatgtgaagactgtggcaaagcctttagccggttttcataccttactgcacataagataattcatagtggagagaaaccctacaaatgtgaagaatgtggcaaggcctttaagcgctcctctaaccttactacacataagataattcatactggagagaaaccctacaaatgtgaagaatgtggcaaggcctttaagcgctcctctatccttactgcgcataagataattcatagcggagagaaaccctacaaatgtgaagaatgtggcaaagcctttaagcacccctctgtccttactacacataaaagaattcatactggagagaaaccctacaaatgtgaagaatgtggcagagcctttaagtacttctcatcccttactacacacaagataattcatagtggagagaaaccctacaaatgtgaagaatgtggcaaagccttcaactggtcctcacaccttactacacataagagaattcatactggagagaaaccctacaaatgtgaagaatgtggcgaagcctttaagtactcctcttcccttactacacataagataatccatactggacagcaacccttcaagtgtgaagaatgtggcaaggcctttaagtgcttctctatccttactacacataagagaattcatactggagagaaaccctacaaatgtgaagaatgtggcaaagccttcaactcgtcctcacaccttactgcacataagagaattcatactggagagaaaccctacaaatgtgaacgatgtggcaaggcttttaagcgctcctttatccttactagacataagagaattcatactggagagaaaccctacaaatgtgaagaatgtggcgaaggctttaagtgcccctctacccttactacacataagttttttgtttattgcagagaagtggctgtcctactagaaaactgctactctcatctgtatccacattgaataatagtgaatggaagtgaagcggataaaaggtaaatgtgtcttctctgtatcttttttcatccattggctgaagaacaggaaaatgtggaaaataaaagaaaatataacccctgaaaaatcctgaagaagctctcttaaccagacaaaaaaccttataggggattttttgtttgttttattattgtaccatctgcttctatgagtttaattttttttttttttttacactttacatagaaataggattatgtgggctgggcacagggactgacgcctgtaatcccaacacttggaggggctgaggtgg

SEQ ID NO: 431658 - DNA, 682 bp, Homo sapiens
tccaggtcttgtcttcactgctgtgtgtcctctgctcctagaggcccagcctctgtggccctgtgtcctgcaggtattgggagatccacagctaagacgcccgggagcccctggaagcctagaaatggggccattgcaatttagagacgtggccatagaattctctctggaggagtggcattgcctggacactgcacagcggaatttatataggaatgtgatgttagagaactacagaaacctggtcttccttggtattgttgtctctaagccagacctcatcacctgtctggagcaaggaaaaaaacctttgaccatgaagaaacatgagatggtagccaacccctcaggtaggtgcaagtgaaaatgaatatagcagacgacacagataagaggtcccaaagtcaaagagaaagccagtccttaaagtgtgatttgggaagctgtgctccaaagaaaatagttcctgggagctgttttttttttttttttcttttttaaattttgctctatataaaggggcatcttctgcttatgcttttaaattctgtaaaaattctacttttctttcggtgagctcccttcaagttcacagtgagagccagagtcctcttcatggcatataaaatactgcacagtctggctgctttttcattgttttggggacacacaaatatctgca

SEQ ID NO: 431659 - DNA, 1988 bp, Homo sapiens
  misc_feature (418)..(418): n is a, c, g, or t
  misc_feature (1278)..(1278): n is a, c, g, or t
  misc_feature (1318)..(1318): n is a, c, g, or t
gactggatgtgagggtctgatggttttctctgatatgctttgacgtgcttggatgaaggaaggaatacgaatactcattcttccttccctaactcctcgtacggggccatatcagaattctagaattcttgccactgtgattcaattgctaacctaaagtcttctctttttacaaattcacctgcttcagtatatattaaggtggctttcgagaggcaagatgcttatttaaaagttaagcgtgaatctgtaaaattaaggttggttgcgtaaagttgaagttaaccacatgtaagaaaggaaaacttccattagttttcttcttagggtgtgagaattttacctaggcacatggatattgggctgaaaaaaaaaaaccgacatttttatttaaaactacatgtaaaaaatcatgaangattcagtaattatgttaggctcacaagtgaccattgagtttgcccctgtactgcttcccagcttttgtggtgttgaacttttctgttcttccaatagggagatacataatcaaaatacacacgaagacgagatagcaggcactcagttctaggccagtttctcagtttcctttgggcctgcctttattttgatagtcgcagaatgcaggttcagatgcgatccggtgcattctgggtggtatccccatagacagaatacaagttcaagactcatttttatgtccatttttatagtggtagactgtatgtaatagaccagatggttcattccaaatacatgacttggtcttactgctatatatgaaggaagtttgaaaatgtaatggggacaaaagccgtgcgtgacttcggtatacccagacttcattcagatttcttaaaaatctgctagggatgtctgttgaccagacgttggaaaacctttggtgtcagggagagtagaggagaagttctgattttcataaccctggtttcttatctaggcctgtttccttgcgtgaaaacatacatcaccaagtaatttgtagtacaaagaacaagagaagaaaccctaagaagatagcttatttgttatcctcccttttaatgactaaccttaatccaaatgaatccactgagaaccagcctgtggatgcctactgggctttcaccctggaccaggaatttttgacgtatgcctgtgttgaaggcactggatgcttgttttgtggaagacatgttcattgaggtaagtggctcatcgcttggtgtgtttggctctctttggcattatgcatagccaaggtcccagattttggcngctctcagtgggtgttcttgcatcagaactttaaaaaaantaacactaccttaacactgagactgtcaggtatttgtcagtatttatttctaatttcctactttaaatcttaggagacaaagtgtttctccaactggacgctgatttgaaacacaactagaatgctacaggtctctcttccagtatgcagctgctgtacctgaaaatttttccccataatttcccatctttagggtatgtccctgttatcaggtgtggaattaatgtgggtaaatttccatttcagttgaatttcctgtcatccccagcaaaacctgtgaatccttcttcaaagcatagaggaggcagagacaagtcttaaaccggcttcccttcgcttttaccaggtagcctggttcagtcccagctgggtcctgaaggagcacagtactagagcctgagtcatgttgactattaataaagtgcattaagtttgggtcaggcaaagtggtggcaaaagttcatgatgcaggacagaggaaacaagtggacaagacaagtggagcccagctctgttcgcatgggaggccgggcgatgctggcatgggtgtggttggccgagttctcatagctagagaaaggccgtgtaggtataagtgcttaatgtttcatctgtctgaaagaccagctatttgataatctttccgattaaatttctaaaattgctactt

SEQ ID NO: 431660 - DNA, 1031 bp, Homo sapiens
  misc_feature (1022)..(1027): n is a, c, g, or t
  misc_feature (1029)..(1031): n is a, c, g, or t
cctttctgctcttcactgggggtgttgcaatgagttggacatgttcctcaccattaaggggcttccactttagtgggaaagtcatatagaaacataagaaactctgatttgtaaatttagagacacacagtaggacaggagactgaaaaagcagagatttatttgactaggaaaacaaggcaaatcagctggagggggcaagatttgagtaggcatttgagaataggcagcctgctgagaggtaaagatgcagactccatcagtgagggtcctagcaggaaacagatggcacattcaaacagaataattaaggagaattgaaggaggggctgttttcaaggagaagctgtttacaatgttgtaggcaggattaaggacaaccaacaaggccttgtgctatactctagggcgggcaaccatggagagccatttacccccttggcctgtaggggcaagaggagaaagtggttatgggacccagagagagggactgtatggaggggatttcctggcagcagctgtggctctcagcaagggaagcagccaggctacagccacctgaccagaagggaaccaggagagtaaattccatgttgtcattctctctgcctgccagtctcctgccagtgcttcccatttggtggatccaactgaagtcacaaaacaaaggaacctgttgatgcaatccatagatagccagcctcccaaggacacagagcagggtggggagtggacctgcattagcaagcagagaatgtccagagcctagagacagccagcccatgcagagggtagggcataagccaggcagtggagagggtgaggagtggtgtatagaagagagcatggagtttaaggggttattatggctgagatccagaccatgagcagagaaaagttcagtttatctcacggaaaactttaatgttaggcttaatcctctgttccttcctccctacattcttcccaccttcccttccttctgtccttttcttctctcaataaatatttgttgaatgctnnnnnnannn

SEQ ID NO: 431661 - DNA, 859 bp, Homo sapiens
gagtcgtcggggtttcctgcttcaacagtgcttggacggaacccggcgctcgtcccgcacccgggccggccgtccatagccagccctccgtcacctcttcaccgcaccctcggactgccccagggcccccgccgccgctccagcgccgcgcagccaccgccgccgccaccgccgcctctgcttagtcgccgccatgacgaccgcgtccgcctcgcaggtgcgccagaactcccaccaggactcagaggccgccataaaccgccagatcaacctggagctctacgcctcctacgtttacctgtccatgtcttactactttgaccgcgatgatgtggctttgaagaactttgccaaatactttcttcaccaatctcatgaggagagggaacatgctgagaaactgatggagctgcagaaccaactaggtggctgaatcttccttcaggatatcaagaaaccagactgtgatgactgggagagcaggctgaatgcgacggagtgtgcattacatttggaaaaaaatgtgaatcagtcactactggaactgcacaaactggccactgacaaaaatgacccccatttgtgtgacttcattgagacacattacctgaatgagcaggtgaaagccatcaaagaattgggtgatcaagtgaccaacttgcgcaagatgggagcacccgaatctggcttggcagaatatctttttgacaagcacatcctgggagacagtgataatgaaagctaagcctcgggctaatttccccatagccgtggggtgacttccctggtcaccaaggcagtgcatgcatgttggggtttcctttaccttttctataagtgtaccaaaacatccacttaa

SEQ ID NO: 431662 - DNA, 634 bp, Homo sapiens
tacagatagaaccgaggtgatacccctagttttagaagtttcaatagcatgttccctcgcctcctacgtttacctgtccatgtcttactactttgaccgcgatgatgtggctttgaagaactttgccaaatactttcttcaccaatctcatgaggagagggaacatgctgagaaactgatggagctgcagaaccaactaggtggctgaatcttccttcaggatatcaagaaaccagactgtgatgactgggagagcaggctgaatgcgacggagtgtgcattacatttggaaaaaaatgtgaatcagtcactactggaactgcacaaactggccactgacaaaaatgacccccatttgtgtgacttcattgagacacattacctgaatgagcaggtgaaagccatcaaagaattgggtgatcaagtgaccaacttgcgcaagatgggagcacccgaatctggcttggcagaatatctttttgacaagcacatcctgggagacagtgataatgaaagctaagcctcgggctaatttccccatagccgtggggtgacttccctggtcaccaaggcagtgcatgcatgttggggtttcctttaccttttctataagtgtaccaaaacatccacttaa

SEQ ID NO: 431663 - DNA, 573 bp, Homo sapiens
aatcactgcattgctgatgggaatcatcctgatggagaaatccaagggcaagggacagcagctgggctctactcctgagtgagtctagtgggcttgggggtgtccatgtggtgctgtcccttggcagggtcagggcagctgctagggtgggaccagcagttggggtctgcagcgtggagatgggcaggaagctggagcccggctcatcgtcgcatagcctgcctgcacccgccccccgccaccacctcctggtgggttccgccctcatgccccacctctccctgcagcgggacctggacttcaccatcgacctggacttcaagggccagctgtgcgagctgtcctgctccaccgactaccggatgcgctgaggcccggctctcccgccctgcacgagcccaggggctgagcgttcctaggcggtttcggggctcccccttcctctccctccctcccgcagaagggggttttaggggcctgggctggggggatggggagggcacatcgtgactgtgtttttcataacttatgtttttatatggttgcatttacgccaataaatcctcagctggg

SEQ ID NO: 431664 - DNA, 1286 bp, Homo sapiens
gactctagaggtcccccaacgatggtcctcagccgaggccgcgaactgcatcatggaggtgtcctgtggccaggcggaaagcagtgagaagcccaacgctgaggacatgacatccaaagattactactttgactcctacgcacactttggcatccacgaggagatgctgaaggacgaggtgcgcaccctcacttaccgcaactccatgtttcataaccggcacctcttcaaggacaaggtggtgctggacgtcggctcgggcaccggcatcctctgcatgtttgctgccaaggccggggcccgcaaggtcatcgggatcgagtgttccagtatctctgattatgcggtgaagatcgtcaaagccaacaagttagaccacgtggtgaccatcatcaaggggaaggtggaggaggtggagctcccagtggagaaggtggacatcatcatcagcgagtggatgggctactgcctcttctacgagtccatgctcaacaccgtgctctatgcccgggacaagtggctggcgcccgatggcctcatcttcccagaccgggccacgctgtatgtgacggccatcgaggaccggcagtacaaagactacaagatccactggtgggagaacgtgtatggcttcgacatgtcttgcatcaaagatgtggccattaaggagcccctagtggatgtcgtggaccccaaacagctggtcaccaacgcctgcctcataaaggaggtggacatctataccgtcaaggtggaagacctgaccttcacctccccgttctgcctgcaagtgaagcggaatgactacgtgcacgccctggtggcctacttcaacatcgagttcacacgctgccacaagaggaccggcttctccaccagccccgagtccccgtacacgcactggaagcagacggtgttctacatggaggactacctgaccgtgaagacgggcgaggagatcttcggcaccatcggcatgcggcccaacgccaagaacaaccgggacctggacttcaccatcgacctggacttcaagggccagctgtgcgagctgtcctgctccaccgactaccggatgcgctgaggcccggctctcccgccctgcacgagcccaggggctgagcgttcctaggcggtttcggggctcccccttcctctccctccctcccgcagaagggggttttaggggcctgggctggggggatggggagggcacatcgtgactgtgtttttcataacttatgtttttatatggttgcatttacgccaataaatcctcagctggg

SEQ ID NO: 431665 - DNA, 435 bp, Homo sapiens
  misc_feature (22)..(22): n is a, c, g, or t
tagtggatcccccgggctgcangattcgccccgagtccccgtacacgcactggaagcagacggtgttctacatggaggactacctgaccgtgaagacgggcgaggagatcttcggcaccatcggcatgcggcccaacgccaagaacaaccgggacctggacttcaccatcgacctggacttcaagggccagctgtgcgagctgtcctgctccaccgactaccggatgcgctgaggcccggctctcccgccctgcacgagcccaggggctgagcgttcctaggcggtttcggggctcccccttcctctccctccctcccgcagaagggggttttaggggcctgggctggggggatggggagggcacatcgtgactgtgtttttcataacttatgtttttatatggttgcatttacgccaataaatcctcagctggg

SEQ ID NO: 431666 - DNA, 364 bp, Homo sapiens
aatcactgcattgctgatgggaatcatcctgatggagaaatccaagggcaagggacagcagctgggctctactcctgacgggacctggacttcaccatcgacctggacttcaagggccagctgtgcgagctgtcctgctccaccgactaccggatgcgctgaggcccggctctcccgccctgcacgagcccaggggctgagcgttcctaggcggtttcggggctcccccttcctctccctccctcccgcagaagggggttttaggggcctgggctggggggatggggagggcacatcgtgactgtgtttttcataacttatgtttttatatggttgcatttacgccaataaatcctcagctggg

SEQ ID NO: 431667 - DNA, 972 bp, Homo sapiens
  misc_feature (972)..(972): n is a, c, g, or t
gggtttcaccatgttagccaggatggtctcgacctcctgaccttgtgatccgcccgcctcggtctcccaaaatgctgggattacaggcgtgagccaccgcgcccggccgcctggcgtaatttttgtatttttaatagaaatgggggtttcaccatgttgcccagactggtctcgaactcctgatgtcaagtgatccgcctgcctccgcctcctaaagtgctggaattacacccgtgagccatcgcgcccgaaccctattgtaaattttaagtctcaggcgtttgccagcggcacgccagagagtatagcctgcgcggaggcccagaaaccaaagagcgagctcattccgggattggagagaagtgtgagcagagggaagtagagggatcggggagaggaggggcaggacccacgcattcggccctttgcattcagcttcattcaactaggaactttttctgcaaatcaaggaaagcttcccggaggaagtggtgcctaagctgtgctctgattcacgtttagaagctgaccagacaaagagagaattttgtagccaccttggctaatgggatgagcctccagccgcctcttgaagaagtaaccccttttgcccttcctgtagttgccccctttcctctccctccctccccactgttgactgattcgaaaacgcggctccccacgcacggcaagatgcgcccaggccacggaggacaacaacggcaaagcccacgcgagaaactgacacaaagagtagaacagaccctcggcaactgcaccaacagacaagcgaagaaccgggacacaccaacgcaacgcgcaaagacagacacctaaaaacaggcaatatagaacgcacccacacaaacagctgcggacccgccgcgccgcaacatagagaagacaaagactcaccgagggacgcagaaacagcaccacaaacgacggaaccgccacgcgcgacacgccacn

SEQ ID NO: 431668 - DNA, 148 bp, Homo sapiens
gcctggagtcgccgggagtggtctgggttggaaaagtgggtcccggccgatgggtgcgagggtgggtggcactcagggtagtcatggaatgtggaccctgggacacccacgagcctgtgacagcagcagttgtcaactgggcagtttt

SEQ ID NO: 431669 - DNA, 116 bp, Homo sapiens
ccgcccccccccaggacgtttgccaccgtctgtggaaacatttgtggttgtcacccctacaaagactcatgcagcccccgggaccacggcactagctgggaaacggatactggaga

SEQ ID NO: 431670 - DNA, 1591 bp, Homo sapiens
gactctagaggtcccccaacgatggtcctcagccgaggccgcgaactgcatcatggaggtgtcctgtggccaggcggaaagcagtgagaagcccaacgctgaggacatgacatccaaagattactactttgactcctacgcacactttggcatccacgaggagatgctgaaggacgaggtgcgcaccctcacttaccgcaactccatgtttcataaccggcacctcttcaaggacaaggtggtgctggacgtcggctcgggcaccggcatcctctgcatgtttgctgccaaggccggggcccgcaaggtcatcgggatcgagtgttccagtatctctgattatgcggtgaagatcgtcaaagccaacaagttagaccacgtggtgaccatcatcaaggggaaggtggaggaggtggagctcccagtggagaaggtggacatcatcatcagcgagtggatgggctactgcctcttctacgagtccatgctcaacaccgtgctctatgcccgggacaagtggctggcgcccgatggcctcatcttcccagaccgggccacgctgtatgtgacggccatcgaggaccggcagtacaaagactacaagatccactggtgggagaacgtgtatggcttcgacatgtcttgcatcaaagatgtggccattaaggagcccctagtggatgtcgtggaccccaaacagctggtcaccaacgcctgcctcataaaggaggtggacatctataccgtcaaggtggaagacctgaccttcacctccccgttctgcctgcaagtgaagcggaatgactacgtgcacgccctggtggcctacttcaacatcgagttcacacgctgccacaagaggaccggcttctccaccagccccgagtccccgtacacgcactggaagcagacggtgttctacatggaggactacctgaccgtgaagacgggcgaggagatcttcggcaccatcggcatgcggcccaacgccaagaacaaccgggacctggacttcaccatcgacctggacttcaagggccagctgtgcgagctgtcctgctccaccgactaccggatgcgctgaggcccggctctcccgccctgcacgagcccaggggctgagcgttcctaggcggtttcggggctcccccttcctctccctccctcccgcagaagggggttttaggggcctgggctggggggatggggagggcacatcgtgactgtgtttttcataacttatgtttttatatggttgcatttacgccaataaatcctcagctgggaaaaaaaaaaaaaaaaaaaaaaagaggagcagagacacagcaacaaagaagaatccaccagagaggggcccacaaagctaaacgcgcgtacccagaggtatcacgggacacaagaggggcccccataatagggaagccgaaactacacacacaaaggaccacgtgggccgaacggtttccacacggcgctcagagaaccgtggcgaaacgcgcggggaaaaaccagggaaaaccacgggggcacaagggaaaccggaacacacacgggcggatggtggcaccacacagggggcccacagcaaccc

SEQ ID NO: 431671 - DNA, 1777 bp, Homo sapiens
agagttggcaaacccctgacctatgatggacgtattctctagccaattactagacggtattctcagacgggccgcctccattgccaatgaaatcttccagcggggtcgcggtaggcgggccgtggaccctctggtataaggcggtcccgggggagtgaggagaaagggggggtcttggcggccggaggaggagtaggtgcgggtgaagatggcggcagccgaggccgcgaactgcatcatggaggtgtcctgtggccaggcggaaagcagtgagaagcccaacgctgaggacatgacatccaaagattactactttgactcctacgcacactttggcatccacgaggagatgctgaaggacgaggtgcgcaccctcacttaccgcaactccatgtttcataaccggcacctcttcaaggacaaggtggtgctggacgtcggctcgggcaccggcatcctctgcatgtttgctgccaaggccggggcccgcaaggtcatcgggatcgagtgttccagtatctctgattatgcggtgaagatcgtcaaagccaacaagttagaccacgtggtgaccatcatcaaggggaaggtggaggaggtggagctcccagtggagaaggtggacatcatcatcagcgagtggatgggctactgcctcttctacgagtccatgctcaacaccgtgctctatgcccgggacaagtggctggcgcccgatggcctcatcttcccagaccgggccacgctgtatgtgacggccatcgaggaccggcagtacaaagactacaagatccactggtgggagaacgtgtatggcttcgacatgtcttgcatcaaagatgtggccattaaggagcccctagtggatgtcgtggaccccaaacagctggtcaccaacgcctgcctcataaaggaggtggacatctataccgtcaaggtggaagacctgaccttcacctccccgttctgcctgcaagtgaagcggaatgactacgtgcacgccctggtggcctacttcaacatcgagttcacacgctgccacaagaggaccggcttctccaccagccccgagtccccgtacacgcactggaagcagacggtgttctacatggaggactacctgaccgtgaagacgggcgaggagatcttcggcaccatcggcatgcggcccaacgccaagaacaaccgggacctggacttcaccatcgacctggacttcaagggccagctgtgcgagctgtcctgctccaccgactaccggatgcgctgaggcccggctctcccgccctgcacgagcccaggggctgagcgttcctaggcggtttcggggctcccccttcctctccctccctcccgcagaagggggttttaggggcctgggctggggggatggggagggcacatcgtgactgtgtttttcataacttatgtttttatatggttgcatttacgccaataaatcctcagctgggaaaaaaaaaaaaaaaaaaaaaaagaggagcagagacacagcaacaaagaagaatccaccagagaggggcccacaaagctaaacgcgcgtacccagaggtatcacgggacacaagaggggcccccataatagggaagccgaaactacacacacaaaggaccacgtgggccgaacggtttccacacggcgctcagagaaccgtggcgaaacgcgcggggaaaaaccagggaaaaccacgggggcacaagggaaaccggaacacacacgggcggatggtggcaccacacagggggcccacagcaaccc

SEQ ID NO: 431672 - DNA, 1663 bp, Homo sapiens
gacccacgcgtcgcggacgcgtgggtcgaccacgcgtcgcgaccacgcgtcggacccacgcgtcgggagggaggaggagtaggtgcgggtgaagatggcggcagccgaggccgcgaactgcatcatggaggtgtcctgtggccaggcggaaagcagtgagaagcccaacgctgaggacatgacatccaaagattactactttgactcctacgcacactttggcatccacgaggagatgctgaaggacgaggtgcgcaccctcacttaccgcaactccatgtttcataaccggcacctcttcaaggacaaggtggtgctggacgtcggctcgggcaccggcatcctctgcatgtttgctgccaaggccggggcccgcaaggtcatcgggatcgagtgttccagtatctctgattatgcggtgaagatcgtcaaagccaacaagttagaccacgtggtgaccatcatcaaggggaaggtggaggaggtggagctcccagtggagaaggtggacatcatcatcagcgagtggatgggctactgcctcttctacgagtccatgctcaacaccgtgctctatgcccgggacaagtggctggcgcccgatggcctcatcttcccagaccgggccacgctgtatgtgacggccatcgaggaccggcagtacaaagactacaagatccactggtgggagaacgtgtatggcttcgacatgtcttgcatcaaagatgtggccattaaggagcccctagtggatgtcgtggaccccaaacagctggtcaccaacgcctgcctcataaaggaggtggacatctataccgtcaaggtggaagacctgaccttcacctccccgttctgcctgcaagtgaagcggaatgactacgtgcacgccctggtggcctacttcaacatcgagttcacacgctgccacaagaggaccggcttctccaccagccccgagtccccgtacacgcactggaagcagacggtgttctacatggaggactacctgaccgtgaagacgggcgaggagatcttcggcaccatcggcatgcggcccaacgccaagaacaaccgggacctggacttcaccatcgacctggacttcaagggccagctgtgcgagctgtcctgctccaccgactaccggatgcgctgaggcccggctctcccgccctgcacgagcccaggggctgagcgttcctaggcggtttcggggctcccccttcctctccctccctcccgcagaagggggttttaggggcctgggctggggggatggggagggcacatcgtgactgtgtttttcataacttatgtttttatatggttgcatttacgccaataaatcctcagctgggaaaaaaaaaaaaaaaaaaaaaaagaggagcagagacacagcaacaaagaagaatccaccagagaggggcccacaaagctaaacgcgcgtacccagaggtatcacgggacacaagaggggcccccataatagggaagccgaaactacacacacaaaggaccacgtgggccgaacggtttccacacggcgctcagagaaccgtggcgaaacgcgcggggaaaaaccagggaaaaccacgggggcacaagggaaaccggaacacacacgggcggatggtggcaccacacagggggcccacagcaaccc

SEQ ID NO: 431673 - DNA, 1416 bp, Homo sapiens
gacccacgcgtcgcggacgcgtgggtcgaccacgcgtcgcgaccacgcgtcggacccacgcgtcgggagggaggaggagtaggtgcgggtgaagatggcggcagccgaggccgcgaactgcatcatggagaattttgtagccaccttggctaatgggatgagcctccagccgcctcttgaagaagtaagtgtcctgtggccaggcggaaagcagtgagaagcccaacgctgaggacatgacatccaaagattactactttgactcctacgcacactttggcatccacgaggagatgctgaaggacgaggtgcgcaccctcacttaccgcaactccatgtttcataaccggcacctcttcaaggacaaggtggtgctggacgtcggctcgggcaccggcatcctctgcatgtttgctgccaaggccggggcccgcaaggtcatcgggatcgagtgttccagtatctctgattatgcggtgaagatcgtcaaagccaacaagttagaccacgtggtgaccatcatcaaggggaaggtggaggaggtggagctcccagtggagaaggtggacatcatcatcagcgagtggatgggctactgcctcttctacgagtccatgctcaacaccgtgctctatgcccgggacaagtggctggcgcccgatggcctcatcttcccagaccgggccacgctgtatgtgacggccatcgaggaccggcagtacaaagactacaagatccactggtgggagaacgtgtatggcttcgacatgtcttgcatcaaagatgtggccattaaggagcccctagtggatgtcgtggaccccaaacagctggtcaccaacgcctgcctcataaaggaggtggacatctataccgtcaaggtggaagacctgaccttcacctccccgttctgcctgcaagtgaagcggaatgactacgtgcacgccctggtggcctacttcaacatcgagttcacacgctgccacaagaggaccggcttctccaccagccccgagtccccgtacacgcactggaagcagacggtgttctacatggaggactacctgaccgtgaagacgggcgaggagatcttcggcaccatcggcatgcggcccaacgccaagaacaaccgggacctggacttcaccatcgacctggacttcaagggccagctgtgcgagctgtcctgctccaccgactaccggatgcgctgaggcccggctctcccgccctgcacgagcccaggggctgagcgttcctaggcggtttcggggctcccccttcctctccctccctcccgcagaagggggttttaggggcctgggctggggggatggggagggcacatcgtgactgtgtttttcataacttatgtttttatatggttgcatttacgccaataaatcctcagctggg

SEQ ID NO: 431674 - DNA, 1520 bp, Homo sapiens
gactctagaggtcccccaacgatggtcctcagccgaggccgcgaactgcatcatggaggtgtcctgtggccaggcggaaagcagtgagaagcccaacgctgaggacatgacatccaaagattactactttgactcctacgcacactttggcatccacgaggagatgctgaaggacgaggtgcgcaccctcacttaccgcaactccatgtttcataaccggcacctcttcaaggacaaggtggtgctggacgtcggctcgggcaccggcatcctctgcatgtttgctgccaaggccggggcccgcaaggtcatcgggatcgagtgttccagtatctctgattatgcggtgaagatcgtcaaagccaacaagttagaccacgtggtgaccatcatcaaggggaaggtggaggaggtggagctcccagtggagaaggtggacatcatcatcagcgagtggatgggctactgcctcttctacgagtccatgctcaacaccgtgctctatgcccgggacaagtggctggcgcccgatggcctcatcttcccagaccgggccacgctgtatgtgacggccatcgaggaccggcagtacaaagactacaagatccactggtgggagaacgtgtatggcttcgacatgtcttgcatcaaagatgtggccattaaggagcccctagtggatgtcgtggaccccaaacagctggtcaccaacgcctgcctcataaaggaggtggacatctataccgtcaaggtggaagacctgaccttcacctccccgttctgcctgcaagtgaagcggaatgactacgtgcacgccctggtggcctacttcaacatcgagttcacacgctgccacaagaggaccggcttctccaccagccccgagtccccgtacacgcactggaagcagacggtgttctacatggaggactacctgaccgtgaagacgggcgaggagatcttcggcaccatcggcatgcggcccaacgccaagaacaaccgggacctggacttcaccatcgacctggacttcaagggccagctgtgcgagctgtcctgctccaccgactaccggatgcgctgaggcccggctctcccgccctgcacgagcccaggggctgagcgttcctaggcggtttcggggctcccccttcctctccctccctcccgcagaagggggttttaggggcctgggctggggggatggggagggcacatcgtgactgtgtttttcataacttatgtttttatatggttgcatttacgccaataaatcctcagctgggggtctggctttgtttcctgggggcaaaggaggtttggggttcctttcgcaggtactgcagtgccagcctcagcagtggggggaccggccttggcacctgctggtggctgccattctgtggatctgcgtctcccgtcccccgtctctaggcctcttgctccccttccttggttccttctcggggtccctgtcctccacagctgtctctcagggtctttgtccaactcttttcatc

SEQ ID NO: 431675 - DNA, 1909 bp, Homo sapiens
gactctagaggtcccccaacgatggtcctcagccgaggccgcgaactgcatcatggaggtgtcctgtggccaggcggaaagcagtgagaagcccaacgctgaggacatgacatccaaagattactactttgactcctacgcacactttggcatccacgaggagatgctgaaggacgaggtgcgcaccctcacttaccgcaactccatgtttcataaccggcacctcttcaaggacaaggtggtgctggacgtcggctcgggcaccggcatcctctgcatgtttgctgccaaggccggggcccgcaaggtcatcgggatcgagtgttccagtatctctgattatgcggtgaagatcgtcaaagccaacaagttagaccacgtggtgaccatcatcaaggggaaggtggaggaggtggagctcccagtggagaaggtggacatcatcatcagcgagtggatgggctactgcctcttctacgagtccatgctcaacaccgtgctctatgcccgggacaagtggctggcgcccgatggcctcatcttcccagaccgggccacgctgtatgtgacggccatcgaggaccggcagtacaaagactacaagatccactggtgggagaacgtgtatggcttcgacatgtcttgcatcaaagatgtggccattaaggagcccctagtggatgtcgtggaccccaaacagctggtcaccaacgcctgcctcataaaggaggtggacatctataccgtcaaggtggaagacctgaccttcacctccccgttctgcctgcaagtgaagcggaatgactacgtgcacgccctggtggcctacttcaacatcgagttcacacgctgccacaagaggaccggcttctccaccagccccgagtccccgtacacgcactggaagcagacggtgttctacatggaggactacctgaccgtgaagacgggcgaggagatcttcggcaccatcggcatgcggcccaacgccaagaacaaccgggacctggacttcaccatcgacctggacttcaagggccagctgtgcgagctgtcctgctccaccgactaccggatgcgctgaggcccggctctcccgccctgcacgagcccaggggctgagcgttcctaggcggtttcggggctcccccttcctctccctccctcccgcagaagggggttttaggggcctgggctggggggatggggagggcacatcgtgactgtgtttttcataacttatgtttttatatggttgcatttacgccaataaatcctcagctgggaaaaaaaaaaaaaaaaaaaaaaaaaaaaaaaaaaaaaaaaaaaaaaaggggggggggggaaaaaagagatagccccgcaggaggggggcgcaccaagaatcaccgccgcaacacaccgcgagggtgtttggtgagaaacaagggggcgcaccccacaagagaggagaagcggggctattaaacaacagacgagcgagaaggagcgagcgccgggtaacaaaaaacggcgcgcagccgaagcggggaacaaccccccggccaccaagtgcggagacaacattgtgtggagcaagcagggaacccctcaacacaccacgggggggggggggtacgcacaaaaaatgtggggggcccaaccaccaccaccccatcacaaagaggaagatatttagcagaggacaccccattaacggaaggaaagaaaataaatcataacacgactttttttacataagagggtatattaaaaggggttgggtgctcaaacacacactagtaggtgcagactaaaatatttatcgtgtgaggggcgcagctgagagaaaaaaaaaaggatgtgggagtcactgccgagggagacgagtatgtcaagcagcagtgggaagacgacatttttttttcgc

SEQ ID NO: 431676 - DNA, 1418 bp, Homo sapiens
gactctagaggtcccccaacgatggtcctcagccgaggccgcgaactgcatcatggaggtgtcctgtggccaggcggaaagcagtgagaagcccaacgctgaggacatgacatccaaagattactactttgactcctacgcacactttggcatccacgaggagatgctgaaggacgaggtgcgcaccctcacttaccgcaactccatgtttcataaccggcacctcttcaaggacaaggtggtgctggacgtcggctcgggcaccggcatcctctgcatgtttgctgccaaggccggggcccgcaaggtcatcgggatcgagtgttccagtatctctgattatgcggtgaagatcgtcaaagccaacaagttagaccacgtggtgaccatcatcaaggggaaggtggaggaggtggagctcccagtggagaaggtggacatcatcatcagcgagtggatgggctactgcctcttctacgagtccatgctcaacaccgtgctctatgcccgggacaagtggctggcgcccgatggcctcatcttcccagaccgggccacgctgtatgtgacggccatcgaggaccggcagtacaaagactacaagatccactggtgggagaacgtgtatggcttcgacatgtcttgcatcaaagatgtggccattaaggagcccctagtggatgtcgtggaccccaaacagctggtcaccaacgcctgcctcataaaggaggtggacatctataccgtcaaggtggaagacctgaccttcacctccccgttctgcctgcaagtgaagcggaatgactacgtgcacgccctggtggcctacttcaacatcgagttcacacgctgccacaagaggaccggcttctccaccagccccgagtccccgtacacgcactggaagcagacggtgttctacatggaggactacctgaccgtgaagacgggcgaggagatcttcggcaccatcggcatgcggcccaacgccaagaacaaccgggacctggacttcaccatcgacctggacttcaagggccagctgtgcgagctgtcctgctccaccgactaccggatgcgctgaggcccggctctcccgccctgcacgagcccaggggctgagcgttcctaggcggtttcggggctcccccttcctctccctccctcccgcagaagggggttttaggggcctgggctggggggatggggagggcacatcgtgactgtgtttttcataacttatgtttttatatggttgcatttacgccaataaatcctcagctgggaaaaaaaaaaaaaaaaaaaaaaaaaaacaaaccaacacaaaaacacgaacgcaacaacgcaacaacaaaaaacgaaaaaacaaaaaaacgaaaaatagagaacagagccactaagcaagaccagcgtaacgg

SEQ ID NO: 431677 - DNA, 1835 bp, Homo sapiens
gacccacgcgtcgcggacgcgtgggtcgaccacgcgtcgcgaccacgcgtcggacccacgcgtcgggagggaggaggagtaggtgcgggtgaagatggcggcagccgaggccgcgaactgcatcatggagaattttgtagccaccttggctaatgggatgagcctccagccgcctcttgaagaagtaaccccctttgcccttccctgtgtctgcccccattttccttcccctcccctccccagctgtgggctgagctagagacggggtcagagagactggagagatggtaggcgtggctgaggtgtcctgtggccaggcggaaagcagtgagaagcccaacgctgaggacatgacatccaaagattactactttgactcctacgcacactttggcatccacgaggagatgctgaaggacgaggtgcgcaccctcacttaccgcaactccatgtttcataaccggcacctcttcaaggacaaggtggtgctggacgtcggctcgggcaccggcatcctctgcatgtttgctgccaaggccggggcccgcaaggtcatcgggatcgagtgttccagtatctctgattatgcggtgaagatcgtcaaagccaacaagttagaccacgtggtgaccatcatcaaggggaaggtggaggaggtggagctcccagtggagaaggtggacatcatcatcagcgagtggatgggctactgcctcttctacgagtccatgctcaacaccgtgctctatgcccgggacaagtggctggcgcccgatggcctcatcttcccagaccgggccacgctgtatgtgacggccatcgaggaccggcagtacaaagactacaagatccactggtgggagaacgtgtatggcttcgacatgtcttgcatcaaagatgtggccattaaggagcccctagtggatgtcgtggaccccaaacagctggtcaccaacgcctgcctcataaaggaggtggacatctataccgtcaaggtggaagacctgaccttcacctccccgttctgcctgcaagtgaagcggaatgactacgtgcacgccctggtggcctacttcaacatcgagttcacacgctgccacaagaggaccggcttctccaccagccccgagtccccgtacacgcactggaagcagacggtgttctacatggaggactacctgaccgtgaagacgggcgaggagatcttcggcaccatcggcatgcggcccaacgccaagaacaaccgggacctggacttcaccatcgacctggacttcaagggccagctgtgcgagctgtcctgctccaccgactaccggatgcgctgaggcccggctctcccgccctgcacgagcccaggggctgagcgttcctaggcggtttcggggctcccccttcctctccctccctcccgcagaagggggttttaggggcctgggctggggggatggggagggcacatcgtgactgtgtttttcataacttatgtttttatatggttgcatttacgccaataaatcctcagctgggaaaaaaaaaaaaaaaaaaaaaaagaggagcagagacacagcaacaaagaagaatccaccagagaggggcccacaaagctaaacgcgcgtacccagaggtatcacgggacacaagaggggcccccataatagggaagccgaaactacacacacaaaggaccacgtgggccgaacggtttccacacggcgctcagagaaccgtggcgaaacgcgcggggaaaaaccagggaaaaccacgggggcacaagggaaaccggaacacacacgggcggatggtggcaccacacagggggcccacagcaaccc

SEQ ID NO: 431678 - DNA, 1459 bp, Homo sapiens
gactctagaggtcccccaacgatggtcctcagccgaggccgcgaactgcatcatggaggtgtcctgtggccaggcggaaagcagtgagaagcccaacgctgaggacatgacatccaaagattactactttgactcctacgcacactttggcatccacgaggagatgctgaaggacgaggtgcgcaccctcacttaccgcaactccatgtttcataaccggcacctcttcaaggacaaggtggtgctggacgtcggctcgggcaccggcatcctctgcatgtttgctgccaaggccggggcccgcaaggtcatcgggatcgagtgttccagtatctctgattatgcggtgaagatcgtcaaagccaacaagttagaccacgtggtgaccatcatcaaggggaaggtggaggaggtggagctcccagtggagaaggtggacatcatcatcagcgagtggatgggctactgcctcttctacgagtccatgctcaacaccgtgctctatgcccgggacaagtggctggcgcccgatggcctcatcttcccagaccgggccacgctgtatgtgacggccatcgaggaccggcagtacaaagactacaagatccactggtgggagaacgtgtatggcttcgacatgtcttgcatcaaagatgtggccattaaggagcccctagtggatgtcgtggaccccaaacagctggtcaccaacgcctgcctcataaaggaggtggacatctataccgtcaaggtggaagacctgaccttcacctccccgttctgcctgcaagtgaagcggaatgactacgtgcacgccctggtggcctacttcaacatcgagttcacacgctgccacaagaggaccggcttctccaccagccccgagtccccgtacacgcactggaagcagacggtgttctacatggaggactacctgaccgtgaagacgggcgaggagatcttcggcaccatcggcatgcggcccaacgccaagaacaaccgggacctggacttcaccatcgacctggacttcaagggccagctgtgcgagctgtcctgctccaccgactaccggatgcgctgaggcccggctctcccgccctgcacgagcccaggggctgagcgttcctaggcggtttcggggctcccccttcctctccctccctcccgcagaagggggttttaggggcctgggctggggggatggggagggcacatcgtgactgtgtttttcataacttatgtttttatatggttgcatttacgccaataaatcctcagctgggaacacaaccaacacaacaaaacacaaaccccggggcccattgccgggggcgggaacacgcggcttctcgaatgggcctgggcataacggttccggcccccctttttgtccaacgggtacaccccgccggccccaaaaagagagcggataaatcgaaagccggaccgggttagg

SEQ ID NO: 431679 - DNA, 1570 bp, Homo sapiens
  misc_feature (6)..(6): n is a, c, g, or t
ctcgtncaaattcggcagaggagagactggagagatggtgtcctgtggccaggcggaaagcagtgagaagcccaacgctgaggacatgacatccaaagattactactttgactcctacgcacactttggcatccacgaggagatgctgaaggacgaggtgcgcaccctcacttaccgcaactccatgtttcataaccggcacctcttcaaggacaaggtggtgctggacgtcggctcgggcaccggcatcctctgcatgtttgctgccaaggccggggcccgcaaggtcatcgggatcgagtgttccagtatctctgattatgcggtgaagatcgtcaaagccaacaagttagaccacgtggtgaccatcatcaaggggaaggtggaggaggtggagctcccagtggagaaggtggacatcatcatcagcgagtggatgggctactgcctcttctacgagtccatgctcaacaccgtgctctatgcccgggacaagtggctggcgcccgatggcctcatcttcccagaccgggccacgctgtatgtgacggccatcgaggaccggcagtacaaagactacaagatccactggtgggagaacgtgtatggcttcgacatgtcttgcatcaaagatgtggccattaaggagcccctagtggatgtcgtggaccccaaacagctggtcaccaacgcctgcctcataaaggaggtggacatctataccgtcaaggtggaagacctgaccttcacctccccgttctgcctgcaagtgaagcggaatgactacgtgcacgccctggtggcctacttcaacatcgagttcacacgctgccacaagaggaccggcttctccaccagccccgagtccccgtacacgcactggaagcagacggtgttctacatggaggactacctgaccgtgaagacgggcgaggagatcttcggcaccatcggcatgcggcccaacgccaagaacaaccgggacctggacttcaccatcgacctggacttcaagggccagctgtgcgagctgtcctgctccaccgactaccggatgcgctgaggcccggctctcccgccctgcacgagcccaggggctgagcgttcctaggcggtttcggggctcccccttcctctccctccctcccgcagaagggggttttaggggcctgggctggggggatggggagggcacatcgtgactgtgtttttcataacttatgtttttatatggttgcatttacgccaataaatcctcagctgggaaaaaaaaaaaaaaaaaaaaaaagaggagcagagacacagcaacaaagaagaatccaccagagaggggcccacaaagctaaacgcgcgtacccagaggtatcacgggacacaagaggggcccccataatagggaagccgaaactacacacacaaaggaccacgtgggccgaacggtttccacacggcgctcagagaaccgtggcgaaacgcgcggggaaaaaccagggaaaaccacgggggcacaagggaaaccggaacacacacgggcggatggtggcaccacacagggggcccacagcaaccc

SEQ ID NO: 431680 - DNA, 1614 bp, Homo sapiens
tgcatcaacgcgtttgggagctctccaatggtcgacctgcaggcggcgcgaattcactagtgattcagccatgttggccgggtgtcctgtggccaggcggaaagcagtgagaagcccaacgctgaggacatgacatccaaagattactactttgactcctacgcacactttggcatccacgaggagatgctgaaggacgaggtgcgcaccctcacttaccgcaactccatgtttcataaccggcacctcttcaaggacaaggtggtgctggacgtcggctcgggcaccggcatcctctgcatgtttgctgccaaggccggggcccgcaaggtcatcgggatcgagtgttccagtatctctgattatgcggtgaagatcgtcaaagccaacaagttagaccacgtggtgaccatcatcaaggggaaggtggaggaggtggagctcccagtggagaaggtggacatcatcatcagcgagtggatgggctactgcctcttctacgagtccatgctcaacaccgtgctctatgcccgggacaagtggctggcgcccgatggcctcatcttcccagaccgggccacgctgtatgtgacggccatcgaggaccggcagtacaaagactacaagatccactggtgggagaacgtgtatggcttcgacatgtcttgcatcaaagatgtggccattaaggagcccctagtggatgtcgtggaccccaaacagctggtcaccaacgcctgcctcataaaggaggtggacatctataccgtcaaggtggaagacctgaccttcacctccccgttctgcctgcaagtgaagcggaatgactacgtgcacgccctggtggcctacttcaacatcgagttcacacgctgccacaagaggaccggcttctccaccagccccgagtccccgtacacgcactggaagcagacggtgttctacatggaggactacctgaccgtgaagacgggcgaggagatcttcggcaccatcggcatgcggcccaacgccaagaacaaccgggacctggacttcaccatcgacctggacttcaagggccagctgtgcgagctgtcctgctccaccgactaccggatgcgctgaggcccggctctcccgccctgcacgagcccaggggctgagcgttcctaggcggtttcggggctcccccttcctctccctccctcccgcagaagggggttttaggggcctgggctggggggatggggagggcacatcgtgactgtgtttttcataacttatgtttttatatggttgcatttacgccaataaatcctcagctgggaaaaaaaaaaaaaaaaaaaaaaagaggagcagagacacagcaacaaagaagaatccaccagagaggggcccacaaagctaaacgcgcgtacccagaggtatcacgggacacaagaggggcccccataatagggaagccgaaactacacacacaaaggaccacgtgggccgaacggtttccacacggcgctcagagaaccgtggcgaaacgcgcggggaaaaaccagggaaaaccacgggggcacaagggaaaccggaacacacacgggcggatggtggcaccacacagggggcccacagcaaccc

SEQ ID NO: 431681 - DNA, 1643 bp, Homo sapiens
agagttggcaaacccctgacctatgatggacgtattctctagccaattactagacggtattctcagacgggccgcctccattgccaatgaaatcttccagcggggtcgcggtgtcctgtggccaggcggaaagcagtgagaagcccaacgctgaggacatgacatccaaagattactactttgactcctacgcacactttggcatccacgaggagatgctgaaggacgaggtgcgcaccctcacttaccgcaactccatgtttcataaccggcacctcttcaaggacaaggtggtgctggacgtcggctcgggcaccggcatcctctgcatgtttgctgccaaggccggggcccgcaaggtcatcgggatcgagtgttccagtatctctgattatgcggtgaagatcgtcaaagccaacaagttagaccacgtggtgaccatcatcaaggggaaggtggaggaggtggagctcccagtggagaaggtggacatcatcatcagcgagtggatgggctactgcctcttctacgagtccatgctcaacaccgtgctctatgcccgggacaagtggctggcgcccgatggcctcatcttcccagaccgggccacgctgtatgtgacggccatcgaggaccggcagtacaaagactacaagatccactggtgggagaacgtgtatggcttcgacatgtcttgcatcaaagatgtggccattaaggagcccctagtggatgtcgtggaccccaaacagctggtcaccaacgcctgcctcataaaggaggtggacatctataccgtcaaggtggaagacctgaccttcacctccccgttctgcctgcaagtgaagcggaatgactacgtgcacgccctggtggcctacttcaacatcgagttcacacgctgccacaagaggaccggcttctccaccagccccgagtccccgtacacgcactggaagcagacggtgttctacatggaggactacctgaccgtgaagacgggcgaggagatcttcggcaccatcggcatgcggcccaacgccaagaacaaccgggacctggacttcaccatcgacctggacttcaagggccagctgtgcgagctgtcctgctccaccgactaccggatgcgctgaggcccggctctcccgccctgcacgagcccaggggctgagcgttcctaggcggtttcggggctcccccttcctctccctccctcccgcagaagggggttttaggggcctgggctggggggatggggagggcacatcgtgactgtgtttttcataacttatgtttttatatggttgcatttacgccaataaatcctcagctgggaaaaaaaaaaaaaaaaaaaaaaagaggagcagagacacagcaacaaagaagaatccaccagagaggggcccacaaagctaaacgcgcgtacccagaggtatcacgggacacaagaggggcccccataatagggaagccgaaactacacacacaaaggaccacgtgggccgaacggtttccacacggcgctcagagaaccgtggcgaaacgcgcggggaaaaaccagggaaaaccacgggggcacaagggaaaccggaacacacacgggcggatggtggcaccacacagggggcccacagcaaccc

SEQ ID NO: 431682 - DNA, 2076 bp, Homo sapiens
gggtttcaccatgttagccaggatggtctcgacctcctgaccttgtgatccgcccgcctcggtctcccaaaatgctgggattacaggcgtgagccaccgcgcccggccgcctggcgtaatttttgtatttttaatagaaatgggggtttcaccatgttgcccagactggtctcgaactcctgatgtcaagtgatccgcctgcctccgcctcctaaagtgctggaattacacccgtgagccatcgcgcccgaaccctattgtaaattttaagtctcaggcgtttgccagcggcacgccagagagtatagcctgcgcggaggcccagaaaccaaagagcgagctcattccgggattggagagaagtgtgagcagagggaagtagagggatcggggagaggaggggcaggacccacgcattcggccctttgcattcagcttcattcaactaggaactttttctgcaaatcaaggaaagcttcccggaggaagtggtgcctaagctgtgctctgattcacgtttagaagctgaccagacaaagagaggtgtcctgtggccaggcggaaagcagtgagaagcccaacgctgaggacatgacatccaaagattactactttgactcctacgcacactttggcatccacgaggagatgctgaaggacgaggtgcgcaccctcacttaccgcaactccatgtttcataaccggcacctcttcaaggacaaggtggtgctggacgtcggctcgggcaccggcatcctctgcatgtttgctgccaaggccggggcccgcaaggtcatcgggatcgagtgttccagtatctctgattatgcggtgaagatcgtcaaagccaacaagttagaccacgtggtgaccatcatcaaggggaaggtggaggaggtggagctcccagtggagaaggtggacatcatcatcagcgagtggatgggctactgcctcttctacgagtccatgctcaacaccgtgctctatgcccgggacaagtggctggcgcccgatggcctcatcttcccagaccgggccacgctgtatgtgacggccatcgaggaccggcagtacaaagactacaagatccactggtgggagaacgtgtatggcttcgacatgtcttgcatcaaagatgtggccattaaggagcccctagtggatgtcgtggaccccaaacagctggtcaccaacgcctgcctcataaaggaggtggacatctataccgtcaaggtggaagacctgaccttcacctccccgttctgcctgcaagtgaagcggaatgactacgtgcacgccctggtggcctacttcaacatcgagttcacacgctgccacaagaggaccggcttctccaccagccccgagtccccgtacacgcactggaagcagacggtgttctacatggaggactacctgaccgtgaagacgggcgaggagatcttcggcaccatcggcatgcggcccaacgccaagaacaaccgggacctggacttcaccatcgacctggacttcaagggccagctgtgcgagctgtcctgctccaccgactaccggatgcgctgaggcccggctctcccgccctgcacgagcccaggggctgagcgttcctaggcggtttcggggctcccccttcctctccctccctcccgcagaagggggttttaggggcctgggctggggggatggggagggcacatcgtgactgtgtttttcataacttatgtttttatatggttgcatttacgccaataaatcctcagctgggaaaaaaaaaaaaaaaaaaaaaaagaggagcagagacacagcaacaaagaagaatccaccagagaggggcccacaaagctaaacgcgcgtacccagaggtatcacgggacacaagaggggcccccataatagggaagccgaaactacacacacaaaggaccacgtgggccgaacggtttccacacggcgctcagagaaccgtggcgaaacgcgcggggaaaaaccagggaaaaccacgggggcacaagggaaaccggaacacacacgggcggatggtggcaccacacagggggcccacagcaaccc

SEQ ID NO: 431683 - DNA, 1897 bp, Homo sapiens
gggtttcaccatgttagccaggatggtctcgacctcctgaccttgtgatccgcccgcctcggtctcccaaaatgctgggattacaggcgtgagccaccgcgcccggccgcctggcgtaatttttgtatttttaatagaaatgggggtttcaccatgttgcccagactggtctcgaactcctgatgtcaagtgatccgcctgcctccgcctcctaaagtgctggaattacacccgtgagccatcgcgcccgaaccctattgtaaattttaagtctcaggcgtttgccagcggcacgccagagagtatagcctgcgcggaggcccagaaaccaaagagcgagctcattccgggattggagagaagtgtgtcctgtggccaggcggaaagcagtgagaagcccaacgctgaggacatgacatccaaagattactactttgactcctacgcacactttggcatccacgaggagatgctgaaggacgaggtgcgcaccctcacttaccgcaactccatgtttcataaccggcacctcttcaaggacaaggtggtgctggacgtcggctcgggcaccggcatcctctgcatgtttgctgccaaggccggggcccgcaaggtcatcgggatcgagtgttccagtatctctgattatgcggtgaagatcgtcaaagccaacaagttagaccacgtggtgaccatcatcaaggggaaggtggaggaggtggagctcccagtggagaaggtggacatcatcatcagcgagtggatgggctactgcctcttctacgagtccatgctcaacaccgtgctctatgcccgggacaagtggctggcgcccgatggcctcatcttcccagaccgggccacgctgtatgtgacggccatcgaggaccggcagtacaaagactacaagatccactggtgggagaacgtgtatggcttcgacatgtcttgcatcaaagatgtggccattaaggagcccctagtggatgtcgtggaccccaaacagctggtcaccaacgcctgcctcataaaggaggtggacatctataccgtcaaggtggaagacctgaccttcacctccccgttctgcctgcaagtgaagcggaatgactacgtgcacgccctggtggcctacttcaacatcgagttcacacgctgccacaagaggaccggcttctccaccagccccgagtccccgtacacgcactggaagcagacggtgttctacatggaggactacctgaccgtgaagacgggcgaggagatcttcggcaccatcggcatgcggcccaacgccaagaacaaccgggacctggacttcaccatcgacctggacttcaagggccagctgtgcgagctgtcctgctccaccgactaccggatgcgctgaggcccggctctcccgccctgcacgagcccaggggctgagcgttcctaggcggtttcggggctcccccttcctctccctccctcccgcagaagggggttttaggggcctgggctggggggatggggagggcacatcgtgactgtgtttttcataacttatgtttttatatggttgcatttacgccaataaatcctcagctgggaaaaaaaaaaaaaaaaaaaaaaagaggagcagagacacagcaacaaagaagaatccaccagagaggggcccacaaagctaaacgcgcgtacccagaggtatcacgggacacaagaggggcccccataatagggaagccgaaactacacacacaaaggaccacgtgggccgaacggtttccacacggcgctcagagaaccgtggcgaaacgcgcggggaaaaaccagggaaaaccacgggggcacaagggaaaccggaacacacacgggcggatggtggcaccacacagggggcccacagcaaccc

SEQ ID NO: 431684 - DNA, 1530 bp, Homo sapiens
gacccacgcgtcgcggacgcgtgggtcgaccacgcgtcgcgaccacgcgtcggacccacgcgtcgggagggaggaggagtaggtgcgggtgaagatggcggcagccgaggccgcgaactgcatcatggagaattttgtagccaccttggctaatgggatgagcctccagccgcctcttgaagaagtaaccccctttgcccttccctgtgtctgcccccattttccttcccctcccctccccagctgtgggctgagctagagacggggtcagagagactggagagatggtaggcgtggctgaggtgtcctgtggccaggcggaaagcagtgagaagcccaacgctgaggacatgacatccaaagattactactttgactcctacgcacactttggcatccacgaggagatgctgaaggacgaggtgcgcaccctcacttaccgcaactccatgtttcataaccggcacctcttcaaggacaaggtggtgctggacgtcggctcgggcaccggcatcctctgcatgtttgctgccaaggccggggcccgcaaggtcatcgggatcgagtgttccagtatctctgattatgcggtgaagatcgtcaaagccaacaagttagaccacgtggtgaccatcatcaaggggaaggtggaggaggtggagctcccagtggagaaggtggacatcatcatcagcgagtggatgggctactgcctcttctacgagtccatgctcaacaccgtgctctatgcccgggacaagtggctggcgcccgatggcctcatcttcccagaccgggccacgctgtatgtgacggccatcgaggaccggcagtacaaagactacaagatccactggtgggagaacgtgtatggcttcgacatgtcttgcatcaaagatgtggccattaaggagcccctagtggatgtcgtggaccccaaacagctggtcaccaacgcctgcctcataaaggaggtggacatctataccgtcaaggtggaagacctgaccttcacctccccgttctgcctgcaagtgaagcggaatgactacgtgcacgccctggtggcctacttcaacatcgagttcacacgctgccacaagaggaccggcttctccaccagccccgagtccccgtacacgcactggaagcagacggtgttctacatggaggactacctgaccgtgaagacgggcgaggagatcttcggcaccatcggcatgcggcccaacgccaagaacaaccgggacctggacttcaccatcgacctggacttcaagggccagctgtgcgagctgtcctgctccaccgactaccggatgcgctgaggcccggctctcccgccctgcacgagcccaggggctgagcgttcctaggcggtttcggggctcccccttcctctccctccctcccgcagaagggggttttaggggcctgggctggggggatggggagggcacatcgtgactgtgtttttcataacttatgtttttatatggttgcatttacgccaataaatcctcagctggg

SEQ ID NO: 431685 - DNA, 1561 bp, Homo sapiens
gacccacgcgtcgcggacgcgtgggtcgaccacgcgtcgcgaccacgcgtcggacccacgcgtcgggagggaggaggagtaggtgcgggtgaagatggcggcagccgaggccgcgaactgcatcatggaggagatgctgaaggacgaggtgcgcaccctcacttaccgcaactccatgtttcataaccggcacctcttcaaggacaaggtggtgctggacgtcggctcgggcaccggcatcctctgcatgtttgctgccaaggccggggcccgcaaggtcatcgggatcgagtgttccagtatctctgattatgcggtgaagatcgtcaaagccaacaagttagaccacgtggtgaccatcatcaaggggaaggtggaggaggtggagctcccagtggagaaggtggacatcatcatcagcgagtggatgggctactgcctcttctacgagtccatgctcaacaccgtgctctatgcccgggacaagtggctggcgcccgatggcctcatcttcccagaccgggccacgctgtatgtgacggccatcgaggaccggcagtacaaagactacaagatccactggtgggagaacgtgtatggcttcgacatgtcttgcatcaaagatgtggccattaaggagcccctagtggatgtcgtggaccccaaacagctggtcaccaacgcctgcctcataaaggaggtggacatctataccgtcaaggtggaagacctgaccttcacctccccgttctgcctgcaagtgaagcggaatgactacgtgcacgccctggtggcctacttcaacatcgagttcacacgctgccacaagaggaccggcttctccaccagccccgagtccccgtacacgcactggaagcagacggtgttctacatggaggactacctgaccgtgaagacgggcgaggagatcttcggcaccatcggcatgcggcccaacgccaagaacaaccgggacctggacttcaccatcgacctggacttcaagggccagctgtgcgagctgtcctgctccaccgactaccggatgcgctgaggcccggctctcccgccctgcacgagcccaggggctgagcgttcctaggcggtttcggggctcccccttcctctccctccctcccgcagaagggggttttaggggcctgggctggggggatggggagggcacatcgtgactgtgtttttcataacttatgtttttatatggttgcatttacgccaataaatcctcagctgggaaaaaaaaaaaaaaaaaaaaaaagaggagcagagacacagcaacaaagaagaatccaccagagaggggcccacaaagctaaacgcgcgtacccagaggtatcacgggacacaagaggggcccccataatagggaagccgaaactacacacacaaaggaccacgtgggccgaacggtttccacacggcgctcagagaaccgtggcgaaacgcgcggggaaaaaccagggaaaaccacgggggcacaagggaaaccggaacacacacgggcggatggtggcaccacacagggggcccacagcaaccc

SEQ ID NO: 431686 - DNA, 1915 bp, Homo sapiens
gacccacgcgtcgcggacgcgtgggtcgaccacgcgtcgcgaccacgcgtcggacccacgcgtcgggagggaggaggagtaggtgcgggtgaagatggcggcagccgaggccgcgaactgcatcatggagaattttgtagccaccttggctaatgggatgagcctccagccgcctcttgaagaagtaaccccctttgcccttccctgtgtctgcccccattttccttcccctcccctccccagctgtgggctgagctagagacggggtcagagagactggagagatggtaggcgtggctgaggtgtcctgtggccaggcggaaagcagtgagaagcccaacgctgaggacatgacatccaaagattactactttgactcctacgcacactttggcatccacgagagacggtctcgctctgtcgcccaggctagagtgcattggtgcaatcatggctcactgcagcctcgacctccccggctcaggagatgctgaaggacgaggtgcgcaccctcacttaccgcaactccatgtttcataaccggcacctcttcaaggacaaggtggtgctggacgtcggctcgggcaccggcatcctctgcatgtttgctgccaaggccggggcccgcaaggtcatcgggatcgagtgttccagtatctctgattatgcggtgaagatcgtcaaagccaacaagttagaccacgtggtgaccatcatcaaggggaaggtggaggaggtggagctcccagtggagaaggtggacatcatcatcagcgagtggatgggctactgcctcttctacgagtccatgctcaacaccgtgctctatgcccgggacaagtggctggcgcccgatggcctcatcttcccagaccgggccacgctgtatgtgacggccatcgaggaccggcagtacaaagactacaagatccactggtgggagaacgtgtatggcttcgacatgtcttgcatcaaagatgtggccattaaggagcccctagtggatgtcgtggaccccaaacagctggtcaccaacgcctgcctcataaaggaggtggacatctataccgtcaaggtggaagacctgaccttcacctccccgttctgcctgcaagtgaagcggaatgactacgtgcacgccctggtggcctacttcaacatcgagttcacacgctgccacaagaggaccggcttctccaccagccccgagtccccgtacacgcactggaagcagacggtgttctacatggaggactacctgaccgtgaagacgggcgaggagatcttcggcaccatcggcatgcggcccaacgccaagaacaaccgggacctggacttcaccatcgacctggacttcaagggccagctgtgcgagctgtcctgctccaccgactaccggatgcgctgaggcccggctctcccgccctgcacgagcccaggggctgagcgttcctaggcggtttcggggctcccccttcctctccctccctcccgcagaagggggttttaggggcctgggctggggggatggggagggcacatcgtgactgtgtttttcataacttatgtttttatatggttgcatttacgccaataaatcctcagctgggaaaaaaaaaaaaaaaaaaaaaaagaggagcagagacacagcaacaaagaagaatccaccagagaggggcccacaaagctaaacgcgcgtacccagaggtatcacgggacacaagaggggcccccataatagggaagccgaaactacacacacaaaggaccacgtgggccgaacggtttccacacggcgctcagagaaccgtggcgaaacgcgcggggaaaaaccagggaaaaccacgggggcacaagggaaaccggaacacacacgggcggatggtggcaccacacagggggcccacagcaaccc

SEQ ID NO: 431687 - DNA, 1453 bp, Homo sapiens
tgtgccggtaccttccaaagcggagatgctgaaggacgaggtgcgcaccctcacttaccgcaactccatgtttcataaccggcacctcttcaaggacaaggtggtgctggacgtcggctcgggcaccggcatcctctgcatgtttgctgccaaggccggggcccgcaaggtcatcgggatcgagtgttccagtatctctgattatgcggtgaagatcgtcaaagccaacaagttagaccacgtggtgaccatcatcaaggggaaggtggaggaggtggagctcccagtggagaaggtggacatcatcatcagcgagtggatgggctactgcctcttctacgagtccatgctcaacaccgtgctctatgcccgggacaagtggctggcgcccgatggcctcatcttcccagaccgggccacgctgtatgtgacggccatcgaggaccggcagtacaaagactacaagatccactggtgggagaacgtgtatggcttcgacatgtcttgcatcaaagatgtggccattaaggagcccctagtggatgtcgtggaccccaaacagctggtcaccaacgcctgcctcataaaggaggtggacatctataccgtcaaggtggaagacctgaccttcacctccccgttctgcctgcaagtgaagcggaatgactacgtgcacgccctggtggcctacttcaacatcgagttcacacgctgccacaagaggaccggcttctccaccagccccgagtccccgtacacgcactggaagcagacggtgttctacatggaggactacctgaccgtgaagacgggcgaggagatcttcggcaccatcggcatgcggcccaacgccaagaacaaccgggacctggacttcaccatcgacctggacttcaagggccagctgtgcgagctgtcctgctccaccgactaccggatgcgctgaggcccggctctcccgccctgcacgagcccaggggctgagcgttcctaggcggtttcggggctcccccttcctctccctccctcccgcagaagggggttttaggggcctgggctggggggatggggagggcacatcgtgactgtgtttttcataacttatgtttttatatggttgcatttacgccaataaatcctcagctgggaaaaaaaaaaaaaaaaaaaaaaagaggagcagagacacagcaacaaagaagaatccaccagagaggggcccacaaagctaaacgcgcgtacccagaggtatcacgggacacaagaggggcccccataatagggaagccgaaactacacacacaaaggaccacgtgggccgaacggtttccacacggcgctcagagaaccgtggcgaaacgcgcggggaaaaaccagggaaaaccacgggggcacaagggaaaccggaacacacacgggcggatggtggcaccacacagggggcccacagcaaccc

SEQ ID NO: 431688 - DNA, 1261 bp, Homo sapiens
gactctagaggtcccccaacgatggtcctcagccgaggccgcgaactgcatcatggaggtgtcctgtggccaggcggaaagcagtgagaagcccaacgctgaggacatgacatccaaagattactactttgactcctacgcacactttggcatccacgaggagatgctgaaggacgaggtgcgcaccctcacttaccgcaactccatgtttcataaccggcacctcttcaaggacaaggtggtgctggacgtcggctcgggcaccggcatcctctgcatgtttgctgccaaggccggggcccgcaaggtcatcgggatcgagtgttccagtatctctgattatgcggtgaagatcgtcaaagccaacaagttagaccacgtggtgaccatcatcaaggggaaggtggaggaggtggagctcccagtggagaaggtggacatcatcatcagcgagtggatgggctactgcctcttctacgagtccatgctcaacaccgtgctctatgcccgggacaagtggctggcgcccgatggcctcatcttcccagaccgggccacgctgtatgtgacggccatcgaggaccggcagtacaaagactacaagatccactggtgggagaacgtgtatggcttcgacatgtcttgcatcaaagatgtggccattaaggagcccctagtggatgtcgtggaccccaaacagctggtcaccaacgcctgcctcataaaggaggtggacatctataccgtcaaggtggaagacctgaccttcacctccccgttctgcctgcaagtgaagcggaatgactacgtgcacgccctggtggcctacttcaacatcgagttcacacgctgccacaagaggaccggcttctccaccagccccgagtccccgtacacgcactggaagcagacggtgttctacatggaggactacctgaccgtgaagacgggcgaggagatcttcggcaccatcggcatgcggcccaacgccaagaacaaccgggacctggacttcaccatcgacctggacttcaagggccagctgtgcgagctgtcctgctccaccgactaccggatgcgctgaggcccggctctcccgccctgcacgagcccaggggctgagcgttcctaggcggtttcggggctcccccttcctctccctccctcccgcagaagggggtttagggccggccggggatggaaggcctccgccggtttccaacctgttttatggggttcccaaatctccgggaaaaaaccc

SEQ ID NO: 431689 - DNA, 1545 bp, Homo sapiens
  misc_feature (12)..(12): n is a, c, g, or t
ggaaatgcatgntgaagaatgcccaaactgcttgaaggaacaatgaacaatccaaaagattttcattcatttgacttccatacgcacacatttggcattccacgaaggatgaatgcctgaatggatcgaagggtgcgcaccctcacttaccgcaactccatgtttcataaccggcacctcttcaaggacaaggtggtgctggacgtcggctcgggcaccggcatcctctgcatgtttgctgccaaggccggggcccgcaaggtcatcgggatcgagtgttccagtatctctgattatgcggtgaagatcgtcaaagccaacaagttagaccacgtggtgaccatcatcaaggggaaggtggaggaggtggagctcccagtggagaaggtggacatcatcatcagcgagtggatgggctactgcctcttctacgagtccatgctcaacaccgtgctctatgcccgggacaagtggctggcgcccgatggcctcatcttcccagaccgggccacgctgtatgtgacggccatcgaggaccggcagtacaaagactacaagatccactggtgggagaacgtgtatggcttcgacatgtcttgcatcaaagatgtggccattaaggagcccctagtggatgtcgtggaccccaaacagctggtcaccaacgcctgcctcataaaggaggtggacatctataccgtcaaggtggaagacctgaccttcacctccccgttctgcctgcaagtgaagcggaatgactacgtgcacgccctggtggcctacttcaacatcgagttcacacgctgccacaagaggaccggcttctccaccagccccgagtccccgtacacgcactggaagcagacggtgttctacatggaggactacctgaccgtgaagacgggcgaggagatcttcggcaccatcggcatgcggcccaacgccaagaacaaccgggacctggacttcaccatcgacctggacttcaagggccagctgtgcgagctgtcctgctccaccgactaccggatgcgctgaggcccggctctcccgccctgcacgagcccaggggctgagcgttcctaggcggtttcggggctcccccttcctctccctccctcccgcagaagggggttttaggggcctgggctggggggatggggagggcacatcgtgactgtgtttttcataacttatgtttttatatggttgcatttacgccaataaatcctcagctgggaaaaaaaaaaaaaaaaaaaaaaagaggagcagagacacagcaacaaagaagaatccaccagagaggggcccacaaagctaaacgcgcgtacccagaggtatcacgggacacaagaggggcccccataatagggaagccgaaactacacacacaaaggaccacgtgggccgaacggtttccacacggcgctcagagaaccgtggcgaaacgcgcggggaaaaaccagggaaaaccacgggggcacaagggaaaccggaacacacacgggcggatggtggcaccacacagggggcccacagcaaccc

SEQ ID NO: 431690 - DNA, 1478 bp, Homo sapiens
  misc_feature (43)..(43): n is a, c, g, or t
cgacacacttttggcaattccaacgaacgggcagacttcgccntgacacggaaccgatgtgcttggtgcgcaccctcacttaccgcaactccatgtttcataaccggcacctcttcaaggacaaggtggtgctggacgtcggctcgggcaccggcatcctctgcatgtttgctgccaaggccggggcccgcaaggtcatcgggatcgagtgttccagtatctctgattatgcggtgaagatcgtcaaagccaacaagttagaccacgtggtgaccatcatcaaggggaaggtggaggaggtggagctcccagtggagaaggtggacatcatcatcagcgagtggatgggctactgcctcttctacgagtccatgctcaacaccgtgctctatgcccgggacaagtggctggcgcccgatggcctcatcttcccagaccgggccacgctgtatgtgacggccatcgaggaccggcagtacaaagactacaagatccactggtgggagaacgtgtatggcttcgacatgtcttgcatcaaagatgtggccattaaggagcccctagtggatgtcgtggaccccaaacagctggtcaccaacgcctgcctcataaaggaggtggacatctataccgtcaaggtggaagacctgaccttcacctccccgttctgcctgcaagtgaagcggaatgactacgtgcacgccctggtggcctacttcaacatcgagttcacacgctgccacaagaggaccggcttctccaccagccccgagtccccgtacacgcactggaagcagacggtgttctacatggaggactacctgaccgtgaagacgggcgaggagatcttcggcaccatcggcatgcggcccaacgccaagaacaaccgggacctggacttcaccatcgacctggacttcaagggccagctgtgcgagctgtcctgctccaccgactaccggatgcgctgaggcccggctctcccgccctgcacgagcccaggggctgagcgttcctaggcggtttcggggctcccccttcctctccctccctcccgcagaagggggttttaggggcctgggctggggggatggggagggcacatcgtgactgtgtttttcataacttatgtttttatatggttgcatttacgccaataaatcctcagctgggaaaaaaaaaaaaaaaaaaaaaaagaggagcagagacacagcaacaaagaagaatccaccagagaggggcccacaaagctaaacgcgcgtacccagaggtatcacgggacacaagaggggcccccataatagggaagccgaaactacacacacaaaggaccacgtgggccgaacggtttccacacggcgctcagagaaccgtggcgaaacgcgcggggaaaaaccagggaaaaccacgggggcacaagggaaaccggaacacacacgggcggatggtggcaccacacagggggcccacagcaaccc

SEQ ID NO: 431691 - DNA, 1131 bp, Homo sapiens
gactctagaggtcccccaacgatggtcctcagccgaggccgcgaactgcatcatggaggtgtcctgtggccaggcggaaagcagtgagaagcccaacgctgaggacatgacatccaaagattactactttgactcctacgcacactttggcatccacgaggagatgctgaaggacgaggtgcgcaccctcacttaccgcaactccatgtttcataaccggcacctcttcaaggacaaggtggtgctggacgtcggctcgggcaccggcatcctctgcatgtttgctgccaaggccggggcccgcaaggtcatcgggatcgagtgttccagtatctctgattatgcggtgaagatcgtcaaagccaacaagttagaccacgtggtgaccatcatcaaggggaaggtggaggaggtggagctcccagtggagaaggtggacatcatcatcagcgagtggatgggctactgcctcttctacgagtccatgctcaacaccgtgctctatgcccgggacaagtggctggcgcccgatggcctcatcttcccagaccgggccacgctgtatgtgacggccatcgaggaccggcagtacaaagactacaagatccactggtgggagaacgtgtatggcttcgacatgtcttgcatcaaagatgtggccattaaggagcccctagtggatgtcgtggaccccaaacagctggtcaccaacgcctgcctcataaaggaggtggacatctataccgtcaaggtggaagacctgaccttcacctccccgttctgcctgcaagtgaagcggaatgactacgtgcacgccctggtggcctacttcaacatcgagttcacacgctgccacaagaggaccggcttctccaccagccccgagtccccgtacacgcactggaagcagacggtgttctacatggaggactacctgaccgtgaagacgggcgaggagatcttcggcaccatcggcatgcggcccaacgccaagaacaaccgggacctggacttcaccatcgaccctgcaaggcataattggactgtacttcctctctttgttgctctcccactcatcctaaccctactcctaagcacataaccattgcccccgagcaatgctcaattaca

SEQ ID NO: 431692 - DNA, 1503 bp, Homo sapiens
ctgagatcacgccactgcactccagcctgggtgacagagcaagactccgtctcaaaaaaaaaaaaaaaaaaaaagtaacatcacctgatacccagtccacataaaatttctgctcctgcctcaaaaatgtccagaacgatgtatgaattttaaaactgttagaagggttcatggcttctgctcacgcagttctctgaactgaagtggggtccccaggctctagcccccgggggaggtgaggtgaggggcaggcctcccgggggctgacgtggccacccttgtccgcccgcagtggtgaccatcatcaaggggaaggtggaggaggtggagctcccagtggagaaggtggacatcatcatcagcgagtggatgggctactgcctcttctacgagtccatgctcaacaccgtgctctatgcccgggacaagtggctggcgcccgatggcctcatcttcccagaccgggccacgctgtatgtgacggccatcgaggaccggcagtacaaagactacaagatccactggtgggagaacgtgtatggcttcgacatgtcttgcatcaaagatgtggccattaaggagcccctagtggatgtcgtggaccccaaacagctggtcaccaacgcctgcctcataaaggaggtggacatctataccgtcaaggtggaagacctgaccttcacctccccgttctgcctgcaagtgaagcggaatgactacgtgcacgccctggtggcctacttcaacatcgagttcacacgctgccacaagaggaccggcttctccaccagccccgagtccccgtacacgcactggaagcagacggtgttctacatggaggactacctgaccgtgaagacgggcgaggagatcttcggcaccatcggcatgcggcccaacgccaagaacaaccgggacctggacttcaccatcgacctggacttcaagggccagctgtgcgagctgtcctgctccaccgactaccggatgcgctgaggcccggctctcccgccctgcacgagcccaggggctgagcgttcctaggcggtttcggggctcccccttcctctccctccctcccgcagaagggggttttaggggcctgggctggggggatggggagggcacatcgtgactgtgtttttcataacttatgtttttatatggttgcatttacgccaataaatcctcagctgggaaaaaaaaaaaaaaaaaaaaaaagaggagcagagacacagcaacaaagaagaatccaccagagaggggcccacaaagctaaacgcgcgtacccagaggtatcacgggacacaagaggggcccccataatagggaagccgaaactacacacacaaaggaccacgtgggccgaacggtttccacacggcgctcagagaaccgtggcgaaacgcgcggggaaaaaccagggaaaaccacgggggcacaagggaaaccggaacacacacgggcggatggtggcaccacacagggggcccacagcaaccc

SEQ ID NO: 431693 - DNA, 2379 bp, Homo sapiens
agagttggcaaacccctgacctatgatggacgtattctctagccaattactagacggtattctcagacgggccgcctccattgccaatgaaatcttccagcggggtcgcggtaggcgggccgtggaccctctggtataaggcggtcccgggggagtgaggagaaagggggggtcttggcggccggaggaggagtaggtgcgggtgaagatggcggcagccgaggccgcgaactgcatcatggaggtgtcctgtggccaggcggaaagcagtgagaagcccaacgctgaggacatgacatccaaagattactactttgactcctacgcacactttggcatccacgaggagatgctgaaggacgaggtgcgcaccctcacttaccgcaactccatgtttcataaccggcacctcttcaaggacaaggtggtgctggacgtcggctcgggcaccggcatcctctgcatgtttgctgccaaggccggggcccgcaaggtcatcgggatcgagtgttccagtatctctgattatgcggtgaagatcgtcaaagccaacaagttagaccacgtggtgaccatcatcaaggggaaggtggaggaggtggagctcccagtggagaaggtggacatcatcatcagcgagtggatgggctactgcctcttctacgagtccatgctcaacaccgtgctctatgcccgggacaagtggctggcgcccgatggcctcatcttcccagaccgggccacgctgtatgtgacggccatcgaggaccggcagtacaaagactacaagatccactggtgggagaacgtgtatggcttcgacatgtcttgcatcaaagatgtggccattaaggagcccctagtggatgtcgtggaccccaaacagctggtcaccaacgcctgcctcataaaggtgagggggtgggcatggccaggtgccccctgggttgaaaccaaagagaggccatcacctggccctggcatgggactttggggcccagaatgttggcctgaggtctcagagcctgatctgccagccagaggtggtgctagaggcccaggaaagacacttcgtcctttaaatatctttgtgagcgctgctgtgtgagaaccatgcttggcacttggcttctggcggaggaaacacccaaagctggcagctaaagcccacagcccatgcacggaaaggcaggaccccagggcgatgagcggatgcacatgcacgcgggccactgcagaagagcacggggccaggctgggctccgagatgtgcctgaggtcccagctactcgggaggatcacttgggcctgggagttcaaggctgcagtgagctgtgatcacatcactgcactccagctttggtgacaatgttttgttttgttttttccttttgtttttttttacttctgagaccctgtttaaaaaaaaaaaatacggcgatgagtatttgttgagctgggatgtgtgagccgggtgaagctgggtggctgaccgggggatcctgtcggggaggagaggtggacatctataccgtcaaggtggaagacctgaccttcacctccccgttctgcctgcaagtgaagcggaatgactacgtgcacgccctggtggcctacttcaacatcgagttcacacgctgccacaagaggaccggcttctccaccagccccgagtccccgtacacgcactggaagcagacggtgttctacatggaggactacctgaccgtgaagacgggcgaggagatcttcggcaccatcggcatgcggcccaacgccaagaacaaccgggacctggacttcaccatcgacctggacttcaagggccagctgtgcgagctgtcctgctccaccgactaccggatgcgctgaggcccggctctcccgccctgcacgagcccaggggctgagcgttcctaggcggtttcggggctcccccttcctctccctccctcccgcagaagggggttttaggggcctgggctggggggatggggagggcacatcgtgactgtgtttttcataacttatgtttttatatggttgcatttacgccaataaatcctcagctgggaaaaaaaaaaaaaaaaaaaaaaagaggagcagagacacagcaacaaagaagaatccaccagagaggggcccacaaagctaaacgcgcgtacccagaggtatcacgggacacaagaggggcccccataatagggaagccgaaactacacacacaaaggaccacgtgggccgaacggtttccacacggcgctcagagaaccgtggcgaaacgcgcggggaaaaaccagggaaaaccacgggggcacaagggaaaccggaacacacacgggcggatggtggcaccacacagggggcccacagcaaccc

SEQ ID NO: 431694 - DNA, 2255 bp, Homo sapiens
agagttggcaaacccctgacctatgatggacgtattctctagccaattactagacggtattctcagacgggccgcctccattgccaatgaaatcttccagcggggtcgcggtaggcgggccgtggaccctctggtataaggcggtcccgggggagtgaggagaaagggggggtcttggcggccggaggaggagtaggtgcgggtgaagatggcggcagccgaggccgcgaactgcatcatggaggtgtcctgtggccaggcggaaagcagtgagaagcccaacgctgaggacatgacatccaaagattactactttgactcctacgcacactttggcatccacgaggagatgctgaaggacgaggtgcgcaccctcacttaccgcaactccatgtttcataaccggcacctcttcaaggacaaggtggtgctggacgtcggctcgggcaccggcatcctctgcatgtttgctgccaaggccggggcccgcaaggtcatcgggatcgagtgttccagtatctctgattatgcggtgaagatcgtcaaagccaacaagttagaccacgtggtgaccatcatcaaggggaaggtggaggaggtggagctcccagtggagaaggtggacatcatcatcagcgagtggatgggctactgcctcttctacgagtccatgctcaacaccgtgctctatgcccgggacaagtggctggcgcccgatggcctcatcttcccagaccgggccacgctgtatgtgacggccatcgaggaccggcagtacaaagactacaagatccactggtgggagaacgtgtatggcttcgacatgtcttgcatcaaagatgtggccattaaggagcccctagtggatgtcgtggaccccaaacagctggtcaccaacgcctgcctcataaagccagaggtggtgctagaggcccaggaaagacacttcgtcctttaaatatctttgtgagcgctgctgtgtgagaaccatgcttggcacttggcttctggcggaggaaacacccaaagctggcagctaaagcccacagcccatgcacggaaaggcaggaccccagggcgatgagcggatgcacatgcacgcgggccactgcagaagagcacggggccaggctgggctccgagatgtgcctgaggtcccagctactcgggaggatcacttgggcctgggagttcaaggctgcagtgagctgtgatcacatcactgcactccagctttggtgacaatgttttgttttgttttttccttttgtttttttttacttctgagaccctgtttaaaaaaaaaaaatacggcgatgagtatttgttgagctgggatgtgtgagccgggtgaagctgggtggctgaccgggggatcctgtcggggaggagaggtggacatctataccgtcaaggtggaagacctgaccttcacctccccgttctgcctgcaagtgaagcggaatgactacgtgcacgccctggtggcctacttcaacatcgagttcacacgctgccacaagaggaccggcttctccaccagccccgagtccccgtacacgcactggaagcagacggtgttctacatggaggactacctgaccgtgaagacgggcgaggagatcttcggcaccatcggcatgcggcccaacgccaagaacaaccgggacctggacttcaccatcgacctggacttcaagggccagctgtgcgagctgtcctgctccaccgactaccggatgcgctgaggcccggctctcccgccctgcacgagcccaggggctgagcgttcctaggcggtttcggggctcccccttcctctccctccctcccgcagaagggggttttaggggcctgggctggggggatggggagggcacatcgtgactgtgtttttcataacttatgtttttatatggttgcatttacgccaataaatcctcagctgggaaaaaaaaaaaaaaaaaaaaaaagaggagcagagacacagcaacaaagaagaatccaccagagaggggcccacaaagctaaacgcgcgtacccagaggtatcacgggacacaagaggggcccccataatagggaagccgaaactacacacacaaaggaccacgtgggccgaacggtttccacacggcgctcagagaaccgtggcgaaacgcgcggggaaaaaccagggaaaaccacgggggcacaagggaaaccggaacacacacgggcggatggtggcaccacacagggggcccacagcaaccc

SEQ ID NO: 431695 - DNA, 1030 bp, Homo sapiens
gactctagaggtcccccaacgatggtcctcagccgaggccgcgaactgcatcatggaggtgtcctgtggccaggcggaaagcagtgagaagcccaacgctgaggacatgacatccaaagattactactttgactcctacgcacactttggcatccacgaggagatgctgaaggacgaggtgcgcaccctcacttaccgcaactccatgtttcataaccggcacctcttcaaggacaaggtggtgctggacgtcggctcgggcaccggcatcctctgcatgtttgctgccaaggccggggcccgcaaggtcatcgggatcgagtgttccagtatctctgattatgcggtgaagatcgtcaaagccaacaagttagaccacgtggtgaccatcatcaaggggaaggtggaggaggtggagctcccagtggagaaggtggacatcatcatcagcgagtggatgggctactgcctcttctacgagtccatgctcaacaccgtgctctatgcccgggacaagtggctggcgcccgatggcctcatcttcccagaccgggccacgctgtatgtgacggccatcgaggaccggcagtacaaagactacaagatccactggtgggagaacgtgtatggcttcgacatgtcttgcatcaaagatgtggccattaaggagcccctagtggatgtcgtggaccccaaacagctggtcaccaacgcctgcctcataaaggaggtggacatctataccgtcaaggtggaagacctgaccttcacctccccgttctgcctgcaagtgaagcggaatgactacgtgcacgccctggtggcctacttcaacatcgagttcacacgctgccacaagaggaccggcttctccaccagccccgagtccccgtacacgcactggaagcagacggtgttctacatggttaggggcctgggctggggggatggggagggcacatcgtgactgtgtttttcataacttatgtttttatatggttgcatttacgccaataaatcctcagctggg

SEQ ID NO: 431696 - DNA, 1105 bp, Homo sapiens
aagaaatcacaggaatgtaaaagaagatatcagaactgctatttatactgatatttaaaaatagattattttaaatttctatttttcatatgttctaatatatataaaagactacaagatccactggtgggagaacgtgtatggcttcgacatgtcttgcatcaaagatgtggccattaaggagcccctagtggatgtcgtggaccccaaacagctggtcaccaacgcctgcctcataaaggaggtggacatctataccgtcaaggtggaagacctgaccttcacctccccgttctgcctgcaagtgaagcggaatgactacgtgcacgccctggtggcctacttcaacatcgagttcacacgctgccacaagaggaccggcttctccaccagccccgagtccccgtacacgcactggaagcagacggtgttctacatggaggactacctgaccgtgaagacgggcgaggagatcttcggcaccatcggcatgcggcccaacgccaagaacaaccgggacctggacttcaccatcgacctggacttcaagggccagctgtgcgagctgtcctgctccaccgactaccggatgcgctgaggcccggctctcccgccctgcacgagcccaggggctgagcgttcctaggcggtttcggggctcccccttcctctccctccctcccgcagaagggggttttaggggcctgggctggggggatggggagggcacatcgtgactgtgtttttcataacttatgtttttatatggttgcatttacgccaataaatcctcagctgggaaaaaaaaaaaaaaaaaaaaaaagaggagcagagacacagcaacaaagaagaatccaccagagaggggcccacaaagctaaacgcgcgtacccagaggtatcacgggacacaagaggggcccccataatagggaagccgaaactacacacacaaaggaccacgtgggccgaacggtttccacacggcgctcagagaaccgtggcgaaacgcgcggggaaaaaccagggaaaaccacgggggcacaagggaaaccggaacacacacgggcggatggtggcaccacacagggggcccacagcaaccc

SEQ ID NO: 431697 - DNA, 1501 bp, Homo sapiens
gacccacgcgtcgcggacgcgtgggtcgaccacgcgtcgcgaccacgcgtcggacccacgcgtcgggagggaggaggagtaggtgcgggtgaagatggcggcagccgaggccgcgaactgcatcatggaggtgtcctgtggccaggcggaaagcagtgagaagcccaacgctgaggacatgacatccaaagattactactttgactcctacgcacactttggcatccacgaggagatgctgaaggacgaggtgcgcaccctcacttaccgcaactccatgtttcataaccggcacctcttcaaggacaaggtggtgctggacgtcggctcgggcaccggcatcctctgcatgtttgctgccaaggccggggcccgcaaggtcatcgggatcgagtgttccagtatctctgattatgcggtgaagatcgtcaaagccaacaagttagaccacgtggtgaccatcatcaaggggaaggtggaggaggtggagctcccagtggagaaggtggacatcatcatcagcgagtggatgggctactgcctcttctacgagtccatgctcaacaccgtgctctatgcccgggacaagtggctggcgcccgatggcctcatcttcccagaccgggccacgctgtatgaggtggacatctataccgtcaaggtggaagacctgaccttcacctccccgttctgcctgcaagtgaagcggaatgactacgtgcacgccctggtggcctacttcaacatcgagttcacacgctgccacaagaggaccggcttctccaccagccccgagtccccgtacacgcactggaagcagacggtgttctacatggaggactacctgaccgtgaagacgggcgaggagatcttcggcaccatcggcatgcggcccaacgccaagaacaaccgggacctggacttcaccatcgacctggacttcaagggccagctgtgcgagctgtcctgctccaccgactaccggatgcgctgaggcccggctctcccgccctgcacgagcccaggggctgagcgttcctaggcggtttcggggctcccccttcctctccctccctcccgcagaagggggttttaggggcctgggctggggggatggggagggcacatcgtgactgtgtttttcataacttatgtttttatatggttgcatttacgccaataaatcctcagctgggaaaaaaaaaaaaaaaaaaaaaaagaggagcagagacacagcaacaaagaagaatccaccagagaggggcccacaaagctaaacgcgcgtacccagaggtatcacgggacacaagaggggcccccataatagggaagccgaaactacacacacaaaggaccacgtgggccgaacggtttccacacggcgctcagagaaccgtggcgaaacgcgcggggaaaaaccagggaaaaccacgggggcacaagggaaaccggaacacacacgggcggatggtggcaccacacagggggcccacagcaaccc

SEQ ID NO: 431698 - DNA, 1043 bp, Homo sapiens
gacccacgcgtcgcggacgcgtgggtcgaccacgcgtcgcgaccacgcgtcggacccacgcgtcgggagggaggaggagtaggtgcgggtgaagatggcggcagccgaggccgcgaactgcatcatggaggtgtcctgtggccaggcggaaagcagtgagaagcccaacgctgaggacatgacatccaaagattactactttgactcctacgcacactttggcatccacgaggagatgctgaaggacgaggtgcgcaccctcacttaccgcaactccatgtttcataaccggcacctcttcaaggacaaggtggtgctggacgtcggctcgggcaccggcatcctctgcatgtttgctgccaaggccggggcccgcaaggtcatcgggatcgagtgttccagtatctctgattatgcggtgaagatcgtcaaagccaacaagttagaccacgtggtgaccatcatcaaggggaaggtggaggaggtggagctcccagtggagaaggtggacatcatcatcagcgagtggatgggctactgcctcttctacgagtccatgctcaacaccgtgctctatgcccgggacaagtggctggcgcccgatggcctcatcttcccagaccgggccacgctgtatgtgacggccatcgaggaccggcagtacaaagactacaagatccactaggactacctgaccgtgaagacgggcgaggagatcttcggcaccatcggcatgcggcccaacgccaagaacaaccgggacctggacttcaccatcgacctggacttcaagggccagctgtgcgagctgtcctgctccaccgactaccggatgcgctgaggcccggctctcccgccctgcacgagcccaggggctgagcgttcctaggcggtttcggggctcccccttcctctccctccctcccgcagaagggggttttaggggcctgggctggggggatggggagggcacatcgtgactgtgtttttcataacttatgtttttatatggttgcatttacgccaataaatcctcagctggg

SEQ ID NO: 431699 - DNA, 1365 bp, Homo sapiens
  misc_feature (6)..(6): n is a, c, g, or t
  misc_feature (24)..(24): n is a, c, g, or t
  misc_feature (60)..(60): n is a, c, g, or t
ccttcnaggtacccggtcccgganttcccggggtggacccaaggcgtccggtaacaagancccacttggtgggagaacgtgtatggcttcgacatgtcttgcatcaaagatgtggccattaaggagcccctagtggatgtcgtggaccccaaacagctggtcaccaacgcctgcctcataaaggaggtggacatctataccgtcaaggtggaagacctgaccttcacctccccgttctgcctgcaagtgaagcggaatgactacgtgcacgccctggtggcctacttcaacatcgagttcacacgctgccacaagaggaccggcttctccaccagccccgagtccccgtacacgcactggaagcagacggtgttctacatggaggactacctgaccgtgaagacgggcgaggagatcttcggcaccatcggcatgcggcccaacgccaagaacaaccgggacctggacttcaccatcgacctggacttcaagggccagctgtgcgagctgtcctgctccaccgactaccggatgcgctgaggcccggctctcccgccctgcacgagcccaggggctgagcgttcctaggcggtttcggggctcccccttcctctccctccctcccgcagaagggggttttaggggcctgggctggggggatggggagggcacatcgtgactgtgtttttcataacttatgtttttatatggttgcatttacgccaataaatcctcagctgggaaaaaaaaaaaaaaaaaaaaaaaaaaaaaaaaaaaaaaaaaaaaaaaggggggggggggaaaaaagagatagccccgcaggaggggggcgcaccaagaatcaccgccgcaacacaccgcgagggtgtttggtgagaaacaagggggcgcaccccacaagagaggagaagcggggctattaaacaacagacgagcgagaaggagcgagcgccgggtaacaaaaaacggcgcgcagccgaagcggggaacaaccccccggccaccaagtgcggagacaacattgtgtggagcaagcagggaacccctcaacacaccacgggggggggggggtacgcacaaaaaatgtggggggcccaaccaccaccaccccatcacaaagaggaagatatttagcagaggacaccccattaacggaaggaaagaaaataaatcataacacgactttttttacataagagggtatattaaaaggggttgggtgctcaaacacacactagtaggtgcagactaaaatatttatcgtgtgaggggcgcagctgagagaaaaaaaaaaggatgtgggagtcactgccgagggagacgagtatgtcaagcagcagtgggaagacgacatttttttttcgc

SEQ ID NO: 431700 - DNA, 349 bp, Homo sapiens
  misc_feature (12)..(12): n is a, c, g, or t
  misc_feature (20)..(20): n is a, c, g, or t
  misc_feature (25)..(25): n is a, c, g, or t
cgagctcggtanccggggcngcganaagacgacagaagggtgcggcccaacgccaagaacaaccgggacctggacttcaccatcgacctggacttcaagggccagctgtgcgagctgtcctgctccaccgactaccggatgcgctgaggcccggctctcccgccctgcacgagcccaggggctgagcgttcctaggcggtttcggggctcccccttcctctccctccctcccgcagaagggggttttaggggcctgggctggggggatggggagggcacatcgtgactgtgtttttcataacttatgtttttatatggttgcatttacgccaataaatcctcagctggg

SEQ ID NO: 431701 - DNA, 501 bp, Homo sapiens
agagttggcaaacccctgacctatgatggacgtattctctagccaattactagacggtattctcagacgggccgcctccattgccaatgaaatcttccagcggggtcgcggtaggcgggccgtggaccctctggtataaggcggtcccgggggagtgaggagaaagggggggtcttggcggccggaggaggagtaggtgcgggtgaagatggcggcagccgaggccgcgaactgcatcatggaggtgtcctgtggccaggcggaaagcagtgagaagcccaacgctgaggacatgacatccaaagattactactttgactcctacgcacactttggcatccacgaggagatgctgaaggacgaggtgcgcaccctcacttaccgcaactccatgtttcataaccggcacctcttcaaggacaaggctcattcgtccagccttccatcattccctaccccccggaaagacagagggggtatactcaagaacggctatgacca

SEQ ID NO: 431702 - DNA, 244 bp, Homo sapiens
ctgacacggtccctgtctccaaagctcaatgacagggaggtgactcgcggatagcagtcccatcagctgtcatgggggtgggcattccgacagagggaacgcaagggtggggttggggggggcagcaggccgaggccggctgacccgcccgcgcccccaggccccgagtccccgtacacgcactggaagcagacggtgttctacatggaggactacctgaccgtgaagacgggcgaggagatct

SEQ ID NO: 431703 - DNA, 596 bp, Homo sapiens
ctgggttggaaaagtgggtcccggccgatgggtgcgagggtgggtggcactcagggtagtcatggaatgtggaccctgggacacccacgagcctgtgacagcagcagttgtcaactgggcagttttactgccccctccgctccccgcccccccccaggacgtttgccaccgtctgtggaaacatttgtggttgtcactccggagaaggggtggtcctggcatctggtaggtaggggccagggggctggtaaatgtcctgcagccacaggaccaccccctacaaagactcatgcagcccccgggaccacggcactagctgggaaacggatactggagagggaggaggagtcctcgggcgttggtgactttgtctcatcttcatgtgctggagggtatggggggaggagaggaagtggagacagcaggctggaccattgtgtttcactggaacgtttgcctgaggaggaagtgggcttgggagaggttttcttttttatgaaagaagcaatcactgcattgctgatgggaatcatcctgatggagaaatccaagggcaagggacagcagctgggctctactcctgagtgagtctagtg

SEQ ID NO: 431704 - DNA, 1819 bp, Homo sapiens
atcatggctgcagatgatctgtgctttcttacattatgactgcacatggttacttgtgtaatacccgaggatgttagatagtattcaagcatggagaacaagttatgtaacctagacgatgagtgatgtaagtatcagaagttgttgaatttgacgaggatcaagttcgaaatgcaaggctattgggtagcattctctatacgttctatcttgaattcatcccatcgtgattaaccttcttaaccttgatgttattaagaaaaagaataaaccaaaggaaccacccaaagtacccaaatcagcaccatttttcattccaacaattcctggccttgtacccagatatgctgcacctgaacaaaataatgatccccagcagtctaaagtggtaaatcttggagttttggctcaaaaatcagatttctgcttgaaacttgaagaaggactggtaaataataagtatgacactgctctcaaccttctgaaagaatcaggcccatcaggaattgaaacagagctgcgaagcttgtctcctgattgtggtgggtccatagaagttatgcagagcttcttgaaaatgattgggatgatgctggacagaaagcgtgattttgagttagcccaggcataccttgcattgtttctaaagttacaccttaaaatgcttccttcagagccagtactcctagaagaaataacaaatttgtcatcccaggtggaagaaaactggacccatttgcaatcactcttcaatcaaagcatgtgtattttaaattatctcaaaagtgctttgttgtaaaaataaatttgtgactaaacaaagactttcatattaaatgggttcaattgaactcatttcttattttccaagtgtcaatgtgaaaagaaaataaatgctagcactactgactagtcagtatatctccactttaaatgctaaatactttcttgaaataaaatcgcacctcccggccaggcatgatggataatgcctgtaattccagcactttcagaggccaaagcgggaggattgcttgaagccaggaatttgagcccagcctgggcaacatagcaagcaagatcccatctctacaaaaagttaaaaaaataaattacacctgccttttgttttgaagacttaaagaatctgctcaaatgatttattttctgagtctcttcacattaacttttatatgatttttaaaaaattattacctgcttatattttttgagtatctgtttcatataaagagatgctgcatgttcactgtgaagtattgctgaattaaattgaaaatgtcagataaaactgatacatgatgtagttataaaaatgctgttatgaagaaaaaaggaatgcttttttcctcggtggcctttgataaaaatatgaatgattgactctcagagttggaggataaactaatcatcttctagcacagccctgttgtgttgcaggagaggaatcaggctaaagtctgctggtatttcagtgacagattaaaactttctaacagtggcctagtgctttctccattgtaatgtactgaaaggaagttgttcatggatcagaaatgtgggaggcccttccttgcccaaggcaagtcgctgtagatggttaaactgataccaaggataggtaagggaaattccaaattccattggaagatggccttttactgacactgcagacatgtagataacaatagtttaatgtcctctgaaaaggtaaaaattccataaatccttgcaaacaatttttagcaatattgtttattgctaccacagccaagaatgggtatttcaaagccagggtttt

SEQ ID NO: 431705 - DNA, 1765 bp, Homo sapiens
atcatggctgcagatgatctgtgctttcttacattatgactgcacatggttacttgtgtaatacccgaggatgttagatagtattcaagcatggagaacaagttatgtaacctagacgatgagtgatgtaagtatcagaagttgttgaatttgacgaggatcaagttcgaaatgcaaggctattgggtagcattctctatacgttctatcttgaattcatcccatcgtgattaaccttcttaaccttgatgttattaagaaaaagaataaaccaaaggaaccacccaaagtacccaaatcagcaccatttttcattccaacaattcctggccttgtacccagatatgctgcacctgaacaaaataatgatccccagcagtctaaagtggtaaatcttggagttttggctcaaaaatcagatttctgcttgaaacttgaagaaggactggtaaataataagtatgacactgctctcaaccttctgaaagaatcaggcccatcaggaattgaaacagagctgcgaagcttgtctcctgattgtggtgggtccatagaagttatgcagagcttcttgaaaatgattgggatgatgctggacagaaagcgtgattttgagttagcccaggcataccttgcattgtttctaaagttacaccttaaaatgcttccttcagagccagtactcctagaagaaataacaaatttgtcatcccaggtggaagaaaactggacccatttgcaatcactcttcaatcaaagcatgtgtattttaaattatctcaaaagtgctttgttgtaaaaataaatttgtgactaaacaaagactttcatattaaatgggttcaattgaactcatttcttattttccaagtgtcaatgtgaaaagaaaataaatgctagcactactgactagtcagtatatctccactttaaatgctaaatactttcttgaaattcagaggccaaagcgggaggattgcttgaagccaggaatttgagcccagcctgggcaacatagcaagcaagatcccatctctacaaaaagttaaaaaaataaattacacctgccttttgttttgaagacttaaagaatctgctcaaatgatttattttctgagtctcttcacattaacttttatatgatttttaaaaaattattacctgcttatattttttgagtatctgtttcatataaagagatgctgcatgttcactgtgaagtattgctgaattaaattgaaaatgtcagataaaactgatacatgatgtagttataaaaatgctgttatgaagaaaaaaggaatgcttttttcctcggtggcctttgataaaaatatgaatgattgactctcagagttggaggataaactaatcatcttctagcacagccctgttgtgttgcaggagaggaatcaggctaaagtctgctggtatttcagtgacagattaaaactttctaacagtggcctagtgctttctccattgtaatgtactgaaaggaagttgttcatggatcagaaatgtgggaggcccttccttgcccaaggcaagtcgctgtagatggttaaactgataccaaggataggtaagggaaattccaaattccattggaagatggccttttactgacactgcagacatgtagataacaatagtttaatgtcctctgaaaaggtaaaaattccataaatccttgcaaacaatttttagcaatattgtttattgctaccacagccaagaatgggtatttcaaagccagggtttt

SEQ ID NO: 431706 - DNA, 1804 bp, Homo sapiens
gtccaatatttccctgtattcagttgtttcattacggccacttcctgcagattatgtcccttcaatagtcatgcttcctggtacttgtcaaacccaagatgtagaagtatcagaagaaacagtagaaccaagtgatgaattgatagaatatgattcgccagaacagttgaatgagcaattggtgactctttcacttcttcctgaatcacgatggaaaaaccttcttaaccttgatgttattaagaaaaagaataaaccaaaggaaccacccaaagtacccaaatcagcaccatttttcattccaacaattcctggccttgtacccagatatgctgcacctgaacaaaataatgatccccagcagtctaaagtggtaaatcttggagttttggctcaaaaatcagatttctgcttgaaacttgaagaaggactggtaaataataagtatgacactgctctcaaccttctgaaagaatcaggcccatcaggaattgaaacagagctgcgaagcttgtctcctgattgtggtgggtccatagaagttatgcagagcttcttgaaaatgattgggatgatgctggacagaaagcgtgattttgagttagcccaggcataccttgcattgtttctaaagttacaccttaaaatgcttccttcagagccagtactcctagaagaaataacaaatttgtcatcccaggtggaagaaaactggacccatttgcaatcactcttcaatcaaagcatgtgtattttaaattatctcaaaagtgctttgttgtaaaaataaatttgtgactaaacaaagactttcatattaaatgggttcaattgaactcatttcttattttccaagtgtcaatgtgaaaagaaaataaatgctagcactactgactagtcagtatatctccactttaaatgctaaatactttcttgaaataaaatcgcacctcccggccaggcatgatggataatgcctgtaattccagcactttcagaggccaaagcgggaggattgcttgaagccaggaatttgagcccagcctgggcaacatagcaagcaagatcccatctctacaaaaagttaaaaaaataaattacacctgccttttgttttgaagacttaaagaatctgctcaaatgatttattttctgagtctcttcacattaacttttatatgatttttaaaaaattattacctgcttatattttttgagtatctgtttcatataaagagatgctgcatgttcactgtgaagtattgctgaattaaattgaaaatgtcagataaaactgatacatgatgtagttataaaaatgctgttatgaagaaaaaaggaatgcttttttcctcggtggcctttgataaaaatatgaatgattgactctcagagttggaggataaactaatcatcttctagcacagccctgttgtgttgcaggagaggaatcaggctaaagtctgctggtatttcagtgacagattaaaactttctaacagtggcctagtgctttctccattgtaatgtactgaaaggaagttgttcatggatcagaaatgtgggaggcccttccttgcccaaggcaagtcgctgtagatggttaaactgataccaaggataggtaagggaaattccaaattccattggaagatggccttttactgacactgcagacatgtagataacaatagtttaatgtcctctgaaaaggtaaaaattccataaatccttgcaaacaatttttagcaatattgtttattgctaccacagccaagaatgggtatttcaaagccagggtttt

SEQ ID NO: 431707 - DNA, 2801 bp, Homo sapiens
ggcggcggctggggagaagcgctctcgtcgcctgcccgaggccggagcggcggggcccgcgcctcctccccccagcgccgcggaggggggaggaggaagatggagacccacatctcatgcctgttcccggagctgctggccatgatcttcggctacctggacgtccgggacaaggggcgcgcggcgcaggtgtgcaccgcctggcgggacgccgcctaccacaagtcggtgtggcggggggtggaggccaagctgcacctgcgccgggccaacccgtcgctgttccccagcctgcaggcccggggcatccgccgggtgcagatcctgagcctccgccgcagcctcagctacgtgatccagggcatggccaacatcgagagcctcaacctcagcggctgctacaacctcaccgacaacgggctgggccacgcgtttgtgcaggagatcggctccctgcgcgctctcaacctgagcctctgcaagcagatcactgacagcagcctgggccgcatagcccagtacctcaagggcctggaggtgctggagctgggaggttgcagcaacatcaccaacactggccttctgctcatcgcctggggtctgcagcgcctcaagagccttaacctccgcagctgccgccacctttcggatgtgggcatcgggcacctggccggcatgacgcgcagcgcggcggagggctgcctgggcctggagcagctcacgctacaggactgccagaagctcacagatctttctctaaagcacatctcccgagggctgacgggcctgaggctcctcaacctcagcttctgtgggggaatctcggacgctggcctcctgcacctgtcgcacatgggcagcctgcgcagcctcaacctgcgctcctgtgacaacatcagtgacacgggcatcatgcatctggccatgggcagcctgcgcctctcggggctggatgtttcgttctgtgacaaggtgggagaccagagtctggcttacatagcccaggggctggatggcctcaagtctctctccctctgctcctgccacatcagtgatgatggcatcaaccgcatggtgcggcagatgcacgggctgcgcacgctcaacattggacagtgtgtgcgcatcacggacaagggcctggagctgatcgctgagcacctgagccaactcaccggcatagacctgtacggctgcacccgaatcaccaagcgcggcctggagcgcatcacgcagctgccgtgcctcaaggtactcaacctgggactctggcagatgacggacagtgagaaggtcaggtgagggcggcagcaccagctccccttgtcccgccctgttcatcctcccattaccaccgcccccacacactcacacgcacacttacgcacagatcattgcagcggatgagatggggctatgacagaagcctcaggctcgtttcctcctccctcctccagccccctcccggcttccagcccattctctttgcagctggggttcctaccctaccctactcccagctccttttccccgcggatggagagatggactctgctgcttacccacccactcccctgcagggggtggaggactgattcagctactgtatccccactgctgtgactggaaatgggggtggggagtgactggtcttttcaaccctggggagttgaggaaaatgtctgctttcacttcagctttcatttgaatactgtgatctggtttttattttgaaatgtataaaaagcaaacccagctacaaaggccttttcacccttccactttgtaactaatcccagtctcttctcatcactcctcctcttacagtactctgctattcatgctcatttcatgttcttaatcttctttcctgtttaaaaattttttttttggaaaaaatttgaaatcatggtccttttttctgctgaatatattctatatattatatatatataaattatatatatatatatatacatatatatgtctggctacctcgttttagtttactttttttctgaagccctggaattctacaagagagatattttgagactgaaacatgtttgtgcctagactggaaagatgcccttgggtttgtccgtctttttgtgttggcttcttcccagcctccatccgtccagtgtgccccacttccacattctggctataatttcctttttctccttgttcattgggatttgaggacctatttctaaatcttaatttatagcacaaatatgtgggagcaatgagagttgaaccgttgtttttgttggagatgcagattgtgtcttgaaaatgatgattatatatgcaaattctgccctaccctcaccctcttccaagtttccccccaaaaaggtcacacagtgcggcttcctgtgggaaacaggagcagagctggcctgcagagcccctggggctgtgatgaagctcatatcttatctctgttctattaacaaaatgggagtttgtgggttttaaaaaattccgtttctaaatggaggaatagatgactttctttcttttggtgggggttgggacttgtggctttaaagaaatcacttctgagtaggatgtatattttcgttggatttttgttgttatttctttagaaccctccacagcaacatgcaagaccatggagttaaagaaacccagagacctttatcaattaattgtactgtttgtgaatttgtataaataataacaaagatcctcttaaaacgtttatattcttacagtaaaaggttaaactgatatttatataataaaagaggaaatatgaagtatgtttt

SEQ ID NO: 431708 - DNA, 2729 bp, Homo sapiens
ggcggcggctggggagaagcgctctcgtcgcctgcccgaggccggagcggcggggcccgcgcctcctccccccagcgccgcggaggggggaggaggaagatggagacccacatctcatgcctgttcccggagctgctggccatgatcttcggctacctggacgtccgggacaaggggcgcgcggcgcaggtgtgcaccgcctggcgggacgccgcctaccacaagtcggtgtggcggggggtggaggccaagctgcacctgcgccgggccaacccgtcgctgttccccagcctgcaggcccggggcatccgccgggtgcagatcctgagcctccgccgcagcctcagctacgtgatccagggcatggccaacatcgagagcctcaacctcagcggctgctacaacctcaccgacaacgggctgggccacgcgtttgtgcaggagatcggctccctgcgcgctctcaacctgagcctctgcaagcagatcactgacagcagcctgggccgcatagcccagtacctcaagggcctggaggtgctggagctgggaggttgcagcaacatcaccaacactggccttctgctcatcgcctggggtctgcagcgcctcaagagccttaacctccgcagctgccgccacctttcggatgtgggcatcgggcacctggccggcatgacgcgcagcgcggcggagggctgcctgggcctggagcagctcacgctacaggactgccagaagctcacagatctttctctaaagcacatctcccgagggctgacgggcctgaggctcctcaacctcagcttctgtgggggaatctcggacgctggcctcctgcacctgtcgcacatgggcagcctgcgcctctcggggctggatgtttcgttctgtgacaaggtgggagaccagagtctggcttacatagcccaggggctggatggcctcaagtctctctccctctgctcctgccacatcagtgatgatggcatcaaccgcatggtgcggcagatgcacgggctgcgcacgctcaacattggacagtgtgtgcgcatcacggacaagggcctggagctgatcgctgagcacctgagccaactcaccggcatagacctgtacggctgcacccgaatcaccaagcgcggcctggagcgcatcacgcagctgccgtgcctcaaggtactcaacctgggactctggcagatgacggacagtgagaaggtcaggtgagggcggcagcaccagctccccttgtcccgccctgttcatcctcccattaccaccgcccccacacactcacacgcacacttacgcacagatcattgcagcggatgagatggggctatgacagaagcctcaggctcgtttcctcctccctcctccagccccctcccggcttccagcccattctctttgcagctggggttcctaccctaccctactcccagctccttttccccgcggatggagagatggactctgctgcttacccacccactcccctgcagggggtggaggactgattcagctactgtatccccactgctgtgactggaaatgggggtggggagtgactggtcttttcaaccctggggagttgaggaaaatgtctgctttcacttcagctttcatttgaatactgtgatctggtttttattttgaaatgtataaaaagcaaacccagctacaaaggccttttcacccttccactttgtaactaatcccagtctcttctcatcactcctcctcttacagtactctgctattcatgctcatttcatgttcttaatcttctttcctgtttaaaaattttttttttggaaaaaatttgaaatcatggtccttttttctgctgaatatattctatatattatatatatataaattatatatatatatatatacatatatatgtctggctacctcgttttagtttactttttttctgaagccctggaattctacaagagagatattttgagactgaaacatgtttgtgcctagactggaaagatgcccttgggtttgtccgtctttttgtgttggcttcttcccagcctccatccgtccagtgtgccccacttccacattctggctataatttcctttttctccttgttcattgggatttgaggacctatttctaaatcttaatttatagcacaaatatgtgggagcaatgagagttgaaccgttgtttttgttggagatgcagattgtgtcttgaaaatgatgattatatatgcaaattctgccctaccctcaccctcttccaagtttccccccaaaaaggtcacacagtgcggcttcctgtgggaaacaggagcagagctggcctgcagagcccctggggctgtgatgaagctcatatcttatctctgttctattaacaaaatgggagtttgtgggttttaaaaaattccgtttctaaatggaggaatagatgactttctttcttttggtgggggttgggacttgtggctttaaagaaatcacttctgagtaggatgtatattttcgttggatttttgttgttatttctttagaaccctccacagcaacatgcaagaccatggagttaaagaaacccagagacctttatcaattaattgtactgtttgtgaatttgtataaataataacaaagatcctcttaaaacgtttatattcttacagtaaaaggttaaactgatatttatataataaaagaggaaatatgaagtatgtttt

SEQ ID NO: 431709 - DNA, 3114 bp, Homo sapiens
ggcggcggctggggagaagcgctctcgtcgcctgcccgaggccggagcggcggggcccgcgcctcctccccccagcgccgcggaggggggaggaggaagatggagacccacatctcatgcctgttcccggagctgctggccatgatcttcggctacctggacgtccgggacaaggggcgcgcggcgcaggtgtgcaccgcctggcgggacgccgcctaccacaagtcggtgtggcggggggtggaggccaagctgcacctgcgccgggccaacccgtcgctgttccccagcctgcaggcccggggcatccgccgggtgcagatcctgagcctccgccgcagcctcagctacgtgatccagggcatggccaacatcgagagcctcaacctcagcggctgctacaacctcaccgacaacgggctgggccacgcgtttgtgcaggagatcggctccctgcgcgctctcaacctgagcctctgcaagcagatcactgacagcagcctgggccgcatagcccagtacctcaagggcctggaggtgctggagctgggaggttgcagcaacatcaccaacactggccttctgctcatcgcctggggtctgcagcgcctcaagagccttaacctccgcagctgccgccacctttcggatgtgggcatcgggcacctggccggcatgacgcgcagcgcggcggagggctgcctgggcctggagcagctcacgctacaggactgccagaagctcacagatctttctctaaagcacatctcccgagggctgacgggcctgaggctcctcaacctcagcttctgtgggggaatctcggacgctggcctcctgcacctgtcgcacatgggcagcctgcgcagcctcaacctgcgctcctgtgacaacatcagtgacacgggcatcatgcatctggccatgggcagcctgcgcctctcggggctggatgtttcgttctgtgacaaggtgggagaccagagtctggcttacatagcccaggggctggatggcctcaagtctctctccctctgctcctgccacatcagtgatgatggcatcaaccgcatggtgcggcagatgcacgggctgcgcacgctcaacattggacagtgtgtgcgcatcacggacaagggcctggagctgatcgctgagcacctgagccaactcaccggcatagacctgtacggctgcacccgaatcaccaagcgcggcctggagcgcatcacgcagctgccgtgcctcaaggtactcaacctgggactctggcagatgacggacagtgagaaggtcaggtgagggcggcagcaccagctccccttgtcccgccctgttcatcctcccattaccaccgcccccacacactcacacgcacacttacgcacagatcattgcagcggatgagatggggctatgacagaagcctcaggctcgtttcctcctccctcctccagccccctcccggcttccagcccattctctttgcagctggggttcctaccctaccctactcccagctccttttccccgcggatggagagatggactctgctgcttacccacccactcccctgcagggggtggaggactgattcagctactgtatccccactgctgtgactggaaatgggggtggggagtgactggtcttttcaaccctggggagttgaggaaaatgtctgctttcacttcagctttcatttgaatactgtgatctggtttttattttgaaatgtataaaaagcaaacccagctacaaaggccttttcacccttccactttgtaactaatcccagtctcttctcatcactcctcctcttacagtactctgctattcatgctcatttcatgttcttaatcttctttcctgtttaaaaattttttttttggaaaaaatttgaaatcatggtccttttttctgctgaatatattctatatattatatatatataaattatatatatatatatatacatatatatgtctggctacctcgttttagtttactttttttctgaagccctggaattctacaagagagatattttgagactgaaacatgtttgtgcctagactggaaagatgcccttgggtttgtccgtctttttgtgttggcttcttcccagcctccatccgtccagtgtgccccacttccacattctggctataatttcctttttctccttgttcattgggatttgaggacctatttctaaatcttaatttatagcacaaatatgtgggagcaatgagagttgaaccgttgtttttgttggagatgcagattgtgtcttgaaaatgatgattatatatgcaaattctgccctaccctcaccctcttccaagtttccccccaaaaaggtcacacagtgcggcttcctgtgggaaacaggagcagagctggcctgcagagcccctggggctgtgatgaagctcatatcttatctctgttctattaacaaaatgggagtttgtgggttttaaaaaattccgtttctaaatggaggaatagatgactttctttcttttggtgggggttgggacttgtggctttaaagaaatcacttctgagtaggatgtatattttcgttggatttttgttgttatttctttagaaccctccacagcaacatgcaagaccatggagttaaagaaacccagagacctttatcaattaattgtactgtttgtgaatttgtataaataataacaaagatcctcttaaaacgtttatattcttacagtaaaaggttaaactgatatttatataataaaagaggaaatatgaagtatgttttgaaaaaaaaaaaaaaaacaacagccttgtatctgcgaattatttttaaggcattgtgtgcttgggtacatgccaaggtaggaggtgttgtttgtatactctaagaggacgcaaggtggagtttggtgcatcctatgtgggggtgagtcaactcatgggtagaattttattctgtataaggtttactactgacatgttttgtttctagaaatgtgattagactggagatttatataatgtttggctttaaactttcaacaacgtggaaatttaaagaaattgaacaaaatgaaactttttaaaaaaccagattt

SEQ ID NO: 431710 - DNA, 1470 bp, Homo sapiens
ggcggcggctggggagaagcgctctcgtcgcctgcccgaggccggagcggcggggcccgcgcctcctccccccagcgccgcggaggggggaggaggaagatggagacccacatctcatgcctgttcccggagctgctggccatgatcttcggctacctggacgtccgggacaaggggcgcgcggcgcaggtgtgcaccgcctggcgggacgccgcctaccacaagtcggtgtggcggggggtggaggccaagctgcacctgcgccgggccaacccgtcgctgttccccagcctgcaggcccggggcatccgccgggtgcagatcctgagcctccgccgcagcctcagctacgtgatccagggcatggccaacatcgagagcctcaacctcagcggctgctacaacctcaccgacaacgggctgggccacgcgtttgtgcaggagatcggctccctgcgcgctctcaacctgagcctctgcaagcagatcactgacagcagcctgggccgcatagcccagtacctcaagggcctggaggtgctggagctgggaggttgcagcaacatcaccaacactggccttctgctcatcgcctggggtctgcagcgcctcaagagccttaacctccgcagctgccgccacctttcggatgtgggcatcgggcacctggccggcatgacgcgcagcgcggcggagggctgcctgggcctggagcagctcacgctacaggactgccagaagctcacagatctttctctaaagcacatctcccgagggctgacgggcctgaggctcctcaacctcagcttctgtgggggaatctcggacgctggcctcctgcacctgtcgcacatgggcagcctgcgcagcctcaacctgcgctcctgtgacaacatcagtgacacgggcatcatgcatctggccatgggcagcctgcgcctctcggggctggatgtttcgttctgtgacaaggtgggagaccagagtctggcttacatagcccaggggctggatggcctcaagtctctctccctctgctcctgccacatcagtgatgatggcatcaaccgcatggtgcggcagatgcacgggctgcgcacgctcaacattggacagtgtgtgcgcatcacggacaagggcctggagctgatcgctgagcacctgagccaactcaccggcatagacctgtacggctgcacccgaatcaccaagcgcggcctggagcgcatcacgcagctgccgtgcctcaaggtactcaacctgggactctggcagatgacggacagtgagaagggattgctctgattttgcctgctggagttgcctttaccaacccagaatatttggtcgtatgtaaagccaagccctccagttgaggtgcaaaagaaagtaagcttgagatcttaactgagcagcaccagagtggggtatgttaaacccccactcccaataaaacaatcgaagtggaat

SEQ ID NO: 431711 - DNA, 273 bp, Homo sapiens
agctcggtacccagttcgacgtgggccaaagggggtttcttgattgaagacgcccacgagagtcgctatgagacaaatgtggattattcctttttcacggagcctgtgtcttgtgaggttcacaacaaagtgggaagcaccaatgtcagcactttagtaaatgtccactgtgagtagctgggagggcagggacggggacagagagcaggggcccccaaagggccttggacagagtcggggactgctccatgaatggggaggtagcagggcagg

SEQ ID NO: 431712 - DNA, 7832 bp, Homo sapiens
  misc_feature (2730)..(2730): n is a, c, g, or t
  misc_feature (2754)..(2754): n is a, c, g, or t
  misc_feature (2828)..(2828): n is a, c, g, or t
ggcgccgtcggagggagagtagacgtcaggcggagggagggaggcaggcaggcagggaggcagggagggagagagggaaggaagagaaggggagagaaagggggagcaaagaccgaaagagacccagagagatacagcttgagaggagaaataattaaagggggagggcgaccaggaggagaaaaaggtctgggaggaaagagagataaagagaatcggagggcagggaaatgagtttgtgcgcgtgagtgtgcgcgcgcgcgtgtgtgtgtgcaggggcgggcgcgggcgggccggggggcgggctcccgggctcccgggctcccctcctccccagcccgctcctctggctcgctcgccaactccgggccccagccgcgggcgggcgcacggcgggcggacagcatgctgagcctcctcgtctggatcctcactctctccgatactttctcccaagggacccagacccgcttcagccaggagccagctgaccagacggtggtggctggacagcgggccgtgctcccctgtgtgctgctcaactactctggaattgtgcaatggaccaaggacgggctggccctgggcatgggccagggcctcaaagcctggccacggtaccgggttgtgggctccgcagacgctgggcagtacaacctggagatcacagatgctgagctctctgacgacgcctcttacgagtgccaggccacggaggccgccctgcgctctcggcgggccaaactcaccgtgctcatccccccagaggacaccaggattgacggaggccctgtgattctactgcaggcaggcaccccccacaacctcacatgccgggccttcaatgcgaagcctgctgccaccatcatctggttccgggacgggacgcagcaggagggcgctgtggccagcacggaattgctgaaggatgggaagagggagaccaccgtgagccaactgcttattaaccccacggacctggacatagggcgtgtcttcacttgccgaagcatgaacgaagccatccctagtggcaaggagacttccatcgagctggatgtgcaccaccctcctacagtgaccctgtccattgagccacagacggtgcaggagggtgagcgtgttgtctttacctgccaggccacagccaaccccgagatcttgggctacaggtgggccaaagggggtttcttgattgaagacgcccacgagagtcgctatgagacaaatgtggattattcctttttcacggagcctgtgtcttgtgaggttcacaacaaagtgggaagcaccaatgtcagcactttagtaaatgtccactttgctccccggattgtagttgaccccaaacccacaaccacagacattggctctgatgtgacccttacctgtgtctgggttgggaatccccccctcactctcacctggaccaaaaaggactcaaatatggtcctgagtaacagcaaccagctgctgctgaagtcggtgactcaggcagacgctggcacctacacctgccgggccatcgtgcctcgaatcggagtggctgagcgggaggtgccgctctatgtgaacgggccccccatcatctccagtgaggcagtgcagtatgctgtgaggggtgacggtggcaaggtggagtgtttcattgggagcacaccacccccagaccgcatagcatgggcctggaaggagaacttcttggaggtggggaccctggaacgctatacagtggagaggaccaactcaggcagtggggtgctatccacgctcaccatcaacaatgtcatggaggccgactttcagactcactacaactgcaccgcctggaacagcttcgggccaggcacagccatcatccagctggaagagcgagaggtgttacctgtgggcatcatagctggggccaccatcggcgcgagcatcctgctcatcttcttcttcatcgccttggtattcttcctctaccggcgccgcaaaggcagtcgcaaagacgtgaccctgaggaagctggatatcaaggtggagacagtgaaccgagagccacttacgatgcattctgaccgggaggatgacaccgccagcgtctccacagcaacccgggtcatgaaggccatctactcgtcgtttaaggatgatgtggatctgaagcaggacctgcgctgcgacaccatcgacacccgggaggagtatgagatgaaggaccccaccaatggctactacaacgtgcgtgcccatgaagaccgcccgtcttccagggcagtgctctatgctgactaccgtgcccctggccctgcccgcttcgacggccgcccctcatcccgtctctcccactccagcggctatgcccagctcaacacctatagccggggccctgcctctgactatggccctgagcccacaccccctggccctgctgccccagctggcactgacacaaccagccagctgtcctacgagaactatgagaagttcaactcccatcccttccctggggcagctgggtaccccacctaccgactgggctacccccaggccccaccctctggcctggagcggaccccatatgaggcgtatgaccccattggcaagtacgccacagccactcgattctcctacacctcccagcactcggactacggccagcgattccagcagcgcatgcagactcacgtgtaggggccagagcctggctggggcatctctgcggggcagaggagaaggctttcncagctgttccctgatattcagggncattgctcattgctcccttctcggaccagccttcttcctcccaccatggcaggtggggagcaggtctcccaganacaccccgtcccgaggatggtgctctgtgcatgccccagcctcctgggcctgcccttccctcttcttcgggaggatgtgtctcttctgacctgcactcttgcctgaccctagaatggggacagggaaagtgaaggttagggaaagcagaggggggcactttttagcattccctttctatcccacccctctgatctcccataagtggaaatgggggtacccagggatgggcaggctttggcctagggacatgaagtatgggagtgggtggctgtggcacagacaggtggaaaacgggatagcctggccagtccctctgttgtctgcattcgtgccctgggtgcctctctccttcctcagggtactgcagaagggagcgaacagggtactgttcgctcttgtctacagaacagccctggcactgcattcaaatccagtcttcattcagctgggatcaaaatgccagtcaccttggctacccactgtggacagctgtctgtcagcatgcagagggatccaggaatccccccggcagcacggcccgctttccttctcctccatgctgggccagccagataagtcagggtcctggtggagaaagaaaggctaggaccatgtcctcattgacccagatactgctgtgtgctgcacagcagtgaaccaacactagagggagccacacaagcctcctctccccagtctgccccacttcctggctttaactcttgagctggtttggggagtggtgaggtaggggtgggggtgctgtaggctctttttcaaaaaaaacaaaaaacaatgaaaacctcatttgggaagaaaagctgtagggattcccccacccaaatacaagtcccagtggaaaggaaaggtagtacctattcttctccatggggttcctaacaccctccattactctttcagtctccaagcactttgaatccatttttaaacattcaggttgccagacctgtcacacagtggactctgatagggttacggagggggcctggctctcagtctctactctcctatgtcccatcagttggttggaggccaccttccagggggtatgggagacaggttttggtttttaagtgtcttttttttttttcttggaccaatcagattccttcttccactttcagtgccttgagtgtcaagctttggatgaccgaccctatgtgggcggttgtgtggggagtgggtacttgtgagcctcggacacactgttaagtgttacagtgttaggagagagatgggtgaggggacctggagaggtaaggggcctggaaatggccctgacagagaacttgtgctgaccgggagaaggtggtgcggaagggcaccgcaggcattacacaggccatttctcctcctccatgtgcacgcacatccaacacacaccttccatgtgactgcttctcagccaccactttctgaccaaagagaacaggcgctccaaggagaacctgtacccctgccccagcctcgccttcctaaaaagcagtgtctggagttggctgtttcccgcctccccagctgcatgtccagcccagtgggagacagggcctctggtgcagttcccaaaatgttcctcgccctttctccgtggtcaccattcataattcatgttcgctttaatgagttacatgcttatcagccacaggccattaccacccttatggatgggtctggggggcgacattcctggccaaccccttgtaggaaggaccagataatacccaggaagcaagtagctctaattttaacttcgcaggaagtctgtgcatcctccttcatttcagcagggaaaactcctgtggagtgggccctatctggggcatttacaggcttccagctgtattccatccctggaagctgatacctttctatagagtccttttatgagagctcagtgggaaggtctgtcaagaaattcaggttcttgtacagacaaattcatgcaaatttctattattttcacaaaaaccagaaaccatgggggaatccaaagacttgaagtctaaagatggtggcttttaaaacatgcatattccaaaaagaattcatttttgttttgggtttggctagattctcttatttatccccttttagcttaagtattagtttcattctactgaaatgatggagagagggcctaaggttactaggtaattgagctgatggtgcagggagaattgttgagaaaggaagcctagtttccagaagcctgacacagagctacttcactgtcctctactccttaacaaggtaactggagcctcttgggtgtcaaacaagcaccctggaaggcacagggaagcatcagcaaccaaggtagtctctgccctctgtaacttacgtgttggtgcatcagaatctgaattggaacctacctgatgggcccagtggaatagcttttctggggagtggaaggcgtccttgatcacagagctttgctgtcgaatcctggagtcctgcaacatggtgatgcctcagtagttggtgatcctgatcacctttggtggcttgttttagtggaaagagcaagggactaaaggtcaggagacccaggacccagtcctgaagctgcaaaggttagatctcggcctaactttctgttcattgcccccaatttgtctggcctgtaaaatgaagggggagggttgcataaacctaaaactattctggttttgttatacccatagggttgggggtagggatgggactgcccattgctggcaaggaactgggaacagtagcaagcatggtgagggctggagagctggctgggggggttctctcctgttcaaagaagctttcaccatgggcttcattatcttgtcagaagtgaattagtttccaccagggacccctttatcccaaacagcaacacaaaatacaccctaaacctcagagtaaaattgatgtggggctatcctttggctatcgggtcatctgtgctgctccccactcatttctgatgggtttgcaaaggtgccttttgccagggcaggacatagtatgcacatagggatattgttatgtgcctaggtttcaggcactccttctgtaggggaaaatgggaggagccttcctccaccctgatccttaggaacattcctctggcccagggacagcttgttcttctcaccaaacaggtgaagcctgcagtccaaggtgcctggagccagaggtcggggagtaagcacagctgcccctgcctgagaaggagcagcttgcaaggggagccggtggagggaaaggggtacaacagctttggaatacattctggatcttgaggaggatcttgtgattttggctgagccacggtcacttccctcgtgaaggacccgccctatatcctaaattctggatccctcaaagtccagccacagagtttgcatgaagcaaaaagcctagtaagtgagaaaggaaaggggccagggatgggagcagtgctgtgctgttatcactgtcttgcttggaatgaaaacatctgagcaccctgtcttcaagcggtacgctctccccttattccagcagggctactttcctcttcactctgatgaggggagctttatctgctttcaaaatggagcacgtcgcactggagtttcgtgccctctcgttaacctgtcaggagccacagggctccataaaacggaatcagtgtctcaatatacatgacctatgttcatagcaatgttcagccatttgggtttgaagaaaaccacattaaagccaagacccgtttggagcgaactgccttgttctttgctgtgtggaaggttctgtccctactgctgaactccagttcctccccaagcaccctggcctcagaaatcctggcttccccaagttagtgctgtctgacctgagccaggccactgcttggtgcctctacaggccactgtgcatgttgagaattgcccaaaaggattagtgaagctcctgaccctggcgaggccataatgaacactgaagtgcacaggccaagggatgtaattgaaaggcatttatttttgtgaagatgctataaaattagcatttaaatatcccattcccttctcttggcctcctcctatccccctatggtatttctcctcctctcctcaaggccaggctttttgtgaaaggcattggctcatctttgtcagcgtggtcctgacgttcacctctgggctgctggagaggactgagagatgtgtggtttggtaggaagggggtgtgtgtgggggttagtggggaatcccatttttttgcatcactgtgaggtagcttcaggccctgtccctggagaaataattgctgcgcagaagtcacaggccatactgggcagttctggtacaaacctgcccttattaataataacaataataataataactccatttgcatagaactgtcactcattcctgccagtctgctgtccctaccctggttttttgctggccccaaccactggccttgttgagtatcgatgggccctgagctcttctgtttgcttttggagctcttcagatgctgtcccccctgagaataccctaactctggggaaagagcagccaaaatcccaatacagtaaaactccacacaatcttgttagcaacagtgacccagaaaattttgagaagtccaatttcaccagaagaggcccagggctccctgtggtcacattttctacccagccattcttggcattgcaacctccatttctagctccagttgaattttctccacccagaccccaaaaataaatggatccatgatgataattaagagaagagaaaaaaagatattatttttgttaggacaaaccattgtaggattttagcaatgtgtatctgtgtgtccctcacaccttttcctattctacttttttttcctttttttaaaaatattatgtactatatttttagtctcaaacacactatatattatatatatttaatttttttatatatataaatataaatgttttaaaaagtaaaaaaatttgt

SEQ ID NO: 431713 - DNA, 7839 bp, Homo sapiens
  misc_feature (2730)..(2730): n is a, c, g, or t
  misc_feature (2754)..(2754): n is a, c, g, or t
  misc_feature (2828)..(2828): n is a, c, g, or t
  misc_feature (7838)..(7838): n is a, c, g, or t
ggcgccgtcggagggagagtagacgtcaggcggagggagggaggcaggcaggcagggaggcagggagggagagagggaaggaagagaaggggagagaaagggggagcaaagaccgaaagagacccagagagatacagcttgagaggagaaataattaaagggggagggcgaccaggaggagaaaaaggtctgggaggaaagagagataaagagaatcggagggcagggaaatgagtttgtgcgcgtgagtgtgcgcgcgcgcgtgtgtgtgtgcaggggcgggcgcgggcgggccggggggcgggctcccgggctcccgggctcccctcctccccagcccgctcctctggctcgctcgccaactccgggccccagccgcgggcgggcgcacggcgggcggacagcatgctgagcctcctcgtctggatcctcactctctccgatactttctcccaagggacccagacccgcttcagccaggagccagctgaccagacggtggtggctggacagcgggccgtgctcccctgtgtgctgctcaactactctggaattgtgcaatggaccaaggacgggctggccctgggcatgggccagggcctcaaagcctggccacggtaccgggttgtgggctccgcagacgctgggcagtacaacctggagatcacagatgctgagctctctgacgacgcctcttacgagtgccaggccacggaggccgccctgcgctctcggcgggccaaactcaccgtgctcatccccccagaggacaccaggattgacggaggccctgtgattctactgcaggcaggcaccccccacaacctcacatgccgggccttcaatgcgaagcctgctgccaccatcatctggttccgggacgggacgcagcaggagggcgctgtggccagcacggaattgctgaaggatgggaagagggagaccaccgtgagccaactgcttattaaccccacggacctggacatagggcgtgtcttcacttgccgaagcatgaacgaagccatccctagtggcaaggagacttccatcgagctggatgtgcaccaccctcctacagtgaccctgtccattgagccacagacggtgcaggagggtgagcgtgttgtctttacctgccaggccacagccaaccccgagatcttgggctacaggtgggccaaagggggtttcttgattgaagacgcccacgagagtcgctatgagacaaatgtggattattcctttttcacggagcctgtgtcttgtgaggttcacaacaaagtgggaagcaccaatgtcagcactttagtaaatgtccactttgctccccggattgtagttgaccccaaacccacaaccacagacattggctctgatgtgacccttacctgtgtctgggttgggaatccccccctcactctcacctggaccaaaaaggactcaaatatggtcctgagtaacagcaaccagctgctgctgaagtcggtgactcaggcagacgctggcacctacacctgccgggccatcgtgcctcgaatcggagtggctgagcgggaggtgccgctctatgtgaacgggccccccatcatctccagtgaggcagtgcagtatgctgtgaggggtgacggtggcaaggtggagtgtttcattgggagcacaccacccccagaccgcatagcatgggcctggaaggagaacttcttggaggtggggaccctggaacgctatacagtggagaggaccaactcaggcagtggggtgctatccacgctcaccatcaacaatgtcatggaggccgactttcagactcactacaactgcaccgcctggaacagcttcgggccaggcacagccatcatccagctggaagagcgagaggtgttacctgtgggcatcatagctggggccaccatcggcgcgagcatcctgctcatcttcttcttcatcgccttggtattcttcctctaccggcgccgcaaaggcagtcgcaaagacgtgaccctgaggaagctggatatcaaggtggagacagtgaaccgagagccacttacgatgcattctgaccgggaggatgacaccgccagcgtctccacagcaacccgggtcatgaaggccatctactcgtcgtttaaggatgatgtggatctgaagcaggacctgcgctgcgacaccatcgacacccgggaggagtatgagatgaaggaccccaccaatggctactacaacgtgcgtgcccatgaagaccgcccgtcttccagggcagtgctctatgctgactaccgtgcccctggccctgcccgcttcgacggccgcccctcatcccgtctctcccactccagcggctatgcccagctcaacacctatagccggggccctgcctctgactatggccctgagcccacaccccctggccctgctgccccagctggcactgacacaaccagccagctgtcctacgagaactatgagaagttcaactcccatcccttccctggggcagctgggtaccccacctaccgactgggctacccccaggccccaccctctggcctggagcggaccccatatgaggcgtatgaccccattggcaagtacgccacagccactcgattctcctacacctcccagcactcggactacggccagcgattccagcagcgcatgcagactcacgtgtaggggccagagcctggctggggcatctctgcggggcagaggagaaggctttcncagctgttccctgatattcagggncattgctcattgctcccttctcggaccagccttcttcctcccaccatggcaggtggggagcaggtctcccaganacaccccgtcccgaggatggtgctctgtgcatgccccagcctcctgggcctgcccttccctcttcttcgggaggatgtgtctcttctgacctgcactcttgcctgaccctagaatggggacagggaaagtgaaggttagggaaagcagaggggggcactttttagcattccctttctatcccacccctctgatctcccataagtggaaatgggggtacccagggatgggcaggctttggcctagggacatgaagtatgggagtgggtggctgtggcacagacaggtggaaaacgggatagcctggccagtccctctgttgtctgcattcgtgccctgggtgcctctctccttcctcagggtactgcagaagggagcgaacagggtactgttcgctcttgtctacagaacagccctggcactgcattcaaatccagtcttcattcagctgggatcaaaatgccagtcaccttggctacccactgtggacagctgtctgtcagcatgcagagggatccaggaatccccccggcagcacggcccgctttccttctcctccatgctgggccagccagataagtcagggtcctggtggagaaagaaaggctaggaccatgtcctcattgacccagatactgctgtgtgctgcacagcagtgaaccaacactagagggagccacacaagcctcctctccccagtctgccccacttcctggctttaactcttgagctggtttggggagtggtgaggtaggggtgggggtgctgtaggctctttttcaaaaaaaacaaaaaacaatgaaaacctcatttgggaagaaaagctgtagggattcccccacccaaatacaagtcccagtggaaaggaaaggtagtacctattcttctccatggggttcctaacaccctccattactctttcagtctccaagcactttgaatccatttttaaacattcaggttgccagacctgtcacacagtggactctgatagggttacggagggggcctggctctcagtctctactctcctatgtcccatcagttggttggaggccaccttccagggggtatgggagacaggttttggtttttaagtgtcttttttttttttcttggaccaatcagattccttcttccactttcagtgccttgagtgtcaagctttggatgaccgaccctatgtgggcggttgtgtggggagtgggtacttgtgagcctcggacacactgttaagtgttacagtgttaggagagagatgggtgaggggacctggagaggtaaggggcctggaaatggccctgacagagaacttgtgctgaccgggagaaggtggtgcggaagggcaccgcaggcattacacaggccatttctcctcctccatgtgcacgcacatccaacacacaccttccatgtgactgcttctcagccaccactttctgaccaaagagaacaggcgctccaaggagaacctgtacccctgccccagcctcgccttcctaaaaagcagtgtctggagttggctgtttcccgcctccccagctgcatgtccagcccagtgggagacagggcctctggtgcagttcccaaaatgttcctcgccctttctccgtggtcaccattcataattcatgttcgctttaatgagttacatgcttatcagccacaggccattaccacccttatggatgggtctggggggcgacattcctggccaaccccttgtaggaaggaccagataatacccaggaagcaagtagctctaattttaacttcgcaggaagtctgtgcatcctccttcatttcagcagggaaaactcctgtggagtgggccctatctggggcatttacaggcttccagctgtattccatccctggaagctgatacctttctatagagtccttttatgagagctcagtgggaaggtctgtcaagaaattcaggttcttgtacagacaaattcatgcaaatttctattattttcacaaaaaccagaaaccatgggggaatccaaagacttgaagtctaaagatggtggcttttaaaacatgcatattccaaaaagaattcatttttgttttgggtttggctagattctcttatttatccccttttagcttaagtattagtttcattctactgaaatgatggagagagggcctaaggttactaggtaattgagctgatggtgcagggagaattgttgagaaaggaagcctagtttccagaagcctgacacagagctacttcactgtcctctactccttaacaaggtaactggagcctcttgggtgtcaaacaagcaccctggaaggcacagggaagcatcagcaaccaaggtagtctctgccctctgtaacttacgtgttggtgcatcagaatctgaattggaacctacctgatgggcccagtggaatagcttttctggggagtggaaggcgtccttgatcacagagctttgctgtcgaatcctggagtcctgcaacatggtgatgcctcagtagttggtgatcctgatcacctttggtggcttgttttagtggaaagagcaagggactaaaggtcaggagacccaggacccagtcctgaagctgcaaaggttagatctcggcctaactttctgttcattgcccccaatttgtctggcctgtaaaatgaagggggagggttgcataaacctaaaactattctggttttgttatacccatagggttgggggtagggatgggactgcccattgctggcaaggaactgggaacagtagcaagcatggtgagggctggagagctggctgggggggttctctcctgttcaaagaagctttcaccatgggcttcattatcttgtcagaagtgaattagtttccaccagggacccctttatcccaaacagcaacacaaaatacaccctaaacctcagagtaaaattgatgtggggctatcctttggctatcgggtcatctgtgctgctccccactcatttctgatgggtttgcaaaggtgccttttgccagggcaggacatagtatgcacatagggatattgttatgtgcctaggtttcaggcactccttctgtaggggaaaatgggaggagccttcctccaccctgatccttaggaacattcctctggcccagggacagcttgttcttctcaccaaacaggtgaagcctgcagtccaaggtgcctggagccagaggtcggggagtaagcacagctgcccctgcctgagaaggagcagcttgcaaggggagccggtggagggaaaggggtacaacagctttggaatacattctggatcttgaggaggatcttgtgattttggctgagccacggtcacttccctcgtgaaggacccgccctatatcctaaattctggatccctcaaagtccagccacagagtttgcatgaagcaaaaagcctagtaagtgagaaaggaaaggggccagggatgggagcagtgctgtgctgttatcactgtcttgcttggaatgaaaacatctgagcaccctgtcttcaagcggtacgctctccccttattccagcagggctactttcctcttcactctgatgaggggagctttatctgctttcaaaatggagcacgtcgcactggagtttcgtgccctctcgttaacctgtcaggagccacagggctccataaaacggaatcagtgtctcaatatacatgacctatgttcatagcaatgttcagccatttgggtttgaagaaaaccacattaaagccaagacccgtttggagcgaactgccttgttctttgctgtgtggaaggttctgtccctactgctgaactccagttcctccccaagcaccctggcctcagaaatcctggcttccccaagttagtgctgtctgacctgagccaggccactgcttggtgcctctacaggccactgtgcatgttgagaattgcccaaaaggattagtgaagctcctgaccctggcgaggccataatgaacactgaagtgcacaggccaagggatgtaattgaaaggcatttatttttgtgaagatgctataaaattagcatttaaatatcccattcccttctcttggcctcctcctatccccctatggtatttctcctcctctcctcaaggccaggctttttgtgaaaggcattggctcatctttgtcagcgtggtcctgacgttcacctctgggctgctggagaggactgagagatgtgtggtttggtaggaagggggtgtgtgtgggggttagtggggaatcccatttttttgcatcactgtgaggtagcttcaggccctgtccctggagaaataattgctgcgcagaagtcacaggccatactgggcagttctggtacaaacctgcccttattaataataacaataataataataactccatttgcatagaactgtcactcattcctgccagtctgctgtccctaccctggttttttgctggccccaaccactggccttgttgagtatcgatgggccctgagctcttctgtttgcttttggagctcttcagatgctgtcccccctgagaataccctaactctggggaaagagcagccaaaatcccaatacagtaaaactccacacaatcttgttagcaacagtgacccagaaaattttgagaagtccaatttcaccagaagaggcccagggctccctgtggtcacattttctacccagccattcttggcattgcaacctccatttctagctccagttgaattttctccacccagaccccaaaaataaatggatccatgatgataattaagagaagagaaaaaaagatatcttctggtcggccaaccatgtggtttagccaaggttttgggtgtcccacacctttcccatctcatcttcctttcaaaaattcgtcttattttgtgtcaaccctattttattttcctttacaatgtcacaaaaaagggggcaaccggcgaacctttagacgcttaacgcaaagcggtgtgtgcatctcttcggtttcggccacttccnc

SEQ ID NO: 431714 - DNA, 6132 bp, Homo sapiens
  misc_feature (1030)..(1030): n is a, c, g, or t
  misc_feature (1054)..(1054): n is a, c, g, or t
  misc_feature (1128)..(1128): n is a, c, g, or t
attcagattgagtcctgaggcatttactctcgggtaaaggagagttgagcctgaattaggcatgtgtatattctagggatcctggtgcttatggggaccacgtctgtgggcctgaggtctgggcagccagggctggtgctgtccctgcccacatccgtactggcccgaagagcgagaggtgttacctgtgggcatcatagctggggccaccatcggcgcgagcatcctgctcatcttcttcttcatcgccttggtattcttcctctaccggcgccgcaaaggcagtcgcaaagacgtgaccctgaggaagctggatatcaaggtggagacagtgaaccgagagccacttacgatgcattctgaccgggaggatgacaccgccagcgtctccacagcaacccgggtcatgaaggccatctactcgtcgtttaaggatgatgtggatctgaagcaggacctgcgctgcgacaccatcgacacccgggaggagtatgagatgaaggaccccaccaatggctactacaacgtgcgtgcccatgaagaccgcccgtcttccagggcagtgctctatgctgactaccgtgcccctggccctgcccgcttcgacggccgcccctcatcccgtctctcccactccagcggctatgcccagctcaacacctatagccggggccctgcctctgactatggccctgagcccacaccccctggccctgctgccccagctggcactgacacaaccagccagctgtcctacgagaactatgagaagttcaactcccatcccttccctggggcagctgggtaccccacctaccgactgggctacccccaggccccaccctctggcctggagcggaccccatatgaggcgtatgaccccattggcaagtacgccacagccactcgattctcctacacctcccagcactcggactacggccagcgattccagcagcgcatgcagactcacgtgtaggggccagagcctggctggggcatctctgcggggcagaggagaaggctttcncagctgttccctgatattcagggncattgctcattgctcccttctcggaccagccttcttcctcccaccatggcaggtggggagcaggtctcccaganacaccccgtcccgaggatggtgctctgtgcatgccccagcctcctgggcctgcccttccctcttcttcgggaggatgtgtctcttctgacctgcactcttgcctgaccctagaatggggacagggaaagtgaaggttagggaaagcagaggggggcactttttagcattccctttctatcccacccctctgatctcccataagtggaaatgggggtacccagggatgggcaggctttggcctagggacatgaagtatgggagtgggtggctgtggcacagacaggtggaaaacgggatagcctggccagtccctctgttgtctgcattcgtgccctgggtgcctctctccttcctcagggtactgcagaagggagcgaacagggtactgttcgctcttgtctacagaacagccctggcactgcattcaaatccagtcttcattcagctgggatcaaaatgccagtcaccttggctacccactgtggacagctgtctgtcagcatgcagagggatccaggaatccccccggcagcacggcccgctttccttctcctccatgctgggccagccagataagtcagggtcctggtggagaaagaaaggctaggaccatgtcctcattgacccagatactgctgtgtgctgcacagcagtgaaccaacactagagggagccacacaagcctcctctccccagtctgccccacttcctggctttaactcttgagctggtttggggagtggtgaggtaggggtgggggtgctgtaggctctttttcaaaaaaaacaaaaaacaatgaaaacctcatttgggaagaaaagctgtagggattcccccacccaaatacaagtcccagtggaaaggaaaggtagtacctattcttctccatggggttcctaacaccctccattactctttcagtctccaagcactttgaatccatttttaaacattcaggttgccagacctgtcacacagtggactctgatagggttacggagggggcctggctctcagtctctactctcctatgtcccatcagttggttggaggccaccttccagggggtatgggagacaggttttggtttttaagtgtcttttttttttttcttggaccaatcagattccttcttccactttcagtgccttgagtgtcaagctttggatgaccgaccctatgtgggcggttgtgtggggagtgggtacttgtgagcctcggacacactgttaagtgttacagtgttaggagagagatgggtgaggggacctggagaggtaaggggcctggaaatggccctgacagagaacttgtgctgaccgggagaaggtggtgcggaagggcaccgcaggcattacacaggccatttctcctcctccatgtgcacgcacatccaacacacaccttccatgtgactgcttctcagccaccactttctgaccaaagagaacaggcgctccaaggagaacctgtacccctgccccagcctcgccttcctaaaaagcagtgtctggagttggctgtttcccgcctccccagctgcatgtccagcccagtgggagacagggcctctggtgcagttcccaaaatgttcctcgccctttctccgtggtcaccattcataattcatgttcgctttaatgagttacatgcttatcagccacaggccattaccacccttatggatgggtctggggggcgacattcctggccaaccccttgtaggaaggaccagataatacccaggaagcaagtagctctaattttaacttcgcaggaagtctgtgcatcctccttcatttcagcagggaaaactcctgtggagtgggccctatctggggcatttacaggcttccagctgtattccatccctggaagctgatacctttctatagagtccttttatgagagctcagtgggaaggtctgtcaagaaattcaggttcttgtacagacaaattcatgcaaatttctattattttcacaaaaaccagaaaccatgggggaatccaaagacttgaagtctaaagatggtggcttttaaaacatgcatattccaaaaagaattcatttttgttttgggtttggctagattctcttatttatccccttttagcttaagtattagtttcattctactgaaatgatggagagagggcctaaggttactaggtaattgagctgatggtgcagggagaattgttgagaaaggaagcctagtttccagaagcctgacacagagctacttcactgtcctctactccttaacaaggtaactggagcctcttgggtgtcaaacaagcaccctggaaggcacagggaagcatcagcaaccaaggtagtctctgccctctgtaacttacgtgttggtgcatcagaatctgaattggaacctacctgatgggcccagtggaatagcttttctggggagtggaaggcgtccttgatcacagagctttgctgtcgaatcctggagtcctgcaacatggtgatgcctcagtagttggtgatcctgatcacctttggtggcttgttttagtggaaagagcaagggactaaaggtcaggagacccaggacccagtcctgaagctgcaaaggttagatctcggcctaactttctgttcattgcccccaatttgtctggcctgtaaaatgaagggggagggttgcataaacctaaaactattctggttttgttatacccatagggttgggggtagggatgggactgcccattgctggcaaggaactgggaacagtagcaagcatggtgagggctggagagctggctgggggggttctctcctgttcaaagaagctttcaccatgggcttcattatcttgtcagaagtgaattagtttccaccagggacccctttatcccaaacagcaacacaaaatacaccctaaacctcagagtaaaattgatgtggggctatcctttggctatcgggtcatctgtgctgctccccactcatttctgatgggtttgcaaaggtgccttttgccagggcaggacatagtatgcacatagggatattgttatgtgcctaggtttcaggcactccttctgtaggggaaaatgggaggagccttcctccaccctgatccttaggaacattcctctggcccagggacagcttgttcttctcaccaaacaggtgaagcctgcagtccaaggtgcctggagccagaggtcggggagtaagcacagctgcccctgcctgagaaggagcagcttgcaaggggagccggtggagggaaaggggtacaacagctttggaatacattctggatcttgaggaggatcttgtgattttggctgagccacggtcacttccctcgtgaaggacccgccctatatcctaaattctggatccctcaaagtccagccacagagtttgcatgaagcaaaaagcctagtaagtgagaaaggaaaggggccagggatgggagcagtgctgtgctgttatcactgtcttgcttggaatgaaaacatctgagcaccctgtcttcaagcggtacgctctccccttattccagcagggctactttcctcttcactctgatgaggggagctttatctgctttcaaaatggagcacgtcgcactggagtttcgtgccctctcgttaacctgtcaggagccacagggctccataaaacggaatcagtgtctcaatatacatgacctatgttcatagcaatgttcagccatttgggtttgaagaaaaccacattaaagccaagacccgtttggagcgaactgccttgttctttgctgtgtggaaggttctgtccctactgctgaactccagttcctccccaagcaccctggcctcagaaatcctggcttccccaagttagtgctgtctgacctgagccaggccactgcttggtgcctctacaggccactgtgcatgttgagaattgcccaaaaggattagtgaagctcctgaccctggcgaggccataatgaacactgaagtgcacaggccaagggatgtaattgaaaggcatttatttttgtgaagatgctataaaattagcatttaaatatcccattcccttctcttggcctcctcctatccccctatggtatttctcctcctctcctcaaggccaggctttttgtgaaaggcattggctcatctttgtcagcgtggtcctgacgttcacctctgggctgctggagaggactgagagatgtgtggtttggtaggaagggggtgtgtgtgggggttagtggggaatcccatttttttgcatcactgtgaggtagcttcaggccctgtccctggagaaataattgctgcgcagaagtcacaggccatactgggcagttctggtacaaacctgcccttattaataataacaataataataataactccatttgcatagaactgtcactcattcctgccagtctgctgtccctaccctggttttttgctggccccaaccactggccttgttgagtatcgatgggccctgagctcttctgtttgcttttggagctcttcagatgctgtcccccctgagaataccctaactctggggaaagagcagccaaaatcccaatacagtaaaactccacacaatcttgttagcaacagtgacccagaaaattttgagaagtccaatttcaccagaagaggcccagggctccctgtggtcacattttctacccagccattcttggcattgcaacctccatttctagctccagttgaattttctccacccagaccccaaaaataaatggatccatgatgataattaagagaagagaaaaaaagatattatttttgttaggacaaaccattgtaggattttagcaatgtgtatctgtgtgtccctcacaccttttcctattctacttttttttcctttttttaaaaatattatgtactatatttttagtctcaaacacactatatattatatatatttaatttttttatatatataaatataaatgttttaaaaagtaaaaaaatttgt

SEQ ID NO: 431715 - DNA, 5728 bp, Homo sapiens
  misc_feature (626)..(626): n is a, c, g, or t
  misc_feature (650)..(650): n is a, c, g, or t
  misc_feature (724)..(724): n is a, c, g, or t
ctgctccgcccctctctggatcgtttaaggatgatgtggatctgaagcaggacctgcgctgcgacaccatcgacacccgggaggagtatgagatgaaggaccccaccaatggctactacaacgtgcgtgcccatgaagaccgcccgtcttccagggcagtgctctatgctgactaccgtgcccctggccctgcccgcttcgacggccgcccctcatcccgtctctcccactccagcggctatgcccagctcaacacctatagccggggccctgcctctgactatggccctgagcccacaccccctggccctgctgccccagctggcactgacacaaccagccagctgtcctacgagaactatgagaagttcaactcccatcccttccctggggcagctgggtaccccacctaccgactgggctacccccaggccccaccctctggcctggagcggaccccatatgaggcgtatgaccccattggcaagtacgccacagccactcgattctcctacacctcccagcactcggactacggccagcgattccagcagcgcatgcagactcacgtgtaggggccagagcctggctggggcatctctgcggggcagaggagaaggctttcncagctgttccctgatattcagggncattgctcattgctcccttctcggaccagccttcttcctcccaccatggcaggtggggagcaggtctcccaganacaccccgtcccgaggatggtgctctgtgcatgccccagcctcctgggcctgcccttccctcttcttcgggaggatgtgtctcttctgacctgcactcttgcctgaccctagaatggggacagggaaagtgaaggttagggaaagcagaggggggcactttttagcattccctttctatcccacccctctgatctcccataagtggaaatgggggtacccagggatgggcaggctttggcctagggacatgaagtatgggagtgggtggctgtggcacagacaggtggaaaacgggatagcctggccagtccctctgttgtctgcattcgtgccctgggtgcctctctccttcctcagggtactgcagaagggagcgaacagggtactgttcgctcttgtctacagaacagccctggcactgcattcaaatccagtcttcattcagctgggatcaaaatgccagtcaccttggctacccactgtggacagctgtctgtcagcatgcagagggatccaggaatccccccggcagcacggcccgctttccttctcctccatgctgggccagccagataagtcagggtcctggtggagaaagaaaggctaggaccatgtcctcattgacccagatactgctgtgtgctgcacagcagtgaaccaacactagagggagccacacaagcctcctctccccagtctgccccacttcctggctttaactcttgagctggtttggggagtggtgaggtaggggtgggggtgctgtaggctctttttcaaaaaaaacaaaaaacaatgaaaacctcatttgggaagaaaagctgtagggattcccccacccaaatacaagtcccagtggaaaggaaaggtagtacctattcttctccatggggttcctaacaccctccattactctttcagtctccaagcactttgaatccatttttaaacattcaggttgccagacctgtcacacagtggactctgatagggttacggagggggcctggctctcagtctctactctcctatgtcccatcagttggttggaggccaccttccagggggtatgggagacaggttttggtttttaagtgtcttttttttttttcttggaccaatcagattccttcttccactttcagtgccttgagtgtcaagctttggatgaccgaccctatgtgggcggttgtgtggggagtgggtacttgtgagcctcggacacactgttaagtgttacagtgttaggagagagatgggtgaggggacctggagaggtaaggggcctggaaatggccctgacagagaacttgtgctgaccgggagaaggtggtgcggaagggcaccgcaggcattacacaggccatttctcctcctccatgtgcacgcacatccaacacacaccttccatgtgactgcttctcagccaccactttctgaccaaagagaacaggcgctccaaggagaacctgtacccctgccccagcctcgccttcctaaaaagcagtgtctggagttggctgtttcccgcctccccagctgcatgtccagcccagtgggagacagggcctctggtgcagttcccaaaatgttcctcgccctttctccgtggtcaccattcataattcatgttcgctttaatgagttacatgcttatcagccacaggccattaccacccttatggatgggtctggggggcgacattcctggccaaccccttgtaggaaggaccagataatacccaggaagcaagtagctctaattttaacttcgcaggaagtctgtgcatcctccttcatttcagcagggaaaactcctgtggagtgggccctatctggggcatttacaggcttccagctgtattccatccctggaagctgatacctttctatagagtccttttatgagagctcagtgggaaggtctgtcaagaaattcaggttcttgtacagacaaattcatgcaaatttctattattttcacaaaaaccagaaaccatgggggaatccaaagacttgaagtctaaagatggtggcttttaaaacatgcatattccaaaaagaattcatttttgttttgggtttggctagattctcttatttatccccttttagcttaagtattagtttcattctactgaaatgatggagagagggcctaaggttactaggtaattgagctgatggtgcagggagaattgttgagaaaggaagcctagtttccagaagcctgacacagagctacttcactgtcctctactccttaacaaggtaactggagcctcttgggtgtcaaacaagcaccctggaaggcacagggaagcatcagcaaccaaggtagtctctgccctctgtaacttacgtgttggtgcatcagaatctgaattggaacctacctgatgggcccagtggaatagcttttctggggagtggaaggcgtccttgatcacagagctttgctgtcgaatcctggagtcctgcaacatggtgatgcctcagtagttggtgatcctgatcacctttggtggcttgttttagtggaaagagcaagggactaaaggtcaggagacccaggacccagtcctgaagctgcaaaggttagatctcggcctaactttctgttcattgcccccaatttgtctggcctgtaaaatgaagggggagggttgcataaacctaaaactattctggttttgttatacccatagggttgggggtagggatgggactgcccattgctggcaaggaactgggaacagtagcaagcatggtgagggctggagagctggctgggggggttctctcctgttcaaagaagctttcaccatgggcttcattatcttgtcagaagtgaattagtttccaccagggacccctttatcccaaacagcaacacaaaatacaccctaaacctcagagtaaaattgatgtggggctatcctttggctatcgggtcatctgtgctgctccccactcatttctgatgggtttgcaaaggtgccttttgccagggcaggacatagtatgcacatagggatattgttatgtgcctaggtttcaggcactccttctgtaggggaaaatgggaggagccttcctccaccctgatccttaggaacattcctctggcccagggacagcttgttcttctcaccaaacaggtgaagcctgcagtccaaggtgcctggagccagaggtcggggagtaagcacagctgcccctgcctgagaaggagcagcttgcaaggggagccggtggagggaaaggggtacaacagctttggaatacattctggatcttgaggaggatcttgtgattttggctgagccacggtcacttccctcgtgaaggacccgccctatatcctaaattctggatccctcaaagtccagccacagagtttgcatgaagcaaaaagcctagtaagtgagaaaggaaaggggccagggatgggagcagtgctgtgctgttatcactgtcttgcttggaatgaaaacatctgagcaccctgtcttcaagcggtacgctctccccttattccagcagggctactttcctcttcactctgatgaggggagctttatctgctttcaaaatggagcacgtcgcactggagtttcgtgccctctcgttaacctgtcaggagccacagggctccataaaacggaatcagtgtctcaatatacatgacctatgttcatagcaatgttcagccatttgggtttgaagaaaaccacattaaagccaagacccgtttggagcgaactgccttgttctttgctgtgtggaaggttctgtccctactgctgaactccagttcctccccaagcaccctggcctcagaaatcctggcttccccaagttagtgctgtctgacctgagccaggccactgcttggtgcctctacaggccactgtgcatgttgagaattgcccaaaaggattagtgaagctcctgaccctggcgaggccataatgaacactgaagtgcacaggccaagggatgtaattgaaaggcatttatttttgtgaagatgctataaaattagcatttaaatatcccattcccttctcttggcctcctcctatccccctatggtatttctcctcctctcctcaaggccaggctttttgtgaaaggcattggctcatctttgtcagcgtggtcctgacgttcacctctgggctgctggagaggactgagagatgtgtggtttggtaggaagggggtgtgtgtgggggttagtggggaatcccatttttttgcatcactgtgaggtagcttcaggccctgtccctggagaaataattgctgcgcagaagtcacaggccatactgggcagttctggtacaaacctgcccttattaataataacaataataataataactccatttgcatagaactgtcactcattcctgccagtctgctgtccctaccctggttttttgctggccccaaccactggccttgttgagtatcgatgggccctgagctcttctgtttgcttttggagctcttcagatgctgtcccccctgagaataccctaactctggggaaagagcagccaaaatcccaatacagtaaaactccacacaatcttgttagcaacagtgacccagaaaattttgagaagtccaatttcaccagaagaggcccagggctccctgtggtcacattttctacccagccattcttggcattgcaacctccatttctagctccagttgaattttctccacccagaccccaaaaataaatggatccatgatgataattaagagaagagaaaaaaagatattatttttgttaggacaaaccattgtaggattttagcaatgtgtatctgtgtgtccctcacaccttttcctattctacttttttttcctttttttaaaaatattatgtactatatttttagtctcaaacacactatatattatatatatttaatttttttatatatataaatataaatgttttaaaaagtaaaaaaatttgt

SEQ ID NO: 431716 - DNA, 2317 bp, Homo sapiens
agatgccgctcagtaactgcacccgtgaggtataacacgtagcccactagtcttaccatgtatctgggaacagtagcaagcatggtgagggctggagagctggctgggggggttctctcctgttcaaagaagctttcaccatgggcttcattatcttgtcagaagtgaattagtttccaccagggacccctttatcccaaacagcaacacaaaatacaccctaaacctcagagtaaaattgatgtggggctatcctttggctatcgggtcatctgtgctgctccccactcatttctgatgggtttgcaaaggtgccttttgccagggcaggacatagtatgcacatagggatattgttatgtgcctaggtttcaggcactccttctgtaggggaaaatgggaggagccttcctccaccctgatccttaggaacattcctctggcccagggacagcttgttcttctcaccaaacaggtgaagcctgcagtccaaggtgcctggagccagaggtcggggagtaagcacagctgcccctgcctgagaaggagcagcttgcaaggggagccggtggagggaaaggggtacaacagctttggaatacattctggatcttgaggaggatcttgtgattttggctgagccacggtcacttccctcgtgaaggacccgccctatatcctaaattctggatccctcaaagtccagccacagagtttgcatgaagcaaaaagcctagtaagtgagaaaggaaaggggccagggatgggagcagtgctgtgctgttatcactgtcttgcttggaatgaaaacatctgagcaccctgtcttcaagcggtacgctctccccttattccagcagggctactttcctcttcactctgatgaggggagctttatctgctttcaaaatggagcacgtcgcactggagtttcgtgccctctcgttaacctgtcaggagccacagggctccataaaacggaatcagtgtctcaatatacatgacctatgttcatagcaatgttcagccatttgggtttgaagaaaaccacattaaagccaagacccgtttggagcgaactgccttgttctttgctgtgtggaaggttctgtccctactgctgaactccagttcctccccaagcaccctggcctcagaaatcctggcttccccaagttagtgctgtctgacctgagccaggccactgcttggtgcctctacaggccactgtgcatgttgagaattgcccaaaaggattagtgaagctcctgaccctggcgaggccataatgaacactgaagtgcacaggccaagggatgtaattgaaaggcatttatttttgtgaagatgctataaaattagcatttaaatatcccattcccttctcttggcctcctcctatccccctatggtatttctcctcctctcctcaaggccaggctttttgtgaaaggcattggctcatctttgtcagcgtggtcctgacgttcacctctgggctgctggagaggactgagagatgtgtggtttggtaggaagggggtgtgtgtgggggttagtggggaatcccatttttttgcatcactgtgaggtagcttcaggccctgtccctggagaaataattgctgcgcagaagtcacaggccatactgggcagttctggtacaaacctgcccttattaataataacaataataataataactccatttgcatagaactgtcactcattcctgccagtctgctgtccctaccctggttttttgctggccccaaccactggccttgttgagtatcgatgggccctgagctcttctgtttgcttttggagctcttcagatgctgtcccccctgagaataccctaactctggggaaagagcagccaaaatcccaatacagtaaaactccacacaatcttgttagcaacagtgacccagaaaattttgagaagtccaatttcaccagaagaggcccagggctccctgtggtcacattttctacccagccattcttggcattgcaacctccatttctagctccagttgaattttctccacccagaccccaaaaataaatggatccatgatgataattaagagaagagaaaaaaagatattatttttgttaggacaaaccattgtaggattttagcaatgtgtatctgtgtgtccctcacaccttttcctattctacttttttttcctttttttaaaaatattatgtactatatttttagtctcaaacacactatatattatatatatttaatttttttatatatataaatataaatgttttaaaaagtaaaaaaatttgt

SEQ ID NO: 431717 - DNA, 1952 bp, Homo sapiens
tcctagagtagtcccgattacgctctagacggtgggaggagccttcctccaccctgatccttaggaacattcctctggcccagggacagcttgttcttctcaccaaacaggtgaagcctgcagtccaaggtgcctggagccagaggtcggggagtaagcacagctgcccctgcctgagaaggagcagcttgcaaggggagccggtggagggaaaggggtacaacagctttggaatacattctggatcttgaggaggatcttgtgattttggctgagccacggtcacttccctcgtgaaggacccgccctatatcctaaattctggatccctcaaagtccagccacagagtttgcatgaagcaaaaagcctagtaagtgagaaaggaaaggggccagggatgggagcagtgctgtgctgttatcactgtcttgcttggaatgaaaacatctgagcaccctgtcttcaagcggtacgctctccccttattccagcagggctactttcctcttcactctgatgaggggagctttatctgctttcaaaatggagcacgtcgcactggagtttcgtgccctctcgttaacctgtcaggagccacagggctccataaaacggaatcagtgtctcaatatacatgacctatgttcatagcaatgttcagccatttgggtttgaagaaaaccacattaaagccaagacccgtttggagcgaactgccttgttctttgctgtgtggaaggttctgtccctactgctgaactccagttcctccccaagcaccctggcctcagaaatcctggcttccccaagttagtgctgtctgacctgagccaggccactgcttggtgcctctacaggccactgtgcatgttgagaattgcccaaaaggattagtgaagctcctgaccctggcgaggccataatgaacactgaagtgcacaggccaagggatgtaattgaaaggcatttatttttgtgaagatgctataaaattagcatttaaatatcccattcccttctcttggcctcctcctatccccctatggtatttctcctcctctcctcaaggccaggctttttgtgaaaggcattggctcatctttgtcagcgtggtcctgacgttcacctctgggctgctggagaggactgagagatgtgtggtttggtaggaagggggtgtgtgtgggggttagtggggaatcccatttttttgcatcactgtgaggtagcttcaggccctgtccctggagaaataattgctgcgcagaagtcacaggccatactgggcagttctggtacaaacctgcccttattaataataacaataataataataactccatttgcatagaactgtcactcattcctgccagtctgctgtccctaccctggttttttgctggccccaaccactggccttgttgagtatcgatgggccctgagctcttctgtttgcttttggagctcttcagatgctgtcccccctgagaataccctaactctggggaaagagcagccaaaatcccaatacagtaaaactccacacaatcttgttagcaacagtgacccagaaaattttgagaagtccaatttcaccagaagaggcccagggctccctgtggtcacattttctacccagccattcttggcattgcaacctccatttctagctccagttgaattttctccacccagaccccaaaaataaatggatccatgatgataattaagagaagagaaaaaaagatattatttttgttaggacaaaccattgtaggattttagcaatgtgtatctgtgtgtccctcacaccttttcctattctacttttttttcctttttttaaaaatattatgtactatatttttagtctcaaacacactatatattatatatatttaatttttttatatatataaatataaatgttttaaaaagtaaaaaaatttgt

SEQ ID NO: 431718 - DNA, 1553 bp, Homo sapiens
tacgcgcagtagaggtcgggtgttaatcggccgaggggaatgaaaacatctgagcaccctgtcttcaagcggtacgctctccccttattccagcagggctactttcctcttcactctgatgaggggagctttatctgctttcaaaatggagcacgtcgcactggagtttcgtgccctctcgttaacctgtcaggagccacagggctccataaaacggaatcagtgtctcaatatacatgacctatgttcatagcaatgttcagccatttgggtttgaagaaaaccacattaaagccaagacccgtttggagcgaactgccttgttctttgctgtgtggaaggttctgtccctactgctgaactccagttcctccccaagcaccctggcctcagaaatcctggcttccccaagttagtgctgtctgacctgagccaggccactgcttggtgcctctacaggccactgtgcatgttgagaattgcccaaaaggattagtgaagctcctgaccctggcgaggccataatgaacactgaagtgcacaggccaagggatgtaattgaaaggcatttatttttgtgaagatgctataaaattagcatttaaatatcccattcccttctcttggcctcctcctatccccctatggtatttctcctcctctcctcaaggccaggctttttgtgaaaggcattggctcatctttgtcagcgtggtcctgacgttcacctctgggctgctggagaggactgagagatgtgtggtttggtaggaagggggtgtgtgtgggggttagtggggaatcccatttttttgcatcactgtgaggtagcttcaggccctgtccctggagaaataattgctgcgcagaagtcacaggccatactgggcagttctggtacaaacctgcccttattaataataacaataataataataactccatttgcatagaactgtcactcattcctgccagtctgctgtccctaccctggttttttgctggccccaaccactggccttgttgagtatcgatgggccctgagctcttctgtttgcttttggagctcttcagatgctgtcccccctgagaataccctaactctggggaaagagcagccaaaatcccaatacagtaaaactccacacaatcttgttagcaacagtgacccagaaaattttgagaagtccaatttcaccagaagaggcccagggctccctgtggtcacattttctacccagccattcttggcattgcaacctccatttctagctccagttgaattttctccacccagaccccaaaaataaatggatccatgatgataattaagagaagagaaaaaaagatattatttttgttaggacaaaccattgtaggattttagcaatgtgtatctgtgtgtccctcacaccttttcctattctacttttttttcctttttttaaaaatattatgtactatatttttagtctcaaacacactatatattatatatatttaatttttttatatatataaatataaatgttttaaaaagtaaaaaaatttgt

SEQ ID NO: 431719 - DNA, 2305 bp, Homo sapiens
ggcgccgtcggagggagagtagacgtcaggcggagggagggaggcaggcaggcagggaggcagggagggagagagggaaggaagagaaggggagagaaagggggagcaaagaccgaaagagacccagagagatacagcttgagaggagaaataattaaagggggagggcgaccaggaggagaaaaaggtctgggaggaaagagagataaagagaatcggagggcagggaaatgagtttgtgcgcgtgagtgtgcgcgcgcgcgtgtgtgtgtgcaggggcgggcgcgggcgggccggggggcgggctcccgggctcccgggctcccctcctccccagcccgctcctctggctcgctcgccaactccgggccccagccgcgggcgggcgcacggcgggcggacagcatgctgagcctcctcgtctggatcctcactctctccgatactttctcccaagggacccagacccgcttcagccaggagccagctgaccagacggtggtggctggacagcgggccgtgctcccctgtgtgctgctcaactactctggaattgtgcaatggaccaaggacgggctggccctgggcatgggccagggcctcaaagcctggccacggtaccgggttgtgggctccgcagacgctgggcagtacaacctggagatcacagatgctgagctctctgacgacgcctcttacgagtgccaggccacggaggccgccctgcgctctcggcgggccaaactcaccgtgctcatccccccagaggacaccaggattgacggaggccctgtgattctactgcaggcaggcaccccccacaacctcacatgccgggccttcaatgcgaagcctgctgccaccatcatctggttccgggacgggacgcagcaggagggcgctgtggccagcacggaattgctgaaggatgggaagagggagaccaccgtgagccaactgcttattaaccccacggacctggacatagggcgtgtcttcacttgccgaagcatgaacgaagccatccctagtggcaaggagacttccatcgagctggatgtgcaccaccctcctacagtgaccctgtccattgagccacagacggtgcaggagggtgagcgtgttgtctttacctgccaggccacagccaaccccgagatcttgggctacaggtgggccaaagggggtttcttgattgaagacgcccacgagagtcgctatgagacaaatgtggattattcctttttcacggagcctgtgtcttgtgaggttcacaacaaagtgggaagcaccaatgtcagcactttagtaaatgtccactttgctccccggattgtagttgaccccaaacccacaaccacagacattggctctgatgtgacccttacctgtgtctgggttgggaatccccccctcactctcacctggaccaaaaaggactcaaatatggggcccaggcctcctggctccccacccgaggctgctctctctgcccaggtcctgagtaacagcaaccagctgctgctgaagtcggtgactcaggcagacgctggcacctacacctgccgggccatcgtgcctcgaatcggagtggctgagcgggaggtgccgctctatgtgaacgggccccccatcatctccagtgaggcagtgcagtatgctgtgaggggtgacggtggcaaggtggagtgtttcattgggagcacaccacccccagaccgcatagcatgggcctggaaggagaacttcttggaggtggggaccctggaacgctatacagtggagaggaccaactcaggcagtggggtgctatccacgctcaccatcaacaatgtcatggaggccgactttcagactcactacaactgcaccgcctggaacagcttcgggccaggcacagccatcatccagctggaagagcgaggtgactggtagtgctgcctgccagctggggtgcagagcagcctgaggattctgctccttcttttctccaggggcagggctcagctgctccccttcccttgggctctgctctgagggaggggacacacagagggatgtcctggctgagaggtcaggagtgaaggggtttggggctactcccctctgattcctgcctattgtaagagtctgtgcatcagagggaaagaactctctggggccttccctccagaacctggcctccatgctcaactggggaaatgccctcacttcgttaaagtgtactgagcatttgctatgtgccaggctctgccccaggggctgcagaaagagctgtgaacaagacacagtccctgacctcaag

SEQ ID NO: 431720 - DNA, 7880 bp, Homo sapiens
  misc_feature (2778)..(2778): n is a, c, g, or t
  misc_feature (2802)..(2802): n is a, c, g, or t
  misc_feature (2876)..(2876): n is a, c, g, or t
ggcgccgtcggagggagagtagacgtcaggcggagggagggaggcaggcaggcagggaggcagggagggagagagggaaggaagagaaggggagagaaagggggagcaaagaccgaaagagacccagagagatacagcttgagaggagaaataattaaagggggagggcgaccaggaggagaaaaaggtctgggaggaaagagagataaagagaatcggagggcagggaaatgagtttgtgcgcgtgagtgtgcgcgcgcgcgtgtgtgtgtgcaggggcgggcgcgggcgggccggggggcgggctcccgggctcccgggctcccctcctccccagcccgctcctctggctcgctcgccaactccgggccccagccgcgggcgggcgcacggcgggcggacagcatgctgagcctcctcgtctggatcctcactctctccgatactttctcccaagggacccagacccgcttcagccaggagccagctgaccagacggtggtggctggacagcgggccgtgctcccctgtgtgctgctcaactactctggaattgtgcaatggaccaaggacgggctggccctgggcatgggccagggcctcaaagcctggccacggtaccgggttgtgggctccgcagacgctgggcagtacaacctggagatcacagatgctgagctctctgacgacgcctcttacgagtgccaggccacggaggccgccctgcgctctcggcgggccaaactcaccgtgctcatccccccagaggacaccaggattgacggaggccctgtgattctactgcaggcaggcaccccccacaacctcacatgccgggccttcaatgcgaagcctgctgccaccatcatctggttccgggacgggacgcagcaggagggcgctgtggccagcacggaattgctgaaggatgggaagagggagaccaccgtgagccaactgcttattaaccccacggacctggacatagggcgtgtcttcacttgccgaagcatgaacgaagccatccctagtggcaaggagacttccatcgagctggatgtgcaccaccctcctacagtgaccctgtccattgagccacagacggtgcaggagggtgagcgtgttgtctttacctgccaggccacagccaaccccgagatcttgggctacaggtgggccaaagggggtttcttgattgaagacgcccacgagagtcgctatgagacaaatgtggattattcctttttcacggagcctgtgtcttgtgaggttcacaacaaagtgggaagcaccaatgtcagcactttagtaaatgtccactttgctccccggattgtagttgaccccaaacccacaaccacagacattggctctgatgtgacccttacctgtgtctgggttgggaatccccccctcactctcacctggaccaaaaaggactcaaatatggggcccaggcctcctggctccccacccgaggctgctctctctgcccaggtcctgagtaacagcaaccagctgctgctgaagtcggtgactcaggcagacgctggcacctacacctgccgggccatcgtgcctcgaatcggagtggctgagcgggaggtgccgctctatgtgaacgggccccccatcatctccagtgaggcagtgcagtatgctgtgaggggtgacggtggcaaggtggagtgtttcattgggagcacaccacccccagaccgcatagcatgggcctggaaggagaacttcttggaggtggggaccctggaacgctatacagtggagaggaccaactcaggcagtggggtgctatccacgctcaccatcaacaatgtcatggaggccgactttcagactcactacaactgcaccgcctggaacagcttcgggccaggcacagccatcatccagctggaagagcgagaggtgttacctgtgggcatcatagctggggccaccatcggcgcgagcatcctgctcatcttcttcttcatcgccttggtattcttcctctaccggcgccgcaaaggcagtcgcaaagacgtgaccctgaggaagctggatatcaaggtggagacagtgaaccgagagccacttacgatgcattctgaccgggaggatgacaccgccagcgtctccacagcaacccgggtcatgaaggccatctactcgtcgtttaaggatgatgtggatctgaagcaggacctgcgctgcgacaccatcgacacccgggaggagtatgagatgaaggaccccaccaatggctactacaacgtgcgtgcccatgaagaccgcccgtcttccagggcagtgctctatgctgactaccgtgcccctggccctgcccgcttcgacggccgcccctcatcccgtctctcccactccagcggctatgcccagctcaacacctatagccggggccctgcctctgactatggccctgagcccacaccccctggccctgctgccccagctggcactgacacaaccagccagctgtcctacgagaactatgagaagttcaactcccatcccttccctggggcagctgggtaccccacctaccgactgggctacccccaggccccaccctctggcctggagcggaccccatatgaggcgtatgaccccattggcaagtacgccacagccactcgattctcctacacctcccagcactcggactacggccagcgattccagcagcgcatgcagactcacgtgtaggggccagagcctggctggggcatctctgcggggcagaggagaaggctttcncagctgttccctgatattcagggncattgctcattgctcccttctcggaccagccttcttcctcccaccatggcaggtggggagcaggtctcccaganacaccccgtcccgaggatggtgctctgtgcatgccccagcctcctgggcctgcccttccctcttcttcgggaggatgtgtctcttctgacctgcactcttgcctgaccctagaatggggacagggaaagtgaaggttagggaaagcagaggggggcactttttagcattccctttctatcccacccctctgatctcccataagtggaaatgggggtacccagggatgggcaggctttggcctagggacatgaagtatgggagtgggtggctgtggcacagacaggtggaaaacgggatagcctggccagtccctctgttgtctgcattcgtgccctgggtgcctctctccttcctcagggtactgcagaagggagcgaacagggtactgttcgctcttgtctacagaacagccctggcactgcattcaaatccagtcttcattcagctgggatcaaaatgccagtcaccttggctacccactgtggacagctgtctgtcagcatgcagagggatccaggaatccccccggcagcacggcccgctttccttctcctccatgctgggccagccagataagtcagggtcctggtggagaaagaaaggctaggaccatgtcctcattgacccagatactgctgtgtgctgcacagcagtgaaccaacactagagggagccacacaagcctcctctccccagtctgccccacttcctggctttaactcttgagctggtttggggagtggtgaggtaggggtgggggtgctgtaggctctttttcaaaaaaaacaaaaaacaatgaaaacctcatttgggaagaaaagctgtagggattcccccacccaaatacaagtcccagtggaaaggaaaggtagtacctattcttctccatggggttcctaacaccctccattactctttcagtctccaagcactttgaatccatttttaaacattcaggttgccagacctgtcacacagtggactctgatagggttacggagggggcctggctctcagtctctactctcctatgtcccatcagttggttggaggccaccttccagggggtatgggagacaggttttggtttttaagtgtcttttttttttttcttggaccaatcagattccttcttccactttcagtgccttgagtgtcaagctttggatgaccgaccctatgtgggcggttgtgtggggagtgggtacttgtgagcctcggacacactgttaagtgttacagtgttaggagagagatgggtgaggggacctggagaggtaaggggcctggaaatggccctgacagagaacttgtgctgaccgggagaaggtggtgcggaagggcaccgcaggcattacacaggccatttctcctcctccatgtgcacgcacatccaacacacaccttccatgtgactgcttctcagccaccactttctgaccaaagagaacaggcgctccaaggagaacctgtacccctgccccagcctcgccttcctaaaaagcagtgtctggagttggctgtttcccgcctccccagctgcatgtccagcccagtgggagacagggcctctggtgcagttcccaaaatgttcctcgccctttctccgtggtcaccattcataattcatgttcgctttaatgagttacatgcttatcagccacaggccattaccacccttatggatgggtctggggggcgacattcctggccaaccccttgtaggaaggaccagataatacccaggaagcaagtagctctaattttaacttcgcaggaagtctgtgcatcctccttcatttcagcagggaaaactcctgtggagtgggccctatctggggcatttacaggcttccagctgtattccatccctggaagctgatacctttctatagagtccttttatgagagctcagtgggaaggtctgtcaagaaattcaggttcttgtacagacaaattcatgcaaatttctattattttcacaaaaaccagaaaccatgggggaatccaaagacttgaagtctaaagatggtggcttttaaaacatgcatattccaaaaagaattcatttttgttttgggtttggctagattctcttatttatccccttttagcttaagtattagtttcattctactgaaatgatggagagagggcctaaggttactaggtaattgagctgatggtgcagggagaattgttgagaaaggaagcctagtttccagaagcctgacacagagctacttcactgtcctctactccttaacaaggtaactggagcctcttgggtgtcaaacaagcaccctggaaggcacagggaagcatcagcaaccaaggtagtctctgccctctgtaacttacgtgttggtgcatcagaatctgaattggaacctacctgatgggcccagtggaatagcttttctggggagtggaaggcgtccttgatcacagagctttgctgtcgaatcctggagtcctgcaacatggtgatgcctcagtagttggtgatcctgatcacctttggtggcttgttttagtggaaagagcaagggactaaaggtcaggagacccaggacccagtcctgaagctgcaaaggttagatctcggcctaactttctgttcattgcccccaatttgtctggcctgtaaaatgaagggggagggttgcataaacctaaaactattctggttttgttatacccatagggttgggggtagggatgggactgcccattgctggcaaggaactgggaacagtagcaagcatggtgagggctggagagctggctgggggggttctctcctgttcaaagaagctttcaccatgggcttcattatcttgtcagaagtgaattagtttccaccagggacccctttatcccaaacagcaacacaaaatacaccctaaacctcagagtaaaattgatgtggggctatcctttggctatcgggtcatctgtgctgctccccactcatttctgatgggtttgcaaaggtgccttttgccagggcaggacatagtatgcacatagggatattgttatgtgcctaggtttcaggcactccttctgtaggggaaaatgggaggagccttcctccaccctgatccttaggaacattcctctggcccagggacagcttgttcttctcaccaaacaggtgaagcctgcagtccaaggtgcctggagccagaggtcggggagtaagcacagctgcccctgcctgagaaggagcagcttgcaaggggagccggtggagggaaaggggtacaacagctttggaatacattctggatcttgaggaggatcttgtgattttggctgagccacggtcacttccctcgtgaaggacccgccctatatcctaaattctggatccctcaaagtccagccacagagtttgcatgaagcaaaaagcctagtaagtgagaaaggaaaggggccagggatgggagcagtgctgtgctgttatcactgtcttgcttggaatgaaaacatctgagcaccctgtcttcaagcggtacgctctccccttattccagcagggctactttcctcttcactctgatgaggggagctttatctgctttcaaaatggagcacgtcgcactggagtttcgtgccctctcgttaacctgtcaggagccacagggctccataaaacggaatcagtgtctcaatatacatgacctatgttcatagcaatgttcagccatttgggtttgaagaaaaccacattaaagccaagacccgtttggagcgaactgccttgttctttgctgtgtggaaggttctgtccctactgctgaactccagttcctccccaagcaccctggcctcagaaatcctggcttccccaagttagtgctgtctgacctgagccaggccactgcttggtgcctctacaggccactgtgcatgttgagaattgcccaaaaggattagtgaagctcctgaccctggcgaggccataatgaacactgaagtgcacaggccaagggatgtaattgaaaggcatttatttttgtgaagatgctataaaattagcatttaaatatcccattcccttctcttggcctcctcctatccccctatggtatttctcctcctctcctcaaggccaggctttttgtgaaaggcattggctcatctttgtcagcgtggtcctgacgttcacctctgggctgctggagaggactgagagatgtgtggtttggtaggaagggggtgtgtgtgggggttagtggggaatcccatttttttgcatcactgtgaggtagcttcaggccctgtccctggagaaataattgctgcgcagaagtcacaggccatactgggcagttctggtacaaacctgcccttattaataataacaataataataataactccatttgcatagaactgtcactcattcctgccagtctgctgtccctaccctggttttttgctggccccaaccactggccttgttgagtatcgatgggccctgagctcttctgtttgcttttggagctcttcagatgctgtcccccctgagaataccctaactctggggaaagagcagccaaaatcccaatacagtaaaactccacacaatcttgttagcaacagtgacccagaaaattttgagaagtccaatttcaccagaagaggcccagggctccctgtggtcacattttctacccagccattcttggcattgcaacctccatttctagctccagttgaattttctccacccagaccccaaaaataaatggatccatgatgataattaagagaagagaaaaaaagatattatttttgttaggacaaaccattgtaggattttagcaatgtgtatctgtgtgtccctcacaccttttcctattctacttttttttcctttttttaaaaatattatgtactatatttttagtctcaaacacactatatattatatatatttaatttttttatatatataaatataaatgttttaaaaagtaaaaaaatttgt

SEQ ID NO: 431721 - DNA, 6429 bp, Homo sapiens
  misc_feature (1327)..(1327): n is a, c, g, or t
  misc_feature (1351)..(1351): n is a, c, g, or t
  misc_feature (1425)..(1425): n is a, c, g, or t
actgttggagccctgagtagataggtgaacattcggcagtcacagtggtattatggatggcacagtggtgaaagatgtcggaacacgggtggcagattggagagtttggagacagctgacctcaaagaagagcgaggggccaagcatcatagtcaggtgggctgaaggacagggatcgacagacaaccaagaccaggggcaaactcctgccccagctgcagggatgagacatgaccatgatctccattctgatggagctggagcacagaccaaaatccaaccacaatgcagaccttcctctctaatccaaccttgacttaaacctaacactgtccccaggctcagtcaaaacttagccctgtacacaagccaaggttgcctctgtggctgtggcctagcctttagccagcactgagcttagctcccagtataactccagcctcacccctccacctttccttccccatcgaaagaggtgttacctgtgggcatcatagctggggccaccatcggcgcgagcatcctgctcatcttcttcttcatcgccttggtattcttcctctaccggcgccgcaaaggcagtcgcaaagacgtgaccctgaggaagctggatatcaaggtggagacagtgaaccgagagccacttacgatgcattctgaccgggaggatgacaccgccagcgtctccacagcaacccgggtcatgaaggccatctactcgtcgtttaaggatgatgtggatctgaagcaggacctgcgctgcgacaccatcgacacccgggaggagtatgagatgaaggaccccaccaatggctactacaacgtgcgtgcccatgaagaccgcccgtcttccagggcagtgctctatgctgactaccgtgcccctggccctgcccgcttcgacggccgcccctcatcccgtctctcccactccagcggctatgcccagctcaacacctatagccggggccctgcctctgactatggccctgagcccacaccccctggccctgctgccccagctggcactgacacaaccagccagctgtcctacgagaactatgagaagttcaactcccatcccttccctggggcagctgggtaccccacctaccgactgggctacccccaggccccaccctctggcctggagcggaccccatatgaggcgtatgaccccattggcaagtacgccacagccactcgattctcctacacctcccagcactcggactacggccagcgattccagcagcgcatgcagactcacgtgtaggggccagagcctggctggggcatctctgcggggcagaggagaaggctttcncagctgttccctgatattcagggncattgctcattgctcccttctcggaccagccttcttcctcccaccatggcaggtggggagcaggtctcccaganacaccccgtcccgaggatggtgctctgtgcatgccccagcctcctgggcctgcccttccctcttcttcgggaggatgtgtctcttctgacctgcactcttgcctgaccctagaatggggacagggaaagtgaaggttagggaaagcagaggggggcactttttagcattccctttctatcccacccctctgatctcccataagtggaaatgggggtacccagggatgggcaggctttggcctagggacatgaagtatgggagtgggtggctgtggcacagacaggtggaaaacgggatagcctggccagtccctctgttgtctgcattcgtgccctgggtgcctctctccttcctcagggtactgcagaagggagcgaacagggtactgttcgctcttgtctacagaacagccctggcactgcattcaaatccagtcttcattcagctgggatcaaaatgccagtcaccttggctacccactgtggacagctgtctgtcagcatgcagagggatccaggaatccccccggcagcacggcccgctttccttctcctccatgctgggccagccagataagtcagggtcctggtggagaaagaaaggctaggaccatgtcctcattgacccagatactgctgtgtgctgcacagcagtgaaccaacactagagggagccacacaagcctcctctccccagtctgccccacttcctggctttaactcttgagctggtttggggagtggtgaggtaggggtgggggtgctgtaggctctttttcaaaaaaaacaaaaaacaatgaaaacctcatttgggaagaaaagctgtagggattcccccacccaaatacaagtcccagtggaaaggaaaggtagtacctattcttctccatggggttcctaacaccctccattactctttcagtctccaagcactttgaatccatttttaaacattcaggttgccagacctgtcacacagtggactctgatagggttacggagggggcctggctctcagtctctactctcctatgtcccatcagttggttggaggccaccttccagggggtatgggagacaggttttggtttttaagtgtcttttttttttttcttggaccaatcagattccttcttccactttcagtgccttgagtgtcaagctttggatgaccgaccctatgtgggcggttgtgtggggagtgggtacttgtgagcctcggacacactgttaagtgttacagtgttaggagagagatgggtgaggggacctggagaggtaaggggcctggaaatggccctgacagagaacttgtgctgaccgggagaaggtggtgcggaagggcaccgcaggcattacacaggccatttctcctcctccatgtgcacgcacatccaacacacaccttccatgtgactgcttctcagccaccactttctgaccaaagagaacaggcgctccaaggagaacctgtacccctgccccagcctcgccttcctaaaaagcagtgtctggagttggctgtttcccgcctccccagctgcatgtccagcccagtgggagacagggcctctggtgcagttcccaaaatgttcctcgccctttctccgtggtcaccattcataattcatgttcgctttaatgagttacatgcttatcagccacaggccattaccacccttatggatgggtctggggggcgacattcctggccaaccccttgtaggaaggaccagataatacccaggaagcaagtagctctaattttaacttcgcaggaagtctgtgcatcctccttcatttcagcagggaaaactcctgtggagtgggccctatctggggcatttacaggcttccagctgtattccatccctggaagctgatacctttctatagagtccttttatgagagctcagtgggaaggtctgtcaagaaattcaggttcttgtacagacaaattcatgcaaatttctattattttcacaaaaaccagaaaccatgggggaatccaaagacttgaagtctaaagatggtggcttttaaaacatgcatattccaaaaagaattcatttttgttttgggtttggctagattctcttatttatccccttttagcttaagtattagtttcattctactgaaatgatggagagagggcctaaggttactaggtaattgagctgatggtgcagggagaattgttgagaaaggaagcctagtttccagaagcctgacacagagctacttcactgtcctctactccttaacaaggtaactggagcctcttgggtgtcaaacaagcaccctggaaggcacagggaagcatcagcaaccaaggtagtctctgccctctgtaacttacgtgttggtgcatcagaatctgaattggaacctacctgatgggcccagtggaatagcttttctggggagtggaaggcgtccttgatcacagagctttgctgtcgaatcctggagtcctgcaacatggtgatgcctcagtagttggtgatcctgatcacctttggtggcttgttttagtggaaagagcaagggactaaaggtcaggagacccaggacccagtcctgaagctgcaaaggttagatctcggcctaactttctgttcattgcccccaatttgtctggcctgtaaaatgaagggggagggttgcataaacctaaaactattctggttttgttatacccatagggttgggggtagggatgggactgcccattgctggcaaggaactgggaacagtagcaagcatggtgagggctggagagctggctgggggggttctctcctgttcaaagaagctttcaccatgggcttcattatcttgtcagaagtgaattagtttccaccagggacccctttatcccaaacagcaacacaaaatacaccctaaacctcagagtaaaattgatgtggggctatcctttggctatcgggtcatctgtgctgctccccactcatttctgatgggtttgcaaaggtgccttttgccagggcaggacatagtatgcacatagggatattgttatgtgcctaggtttcaggcactccttctgtaggggaaaatgggaggagccttcctccaccctgatccttaggaacattcctctggcccagggacagcttgttcttctcaccaaacaggtgaagcctgcagtccaaggtgcctggagccagaggtcggggagtaagcacagctgcccctgcctgagaaggagcagcttgcaaggggagccggtggagggaaaggggtacaacagctttggaatacattctggatcttgaggaggatcttgtgattttggctgagccacggtcacttccctcgtgaaggacccgccctatatcctaaattctggatccctcaaagtccagccacagagtttgcatgaagcaaaaagcctagtaagtgagaaaggaaaggggccagggatgggagcagtgctgtgctgttatcactgtcttgcttggaatgaaaacatctgagcaccctgtcttcaagcggtacgctctccccttattccagcagggctactttcctcttcactctgatgaggggagctttatctgctttcaaaatggagcacgtcgcactggagtttcgtgccctctcgttaacctgtcaggagccacagggctccataaaacggaatcagtgtctcaatatacatgacctatgttcatagcaatgttcagccatttgggtttgaagaaaaccacattaaagccaagacccgtttggagcgaactgccttgttctttgctgtgtggaaggttctgtccctactgctgaactccagttcctccccaagcaccctggcctcagaaatcctggcttccccaagttagtgctgtctgacctgagccaggccactgcttggtgcctctacaggccactgtgcatgttgagaattgcccaaaaggattagtgaagctcctgaccctggcgaggccataatgaacactgaagtgcacaggccaagggatgtaattgaaaggcatttatttttgtgaagatgctataaaattagcatttaaatatcccattcccttctcttggcctcctcctatccccctatggtatttctcctcctctcctcaaggccaggctttttgtgaaaggcattggctcatctttgtcagcgtggtcctgacgttcacctctgggctgctggagaggactgagagatgtgtggtttggtaggaagggggtgtgtgtgggggttagtggggaatcccatttttttgcatcactgtgaggtagcttcaggccctgtccctggagaaataattgctgcgcagaagtcacaggccatactgggcagttctggtacaaacctgcccttattaataataacaataataataataactccatttgcatagaactgtcactcattcctgccagtctgctgtccctaccctggttttttgctggccccaaccactggccttgttgagtatcgatgggccctgagctcttctgtttgcttttggagctcttcagatgctgtcccccctgagaataccctaactctggggaaagagcagccaaaatcccaatacagtaaaactccacacaatcttgttagcaacagtgacccagaaaattttgagaagtccaatttcaccagaagaggcccagggctccctgtggtcacattttctacccagccattcttggcattgcaacctccatttctagctccagttgaattttctccacccagaccccaaaaataaatggatccatgatgataattaagagaagagaaaaaaagatattatttttgttaggacaaaccattgtaggattttagcaatgtgtatctgtgtgtccctcacaccttttcctattctacttttttttcctttttttaaaaatattatgtactatatttttagtctcaaacacactatatattatatatatttaatttttttatatatataaatataaatgttttaaaaagtaaaaaaatttgt

SEQ ID NO: 431722 - DNA, 2461 bp, Homo sapiens
cgcgaattcaaccgcgggggggtcctcctgttcaaagaagctttcaccatgggcttcattatcttgtcagaagtgaattagtttccaccagggacccctttatcccaaacagcaacacaaaatacaccctaaacctaaaactattctggttttgttatacccatagggttgggggtagggatgggactgcccattgctggcaaggaactgggaacagtagcaagcatggtgagggctggagagctggctgggggggttctctcctgttcaaagaagctttcaccatgggcttcattatcttgtcagaagtgaattagtttccaccagggacccctttatcccaaacagcaacacaaaatacaccctaaacctcagagtaaaattgatgtggggctatcctttggctatcgggtcatctgtgctgctccccactcatttctgatgggtttgcaaaggtgccttttgccagggcaggacatagtatgcacatagggatattgttatgtgcctaggtttcaggcactccttctgtaggggaaaatgggaggagccttcctccaccctgatccttaggaacattcctctggcccagggacagcttgttcttctcaccaaacaggtgaagcctgcagtccaaggtgcctggagccagaggtcggggagtaagcacagctgcccctgcctgagaaggagcagcttgcaaggggagccggtggagggaaaggggtacaacagctttggaatacattctggatcttgaggaggatcttgtgattttggctgagccacggtcacttccctcgtgaaggacccgccctatatcctaaattctggatccctcaaagtccagccacagagtttgcatgaagcaaaaagcctagtaagtgagaaaggaaaggggccagggatgggagcagtgctgtgctgttatcactgtcttgcttggaatgaaaacatctgagcaccctgtcttcaagcggtacgctctccccttattccagcagggctactttcctcttcactctgatgaggggagctttatctgctttcaaaatggagcacgtcgcactggagtttcgtgccctctcgttaacctgtcaggagccacagggctccataaaacggaatcagtgtctcaatatacatgacctatgttcatagcaatgttcagccatttgggtttgaagaaaaccacattaaagccaagacccgtttggagcgaactgccttgttctttgctgtgtggaaggttctgtccctactgctgaactccagttcctccccaagcaccctggcctcagaaatcctggcttccccaagttagtgctgtctgacctgagccaggccactgcttggtgcctctacaggccactgtgcatgttgagaattgcccaaaaggattagtgaagctcctgaccctggcgaggccataatgaacactgaagtgcacaggccaagggatgtaattgaaaggcatttatttttgtgaagatgctataaaattagcatttaaatatcccattcccttctcttggcctcctcctatccccctatggtatttctcctcctctcctcaaggccaggctttttgtgaaaggcattggctcatctttgtcagcgtggtcctgacgttcacctctgggctgctggagaggactgagagatgtgtggtttggtaggaagggggtgtgtgtgggggttagtggggaatcccatttttttgcatcactgtgaggtagcttcaggccctgtccctggagaaataattgctgcgcagaagtcacaggccatactgggcagttctggtacaaacctgcccttattaataataacaataataataataactccatttgcatagaactgtcactcattcctgccagtctgctgtccctaccctggttttttgctggccccaaccactggccttgttgagtatcgatgggccctgagctcttctgtttgcttttggagctcttcagatgctgtcccccctgagaataccctaactctggggaaagagcagccaaaatcccaatacagtaaaactccacacaatcttgttagcaacagtgacccagaaaattttgagaagtccaatttcaccagaagaggcccagggctccctgtggtcacattttctacccagccattcttggcattgcaacctccatttctagctccagttgaattttctccacccagaccccaaaaataaatggatccatgatgataattaagagaagagaaaaaaagatattatttttgttaggacaaaccattgtaggattttagcaatgtgtatctgtgtgtccctcacaccttttcctattctacttttttttcctttttttaaaaatattatgtactatatttttagtctcaaacacactatatattatatatatttaatttttttatatatataaatataaatgttttaaaaagtaaaaaaatttgt

SEQ ID NO: 431723 - DNA, 2223 bp, Homo sapiens
ggcgccgtcggagggagagtagacgtcaggcggagggagggaggcaggcaggcagggaggcagggagggagagagggaaggaagagaaggggagagaaagggggagcaaagaccgaaagagacccagagagatacagcttgagaggagaaataattaaagggggagggcgaccaggaggagaaaaaggtctgggaggaaagagagataaagagaatcggagggcagggaaatgagtttgtgcgcgtgagtgtgcgcgcgcgcgtgtgtgtgtgcaggggcgggcgcgggcgggccggggggcgggctcccgggctcccgggctcccctcctccccagcccgctcctctggctcgctcgccaactccgggccccagccgcgggcgggcgcacggcgggcggacagcatgctgagcctcctcgtctggatcctcactctctccgatactttctcccaagggacccagacccgcttcagccaggagccagctgaccagacggtggtggctggacagcgggccgtgctcccctgtgtgctgctcaactactctggaattgtgcaatggaccaaggacgggctggccctgggcatgggccagggcctcaaagcctggccacggtaccgggttgtgggctccgcagacgctgggcagtacaacctggagatcacagatgctgagctctctgacgacgcctcttacgagtgccaggccacggaggccgccctgcgctctcggcgggccaaactcaccgtgctcatccccccagaggacaccaggattgacggaggccctgtgattctactgcaggcaggcaccccccacaacctcacatgccgggccttcaatgcgaagcctgctgccaccatcatctggttccgggacgggacgcagcaggagggcgctgtggccagcacggaattgctgaaggatgggaagagggagaccaccgtgagccaactgcttattaaccccacggacctggacatagggcgtgtcttcacttgccgaagcatgaacgaagccatccctagtggcaaggagacttccatcgagctggatgtgcaccaccctcctacagtgaccctgtccattgagccacagacggtgcaggagggtgagcgtgttgtctttacctgccaggccacagccaaccccgagatcttgggctacaggtgggccaaagggggtttcttgattgaagacgcccacgagagtcgctatgagacaaatgtggattattcctttttcacggagcctgtgtcttgtgaggttcacaacaaagtgggaagcaccaatgtcagcactttagtaaatgtccactttgctccccggattgtagttgaccccaaacccacaaccacagacattggctctgatgtgacccttacctgtgtctgggttgggaatccccccctcactctcacctggaccaaaaaggactcaaatatggtcctgagtaacagcaaccagctgctgctgaagtcggtgactcaggcagacgctggcacctacacctgccgggccatcgtgcctcgaatcggagtggctgagcgggaggtgccgctctatgtgaacgggccccccatcatctccagtgaggcagtgcagtatgctgtgaggggtgacggtggcaaggtggagtgtttcattgggagcacaccacccccagaccgcatagcatgggcctggaaggagaacttcttggaggtggggaccctggaacgctatacagtggagaggaccaactcaggcagtggggtgctatccacgctcaccatcaacaatgtcatggaggccgactttcagactcactacaactgcaccgcctggaacagcttcgggccaggcacagccatcatccagctggaagagcgagaggtgttacctgtgggcatcatagctggggccaccatcggcgcgagcatcctgctcatcttcttcttcatcgccttggtattcttcctctaccggcgccgcaaaggcagtcgcaaagacgtgaccctgaggaagctggatatcaaggtggagacagtgaaccgagagccacttacgatgcattctgaccgggaggatgacaccgccagcgtctccacagcaacccgggtcatgaaggccatctactcgtcgtttaaggatgatgtggatctgaagcaggacctgcgctgcgacaccatcgagcggccgcgaattcgcggccgcttgaatacatcttatagtgattaa

SEQ ID NO: 431724 - DNA, 1608 bp, Homo sapiens
  misc_feature (2)..(3): n is a, c, g, or t
  misc_feature (7)..(7): n is a, c, g, or t
  misc_feature (10)..(10): n is a, c, g, or t
  misc_feature (13)..(13): n is a, c, g, or t
  misc_feature (17)..(17): n is a, c, g, or t
tnnccgnccnggnaggngcttaacggtcctctggtctctctctcccctcagctgagtcccttccctgtctttcactcttctggcatcggtggttttacttcttcgattgaaccctgcttcctcgacccccctgggaggccgccttcttcaggcgcctcccttctctccacgagctcgctctgacagctgaggaactggcaagatcctgctacccagagggtgaatgggtatctttcccggaataatcctaatttttctaagggtgaagtttgcaacggcggccgtgattgtaagcggacaccagaaaagtaccactgtaagtcatgagatgtctggtctgaattggaaaccctttgtatatggcggccttgcctctatcgtggctgagtttgggactttccctgtggaccttaccaaaacacgacttcaggttcaaggccaaagcattgatgcccgtttcaaagagataaaatatagagggatgttccatgcgctgtttcgcatctgtaaagaggaaggtgtattggctctctattcaggaattgctcctgcgttgctaagacaagcatcatatggcaccattaaaattgggatttaccaaagcttgaagcgcttattcgtagaacgtttagaagatgaaactcttttaattaatatgatctgtggggtagtgtcaggagtgatatcttccactatagccaatcccaccgatgttctaaagattcgaatgcaggctcaaggaagcttgttccaagggagcatgattggaagctttatcgatatataccaacaagaaggcaccaggggtctgtggaggggtgtggttccaactgctcagcgtgctgccatcgttgtaggagtagagctaccagtctatgatattactaagaagcatttaatattgtcaggaatgatgggcgatacaattttaactcacttcgtttccagctttacatgtggtttggctggggctctggcctccaacccggttgatgtggttcgaactcgcatgatgaaccagagggcaatcgtgggacatgtggatctctataagggcactgttgatggtattttaaagatgtggaaacatgagggcttttttgcactctataaaggattttggccaaactggcttcggcttggaccctggaacatcattttttttattacatacgagcagctaaagaggcttcaaatctaagaactgaattatatgtgagcccagccctgccagcctttctactcctttgcccttttcccgtgttctaatgtattttgacaatgttgtaagtgtttaccaagccgttggtctcctaagggcctcctgatggaagaacagtggggtggttcaaagttatttctatgtttgtgttaccatgttaacttttccccgagagaaagtgttaacattgagactctggccccagattggtatcttctatgaagatggatactgatgggtgacattgaaaacggcctgctttccaaatgtggttaaatgtaattggttagccccagacttgggctagagcagaaggcataggccagggtggttattgctatatgtgttacagacctcggttctcattaaagtatttattggcagaa

SEQ ID NO: 431725 - DNA, 441 bp, Homo sapiens
cagaggaataaatagaattggagattttttcacaggagcatagctactttattttttattgtagtaaaaagtagacataacataaaatttaccatcttaaccatttttgatggttcagtagtgttaattaagtacattcacattgttgtacaactgatctccagaactctttaggtcttatcaaactgaaactctatacccatgaagcaactccccatttctccttcccctagcccctggcaacccccattctcttttgtgtctctatcaatttgactattatagggtacttgggaacattgtctaatacagcagcctatcagaggtctatttgatttacatttatccatacatagcttctatatctaataagcacatctattatttgctttggttaattttgtttgagaaagcaaacttttctcagtgggaatcagaaaa

SEQ ID NO: 431726 - DNA, 1631 bp, Homo sapiens
tccgggttggcgctgcagtggcgtttccgactgtgggagcctcagcttcccagtcgtccgatgagcccgagcagctgagtcccttccctgtctttcactcttctggcatcggtggttttacttcttcgattgaaccctgcttcctcgacccccctgggaggccgccttcttcaggcgcctcccttctctccacgagctcgctctgacagctgaggaactggcaagatcctgctacccagagggtgaatgggtatctttcccggaataatcctaatttttctaagggtgaagtttgcaacggcggccgtgattgtaagcggacaccagaaaagtaccactgtaagtcatgagatgtctggtctgaattggaaaccctttgtatatggcggccttgcctctatcgtggctgagtttgggactttccctgtggaccttaccaaaacacgacttcaggttcaaggccaaagcattgatgcccgtttcaaagagataaaatatagagggatgttccatgcgctgtttcgcatctgtaaagaggaaggtgtattggctctctattcaggaattgctcctgcgttgctaagacaagcatcatatggcaccattaaaattgggatttaccaaagcttgaagcgcttattcgtagaacgtttagaagatgaaactcttttaattaatatgatctgtggggtagtgtcaggagtgatatcttccactatagccaatcccaccgatgttctaaagattcgaatgcaggctcaaggaagcttgttccaagggagcatgattggaagctttatcgatatataccaacaagaaggcaccaggggtctgtggaggggtgtggttccaactgctcagcgtgctgccatcgttgtaggagtagagctaccagtctatgatattactaagaagcatttaatattgtcaggaatgatgggcgatacaattttaactcacttcgtttccagctttacatgtggtttggctggggctctggcctccaacccggttgatgtggttcgaactcgcatgatgaaccagagggcaatcgtgggacatgtggatctctataagggcactgttgatggtattttaaagatgtggaaacatgagggcttttttgcactctataaaggattttggccaaactggcttcggcttggaccctggaacatcattttttttattacatacgagcagctaaagaggcttcaaatctaagaactgaattatatgtgagcccagccctgccagcctttctactcctttgcccttttcccgtgttctaatgtattttgacaatgttgtaagtgtttaccaagccgttggtctcctaagggcctcctgatggaagaacagtggggtggttcaaagttatttctatgtttgtgttaccatgttaacttttccccgagagaaagtgttaacattgagactctggccccagattggtatcttctatgaagatggatactgatgggtgacattgaaaacggcctgctttccaaatgtggttaaatgtaattggttagccccagacttgggctagagcagaaggcataggccagggtggttattgctatatgtgttacagacctcggttctcattaaagtatttattggcagaa

SEQ ID NO: 431727 - DNA, 1384 bp, Homo sapiens
tccgggttggcgctgcagtggcgtttccgactgtgggagcctcagcttcccagtcgtccgatgagcccgagcagcaccagaaaagtaccactgtaagtcatgagatgtctggtctgaattggaaaccctttgtatatggcggccttgcctctatcgtggctgagtttgggactttccctgtggaccttaccaaaacacgacttcaggttcaaggccaaagcattgatgcccgtttcaaagagataaaatatagagggatgttccatgcgctgtttcgcatctgtaaagaggaaggtgtattggctctctattcaggaattgctcctgcgttgctaagacaagcatcatatggcaccattaaaattgggatttaccaaagcttgaagcgcttattcgtagaacgtttagaagatgaaactcttttaattaatatgatctgtggggtagtgtcaggagtgatatcttccactatagccaatcccaccgatgttctaaagattcgaatgcaggctcaaggaagcttgttccaagggagcatgattggaagctttatcgatatataccaacaagaaggcaccaggggtctgtggaggggtgtggttccaactgctcagcgtgctgccatcgttgtaggagtagagctaccagtctatgatattactaagaagcatttaatattgtcaggaatgatgggcgatacaattttaactcacttcgtttccagctttacatgtggtttggctggggctctggcctccaacccggttgatgtggttcgaactcgcatgatgaaccagagggcaatcgtgggacatgtggatctctataagggcactgttgatggtattttaaagatgtggaaacatgagggcttttttgcactctataaaggattttggccaaactggcttcggcttggaccctggaacatcattttttttattacatacgagcagctaaagaggcttcaaatctaagaactgaattatatgtgagcccagccctgccagcctttctactcctttgcccttttcccgtgttctaatgtattttgacaatgttgtaagtgtttaccaagccgttggtctcctaagggcctcctgatggaagaacagtggggtggttcaaagttatttctatgtttgtgttaccatgttaacttttccccgagagaaagtgttaacattgagactctggccccagattggtatcttctatgaagatggatactgatgggtgacattgaaaacggcctgctttccaaatgtggttaaatgtaattggttagccccagacttgggctagagcagaaggcataggccagggtggttattgctatatgtgttacagacctcggttctcattaaagtatttattggcagaa

SEQ ID NO: 431728 - DNA, 1652 bp, Homo sapiens
  misc_feature (2)..(3): n is a, c, g, or t
  misc_feature (7)..(7): n is a, c, g, or t
  misc_feature (10)..(10): n is a, c, g, or t
  misc_feature (13)..(13): n is a, c, g, or t
  misc_feature (17)..(17): n is a, c, g, or t
tnnccgnccnggnaggngcttaacggtcctctggtctctctctcccctcagctgagtcccttccctgtctttcactcttctggcatcggtggttttacttcttcgattgaaccctgcttcctcgacccccctgggaggccgccttcttcaggcgcctcccttctctccacgagctcgctctgacagctgaggaactggcaagatcctgctacccagagggtgaatgggtatctttcccggaataatcctaatttttctaagggtgaagtttgcaacggcggccgtgattgtaagcggacaccagaaaagtaccactgtaagtcatgagatgtctggtctgaattggaaaccctttgtatatggcggccttgcctctatcgtggctgagtttgggactttccctgtggaccttaccaaaacacgacttcaggttcaaggccaaagcattgatgcccgtttcaaagagataaaatatagagggatgttccatgcgctgtttcgcatctgtaaagaggaaggtgtattggctctctattcaggaattgctcctgcgttgctaagacaagcatcatatggcaccattaaaattgggatttaccaaagcttgaagcgcttattcgtagaacgtttagaaggcctggggctgttggatgtttggggacagctggaaagcctttcgatgaaactcttttaattaatatgatctgtggggtagtgtcaggagtgatatcttccactatagccaatcccaccgatgttctaaagattcgaatgcaggctcaaggaagcttgttccaagggagcatgattggaagctttatcgatatataccaacaagaaggcaccaggggtctgtggaggggtgtggttccaactgctcagcgtgctgccatcgttgtaggagtagagctaccagtctatgatattactaagaagcatttaatattgtcaggaatgatgggcgatacaattttaactcacttcgtttccagctttacatgtggtttggctggggctctggcctccaacccggttgatgtggttcgaactcgcatgatgaaccagagggcaatcgtgggacatgtggatctctataagggcactgttgatggtattttaaagatgtggaaacatgagggcttttttgcactctataaaggattttggccaaactggcttcggcttggaccctggaacatcattttttttattacatacgagcagctaaagaggcttcaaatctaagaactgaattatatgtgagcccagccctgccagcctttctactcctttgcccttttcccgtgttctaatgtattttgacaatgttgtaagtgtttaccaagccgttggtctcctaagggcctcctgatggaagaacagtggggtggttcaaagttatttctatgtttgtgttaccatgttaacttttccccgagagaaagtgttaacattgagactctggccccagattggtatcttctatgaagatggatactgatgggtgacattgaaaacggcctgctttccaaatgtggttaaatgtaattggttagccccagacttgggctagagcagaaggcataggccagggtggttattgctatatgtgttacagacctcggttctcattaaagtatttattggcagaa

SEQ ID NO: 431729 - DNA, 1460 bp, Homo sapiens
  misc_feature (2)..(3): n is a, c, g, or t
  misc_feature (7)..(7): n is a, c, g, or t
  misc_feature (10)..(10): n is a, c, g, or t
  misc_feature (13)..(13): n is a, c, g, or t
  misc_feature (17)..(17): n is a, c, g, or t
tnnccgnccnggnaggngcttaacggtcctctggtctctctctcccctcagctgagtcccttccctgtctttcactcttctggcatcggtggttttacttcttcgattgaaccctgcttcctcgacccccctgggaggccgccttcttcaggcgcctcccttctctccacgagctcgctctgacagctgaggaactggcaagatcctgctacccagagggtgaatgggtatctttcccggaataatcctaatttttctaagggtgaagtttgcaacggcggccgtgattgtaagcggacaccagaaaagtaccactgtaagtcatgagatgtctggtctgaattggaaaccctttgtatatggcggccttgcctctatcgtggctgagtttgaattgctcctgcgttgctaagacaagcatcatatggcaccattaaaattgggatttaccaaagcttgaagcgcttattcgtagaacgtttagaagatgaaactcttttaattaatatgatctgtggggtagtgtcaggagtgatatcttccactatagccaatcccaccgatgttctaaagattcgaatgcaggctcaaggaagcttgttccaagggagcatgattggaagctttatcgatatataccaacaagaaggcaccaggggtctgtggaggggtgtggttccaactgctcagcgtgctgccatcgttgtaggagtagagctaccagtctatgatattactaagaagcatttaatattgtcaggaatgatgggcgatacaattttaactcacttcgtttccagctttacatgtggtttggctggggctctggcctccaacccggttgatgtggttcgaactcgcatgatgaaccagagggcaatcgtgggacatgtggatctctataagggcactgttgatggtattttaaagatgtggaaacatgagggcttttttgcactctataaaggattttggccaaactggcttcggcttggaccctggaacatcattttttttattacatacgagcagctaaagaggcttcaaatctaagaactgaattatatgtgagcccagccctgccagcctttctactcctttgcccttttcccgtgttctaatgtattttgacaatgttgtaagtgtttaccaagccgttggtctcctaagggcctcctgatggaagaacagtggggtggttcaaagttatttctatgtttgtgttaccatgttaacttttccccgagagaaagtgttaacattgagactctggccccagattggtatcttctatgaagatggatactgatgggtgacattgaaaacggcctgctttccaaatgtggttaaatgtaattggttagccccagacttgggctagagcagaaggcataggccagggtggttattgctatatgtgttacagacctcggttctcattaaagtatttattggcagaa

SEQ ID NO: 431730 - DNA, 967 bp, Homo sapiens
gtttgaaaaatttatgtaactaatacatggtgcatgatactttctacttaggaatcttgttaggtttagaaactctcctttaaaaaaaaggctgagtttcagattgaaaattgaagggacagcctttgaatgatgtctctttagaaaaatttcctgtctctttagattgtaacgaaaggccaagtgccaggttttatctgatgggtctgagttatattgtacagtttacgtttggcctaatttctgtttaagtgggcagggagtgaaagtggggtcgatctacttaaacttttcctcttagttccagctttacatgtggtttggctggggctctggcctccaacccggttgatgtggttcgaactcgcatgatgaaccagagggcaatcgtgggacatgtggatctctataagggcactgttgatggtattttaaagatgtggaaacatgagggcttttttgcactctataaaggattttggccaaactggcttcggcttggaccctggaacatcattttttttattacatacgagcagctaaagaggcttcaaatctaagaactgaattatatgtgagcccagccctgccagcctttctactcctttgcccttttcccgtgttctaatgtattttgacaatgttgtaagtgtttaccaagccgttggtctcctaagggcctcctgatggaagaacagtggggtggttcaaagttatttctatgtttgtgttaccatgttaacttttccccgagagaaagtgttaacattgagactctggccccagattggtatcttctatgaagatggatactgatgggtgacattgaaaacggcctgctttccaaatgtggttaaatgtaattggttagccccagacttgggctagagcagaaggcataggccagggtggttattgctatatgtgttacagacctcggttctcattaaagtatttattggcagaa

SEQ ID NO: 431731 - DNA, 1334 bp, Homo sapiens
  misc_feature (2)..(3): n is a, c, g, or t
  misc_feature (7)..(7): n is a, c, g, or t
  misc_feature (10)..(10): n is a, c, g, or t
  misc_feature (13)..(13): n is a, c, g, or t
  misc_feature (17)..(17): n is a, c, g, or t
tnnccgnccnggnaggngcttaacggtcctctggtctctctctcccctcagctgagtcccttccctgtctttcactcttctggcatcggtggttttacttcttcgattgaaccctgcttcctcgacccccctgggaggccgccttcttcaggcgcctcccttctctccacgagctcgctctgacagctgaggaactggcaagatcctgctacccagagggtgaatgggtatctttcccggaataatcctaatttttctaagggtgaagtttgcaacggcggccgtgattgtaagcggacaccagaaaagtaccactgtaagtcatgagatgtctggtctgaattggaaaccctttgtatatggcggccttgcctctatcgtggctgagtttgggactttccctgtggaccttaccaaaacacgacttcaggttcaaggccaaagcattgatgcccgtttcaaagagataaaatatagagggatgttccatgcgctgtttcgcatctgtaaagaggaaggtgtattggctctctattcaggaattgctcctgcgttgctaagacaagcatcatatggcaccattaaaattgggatttaccaaagcttgaagcgcttattcgtagaacgtttagaaggcctggggctgttggatgtttggggacagctggaaagcctttcgatgaaactcttttaattaatatgatctgtggggtagtgtcaggagtgatatcttccactatagccaatcccaccgatgttctaaagattcgaatgcaggctcaaggaagcttgttccaagggagcatgattggaagctttatcgatatataccaacaagaaggcaccaggggtctgtggaggggtgtggttccaactgctcagcgtgctgccatcgttgtaggagtagagctaccagtctatgatattactaagaagcatttaatattgtcaggaatgatgggcgatacaattttaactcacttcgtgtaagtaggatgggatgtgctcattttatttccagcattttgagcacaaaaagcctcttttactgaaatcctcaggtggaatttgataactggtacgtatggcctaaattcccttgtctctcctattatcagaacttcaagccttatgaacactttatacttcacagaaatgccaggtgctatgggggcttgggtacttgggaacattgtctaatacagcagcctatcagaggtctatttgatttacatttatccatacatagcttctatatctaataagcacatctattatttgctttggttaattttgtttgagaaagcaaacttttctcagtgggaatcagaaaa

SEQ ID NO: 431732 - DNA, 964 bp, Homo sapiens
  misc_feature (2)..(3): n is a, c, g, or t
  misc_feature (7)..(7): n is a, c, g, or t
  misc_feature (10)..(10): n is a, c, g, or t
  misc_feature (13)..(13): n is a, c, g, or t
  misc_feature (17)..(17): n is a, c, g, or t
tnnccgnccnggnaggngcttaacggtcctctggtctctctctcccctcagctgagtcccttccctgtctttcactcttctggcatcggtggttttacttcttcgattgaaccctgcttcctcgacccccctgggaggccgccttcttcaggcgcctcccttctctccacgagctcgctctgacagctgaggaactggcaagatcctgctacccagagggtgaatgggtatctttcccggaataatcctaatttttctaagggtgaagtttgcaacggcggccgtgattgtaagcggacaccagaaaagtaccactgtaagtcatgagatgtctggtctgaattggaaaccctttgtatatggcggccttgcctctatcgtggctgagtttgggactttccctgtggaccttaccaaaacacgacttcaggttcaaggccaaagcattgatgcccgtttcaaagagataaaatatagagggatgttccatgcgctgtttcgcatctgtaaagaggaaggtgtattggctctctattcaggaattgctcctgcgttgctaagacaagcatcatatggcaccattaaaattgggatttaccaaagcttgaagcgcttattcgtagaacgtttagaaggtcagtatacttaccctcttttgaggtgatactcaaagggattgttgaaatcatgcttagtgagaaatgttggtcatgaggtgcctgagaatggaggagagtcactgcaaagacaaagtgagcttgttctaacttggaataaatctttgcagaggtgatatatgaattagagagacctgttcttcaaatttgtcccttttcctatcaacaaaaaaggcatgtgatcatcccaaaagaaacatggaacaatcttgtccagaaaattaatgctatcttcatcaataagaggacttcaactgtaaggcattttctagctggcaattttgata

SEQ ID NO: 431733 - DNA, 711 bp, Homo sapiens
tccgggttggcgctgcagtggcgtttccgactgtgggagcctcagcttcccagtcgtccgatgagcccgagcagcaccagaaaagtaccactgtaagtcatgagatgtctggtctgaattggaaaccctttgtatatggcggccttgcctctatcgtggctgagtttgggactttccctgtggaccttaccaaaacacgacttcaggttcaaggccaaagcattgatgcccgtttcaaagagataaaatatagagggatgttccatgcgctgtttcgcatctgtaaagaggaaggtgtattggctctctattcaggaattgctcctgcgttgctaagacaagcatcatatggcaccattaaaattgggatttaccaaagcttgaagcgcttattcgtagaacgtttagaagattcgaatgcaggctcaaggaagcttgttccaagggagcatgattggaagctttatcgatatataccaacaagaaggcaccaggggtctgtggagggtaagtactcttttcctgctattatcctacactctcagttcctacaatttgcagagaatttttttttatataaagacataaaatcgtgaattataatccaaaaactaaggtaagaaactcctcatctcccttgaaaggcccaaaacttatcattggccttttatttctgcataatgtttggggattatataggtggggaaagtt

SEQ ID NO: 431734 - DNA, 1724 bp, Homo sapiens
tccgggttggcgctgcagtggcgtttccgactgtgggagcctcagcttcccagtcgtccgatgagcccgagcagctgagtcccttccctgtctttcactcttctggcatcggtggttttacttcttcgattgaaccctgcttcctcgacccccctgggaggccgccttcttcaggcgcctcccttctctccacgagctcgctctgacagctgaggaactggcaagatcctgctacccagagggtgaatgggtatctttcccggaataatcctaatttttctaagggtgaagtttgcaacggcggccgtgattgtaagcggacaccagaaaagtaccactgtaagtcatgagatgtctggtctgaattggaaaccctttgtatatggcggccttgcctctatcgtggctgagtttgggactttccctgtggaccttaccaaaacacgacttcaggttcaaggccaaagcattgatgcccgtttcaaagagataaaatatagagggatgttccatgcgctgtttcgcatctgtaaagaggaaggtgtattggctctctattcaggaattgctcctgcgttgctaagacaagcatcatatggcaccattaaaattgggatttaccaaagcttgaagcgcttattcgtagaacgtttagaagatgaaactcttttaattaatatgatctgtggggtagtgtcaggagtgatatcttccactatagccaatcccaccgatgttctaaagattcgaatgcaggctcaaggaagcttgttccaagggagcatgattggaagctttatcgatatataccaacaagaaggcaccaggggtctgtggaggtgcttatgttcaaaagctgttaccggctgtgtgctgtggctcatgcctgtaatcccagcactttgggaggccaacgcgggtggatcacttgagggtgtggttccaactgctcagcgtgctgccatcgttgtaggagtagagctaccagtctatgatattactaagaagcatttaatattgtcaggaatgatgggcgatacaattttaactcacttcgtttccagctttacatgtggtttggctggggctctggcctccaacccggttgatgtggttcgaactcgcatgatgaaccagagggcaatcgtgggacatgtggatctctataagggcactgttgatggtattttaaagatgtggaaacatgagggcttttttgcactctataaaggattttggccaaactggcttcggcttggaccctggaacatcattttttttattacatacgagcagctaaagaggcttcaaatctaagaactgaattatatgtgagcccagccctgccagcctttctactcctttgcccttttcccgtgttctaatgtattttgacaatgttgtaagtgtttaccaagccgttggtctcctaagggcctcctgatggaagaacagtggggtggttcaaagttatttctatgtttgtgttaccatgttaacttttccccgagagaaagtgttaacattgagactctggccccagattggtatcttctatgaagatggatactgatgggtgacattgaaaacggcctgctttccaaatgtggttaaatgtaattggttagccccagacttgggctagagcagaaggcataggccagggtggttattgctatatgtgttacagacctcggttctcattaaagtatttattggcagaa

SEQ ID NO: 431735 - DNA, 1298 bp, Homo sapiens
tccgggttggcgctgcagtggcgtttccgactgtgggagcctcagcttcccagtcgtccgatgagcccgagcagcaccagaaaagtaccactgtaagtcatgagatgtctggtctgaattggaaaccctttgtatatggcggccttgcctctatcgtggctgagtttgggactttccctgtggaccttaccaaaacacgacttcaggttcaaggccaaagcattgatgcccgtttcaaagagataaaatatagagggatgttccatgcgctgtttcgcatctgtaaagaggaaggtgtattggctctctattcaggaattgctcctgcgttgctaagacaagcatcatatggcaccattaaaattgggatttaccaaagcttgaagcgcttattcgtagaacgtttagaagattcgaatgcaggctcaaggaagcttgttccaagggagcatgattggaagctttatcgatatataccaacaagaaggcaccaggggtctgtggaggggtgtggttccaactgctcagcgtgctgccatcgttgtaggagtagagctaccagtctatgatattactaagaagcatttaatattgtcaggaatgatgggcgatacaattttaactcacttcgtttccagctttacatgtggtttggctggggctctggcctccaacccggttgatgtggttcgaactcgcatgatgaaccagagggcaatcgtgggacatgtggatctctataagggcactgttgatggtattttaaagatgtggaaacatgagggcttttttgcactctataaaggattttggccaaactggcttcggcttggaccctggaacatcattttttttattacatacgagcagctaaagaggcttcaaatctaagaactgaattatatgtgagcccagccctgccagcctttctactcctttgcccttttcccgtgttctaatgtattttgacaatgttgtaagtgtttaccaagccgttggtctcctaagggcctcctgatggaagaacagtggggtggttcaaagttatttctatgtttgtgttaccatgttaacttttccccgagagaaagtgttaacattgagactctggccccagattggtatcttctatgaagatggatactgatgggtgacattgaaaacggcctgctttccaaatgtggttaaatgtaattggttagccccagacttgggctagagcagaaggcataggccagggtggttattgctatatgtgttacagacctcggttctcattaaagtatttattggcagaa

SEQ ID NO: 431736 - DNA, 1313 bp, Homo sapiens
tccgggttggcgctgcagtggcgtttccgactgtgggagcctcagcttcccagtcgtccgatgagcccgagcagctgagtcccttccctgtctttcactcttctggcatcggtggttttacttcttcgattgaaccctgcttcctcgacccccctgggaggccgccttcttcaggcgcctcccttctctccacgagctcgctctgacagctgaggaactggcaagatcctgctacccagagggtgaatgggtatctttcccggaataatcctaatttttctaagggtgaagtttgcaacggcggccgtgattgtaagcggacaccagaaaagtaccactgtaagtcatgagatgtctggtctgaattggaaaccctttgtatatggcggccttgcctctatcgtggctgagtttgggactttccctgtggaccttaccaaaacacgacttcaggttcaaggccaaagcattgatgcccgtttcaaagagataaaatatagagggatgttccatgcgctgtttcgcatctgtaaagaggaaggtgtattggctctctattcaggaattgctcctgcgttgctaagacaagcatcatatggcaccattaaaattgggatttaccaaagcttgaagcgcttattcgtagaacgtttagaagatgaaactcttttaattaatatgatctgtggggtagtgtcaggagtgatatcttccactatagccaatcccaccgatgttctaaagattcgaatgcaggctcaaggaagcttgttccaagggagcatgattggaagctttatcgatatataccaacaagaaggcaccaggggtctgtggaggggtgtggttccaactgctcagcgtgctgccatcgttgtaggagtagagctaccagtctatgatattactaagaagcatttaatattgtcaggaatgatgggcgatacaattttaactcacttcgtgtaagtaggatgggatgtgctcattttatttccagcattttgagcacaaaaagcctcttttactgaaatcctcaggtggaatttgataactggtacgtatggcctaaattcccttgtctctcctattatcagaacttcaagccttatgaacactttatacttcacagaaatgccaggtgctatgggggcttgggtacttgggaacattgtctaatacagcagcctatcagaggtctatttgatttacatttatccatacatagcttctatatctaataagcacatctattatttgctttggttaattttgtttgagaaagcaaacttttctcagtgggaatcagaaaa

SEQ ID NO: 431737 - DNA, 413 bp, Homo sapiens
gagtactgaactgtttcctttattccttgtgtataaaatatattatacacttgaataaattacaaatatataaatatatgtattccaaattacaaatatatataatatataacagtataaattaaatatagcataatatataagattgaattcctagcactggtatcctttaggtagcacttccatgtggaggcatcctggggttttctgacatggggattattcgaactaatgctccaaagagctccattaaactaaactatttaatatatttaaaaccaagcataaactctttggttaagaatttataaatgtttaggcattggggtaaaggaataattcccaaccagaacgtatgtttccttaagctgagactgatggcgggggatagcataaagttcaagtgcctggcc

SEQ ID NO: 431738 - DNA, 630 bp, Homo sapiens
  misc_feature (27)..(27): n is a, c, g, or t
  misc_feature (48)..(48): n is a, c, g, or t
aaaagataggtatgttagataaatgtnataagggtaaagtagatgacncacccttagagtatttggtttgagaatagaagagccaaatggaggagacatcagagggcattaatggcaagaaacatgctgcccttcatggcagtgggccagcctgtcatggtaaccgcagctgaggccataacggcacccttgttcatcagcgggatgagagatgattacttctgggaccacagccattccagcagcctgtgtttccccatgccaccctttcctcctccgtccttgccccttccactcatgcttcttccacctatgccacccgctggccaggctgaatttggcccattcccttttgttatcgtgccttctttcacattccccaatgtctaagggatagcctctgtgccactttttgccagagtgtctttgagccagattcatattttgcatagcaccccatcaaaagtagttcatcaaatgtctattaaacgttttaaagaaaagtacatcattgacccatttttagggcacttgtaaaaatgtttctataaatatgtgaagggtatgtacatttgttttgtgtgtcacatggggtcagtaagttctcaataaaaattgttaagaaatgcc

SEQ ID NO: 431739 - DNA, 659 bp, Homo sapiens
tttaaattcacacccaccacctccccggggtttatgacgagaggaaccaaaaattttatcgccagcagcgactgcccatcccaggcagcatttggtttgagaatagaagagccaaatggaggagacatcagagggcattaatggcaagaaacatgctgcccttcatggcagtgggccagcctgtcatggtaaccgcagctgaggccataacggcacccttgttcatcagcgggatgagagatgattacttctgggaccacagccattccagcagcctgtgtttccccatgccaccctttcctcctccgtccttgccccttccactcatgcttcttccacctatgccacccgctggccaggctgaatttggcccattcccttttgttatcgtgccttctttcacattccccaatgtctaagggatagcctctgtgccactttttgccagagtgtctttgagccagattcatattttgcatagcaccccatcaaaagtagttcatcaaatgtctattaaacgttttaaagaaaagtacatcattgacccatttttagggcacttgtaaaaatgtttctataaatatgtgaagggtatgtacatttgttttgtgtgtcacatggggtcagtaagttctcaataaaaattgttaagaaatgcc

SEQ ID NO: 431740 - DNA, 464 bp, Homo sapiens
ggcatctcctttatttgtggcatgagagaaatgttcctaatgtgaggctcagctgggtgttacagaacagcctactgggtgtggggagttggtagaataaaaaaattaaacacaagaatgaaacgacacccacaactccaaatgctgaacacgtgtggtttcttccatagaaggaggctggcaagaagcatgaatgtgactgaactcgcagtgcaggtcagtaaaccgaaaaagcaatcgggcaggggagccattctaaaacccgcttcagggcttggacacactttgacccagacattgccatcttggtgtttttgtggcctttttcatgtataggcaatgaggtctgaactttgggatctttgtggctggaaaatgcggtaaggaaagctcagcttgtggaaatttcccattaccagagggaacatgacaatccacggaaaaaaaaatgagtactgaactgt

SEQ ID NO: 431741 - DNA, 1193 bp, Homo sapiens
cacagttctagcactgcctaggagagcgtggtggccccagctcagaatctgcagaagtgcacagctccatccacaccactcagggtatggagcctccggaccagtgtagccagtatatgaccagcttgctcagccctgcagtcgacgacgagaaagaactacaggatatgaatgctatggtgctgtcgcttactgaagaggtcaaagaggaggaagaggatgcacagcctgagcctgagcaaggcacagcagcaggagaaaagttaaagtcggcaggagcccaaggcggagaagaaaaagatggcggcggagaagaaaaagatggcggcggcgccggagttcctggccacctatgggaaggaaacctcgagggcaccagcggcagcgatggcaacgttgaggacagcgaccagagcgagaaggaacctgggcagcagtattcgcgcccacagggcgccgtcggggggctggagcctggcaacgcgcagcagcccaacgtccacgccttcaccccattgcagctgcaggagctggagtgcattttccaacgcgagcagttccccagtgagttcctgcgaaggaggctggcaagaagcatgaatgtgactgaactcgcagtgcagatttggtttgagaatagaagagccaaatggaggagacatcagagggcattaatggcaagaaacatgctgcccttcatggcagtgggccagcctgtcatggtaaccgcagctgaggccataacggcacccttgttcatcagcgggatgagagatgattacttctgggaccacagccattccagcagcctgtgtttccccatgccaccctttcctcctccgtccttgccccttccactcatgcttcttccacctatgccacccgctggccaggctgaatttggcccattcccttttgttatcgtgccttctttcacattccccaatgtctaagggatagcctctgtgccactttttgccagagtgtctttgagccagattcatattttgcatagcaccccatcaaaagtagttcatcaaatgtctattaaacgttttaaagaaaagtacatcattgacccatttttagggcacttgtaaaaatgtttctataaatatgtgaagggtatgtacatttgttttgtgtgtcacatggggtcagtaagttctcaataaaaattgttaagaaatgcc

SEQ ID NO: 431742 - DNA, 2185 bp, Homo sapiens
tattcttccaaatggaaactgctaatttttgaagcagaaggttgacagcttcagtaagatctcaagagagcgagaagactggaatcagggaaccctactctggaaactgtcagtcccagggcactggggagggctgaggccgaccatgcccagcctgctgctgctgttcacggctgctctgctgtccagctgggctcagcttctgacagacgccaactcctggtggtcattagctttgaacccggtgcagagacccgagatgtttatcatcggtgcccagcccgtgtgcagtcagcttcccgggctctcccctggccagaggaagctgtgccaattgtaccaggagcacatggcctacataggggagggagccaagactggcatcaaggaatgccagcaccagttccggcagcggcggtggaattgcagcacagcggacaacgcatctgtctttgggagagtcatgcagataggcagccgagagaccgccttcacccacgcggtgagcgccgcgggcgtggtcaacgccatcagccgggcctgccgcgagggcgagctctccacctgcggctgcagccggacggcgcggcccaaggacctgccccgggactggctgtggggcggctgtggggacaacgtggagtacggctaccgcttcgccaaggagtttgtggatgcccgggagcgagagaagaactttgccaaaggatcagaggagcagggccgggtgctcatgaacctgcaaaacaacgaggccggtcgcagggctgtgtataagatggcagacgtagcctgcaaatgccacggcgtctcggggtcctgcagcctcaagacctgctggctgcagctggccgagttccgcaaggtcggggaccggctgaaggagaagtacgacagcgcggccgccatgcgcgtcacccgcaagggccggctggagctggtcaacagccgcttcacccagcccaccccggaggacctggtctatgtggaccccagccccgactactgcctgcgcaacgagagcacgggctccctgggcacgcagggccgcctctgcaacaagacctcggagggcatggatggctgtgagctcatgtgctgcgggcgtggctacaaccagttcaagagcgtgcaggtggagcgctgccactgcaagttccactggtgctgcttcgtcaggtgtaagaagtgcacggagatcgtggaccagtacatctgtaaatagcccggagggcctgctcccggcccccctgcactctgcctcacaaaggtctatattatataaatctatataaatctattttatatttgtataagtaaatgggtgggtgctatacaatggaaagatgaaaatggaaaggaagagcttatttaagagacgctggagatctctgaggagtggactttgctggttctctcctcttggtgggtgggagacagggctttttctctccctctggtgaggactctcaggatgtagggacttggaaatatttactgtctgtccaccacggcctggaggagggaggttgtggttggatggaggagatgatcttgtctggaagtctagagtctttgttggttagaggactgcctgtgatcctggccactaggccaagaggccctatgaaggtggcgggaactcagcttcaacctcgatgtcttcagggtcttgtccagaatgtagatgggttccgtaagaggcctggtgctctcttactctttcatccacgtgcacttgtgcggcatctgcagtttacaggaacggctccttccctaaaatgagaagtccaaggtcatctctggcccagtgaccacagagagatctgcacctcccggacttcaggcctgcctttccagcgagaattcttcatcctccacggttcactagctcctacctgaagaggaaagggggccatttgacctgacatgtcaggaaagccctaaactgaatgtttgcgcctgggctgcagaagccagggtgcatgaccaggctgcgtggacgttatactgtcttcccccacccccggggaggggaagcttgagctgctgctgtcactcctccaccgagggaggcctcacaaaccacaggacgctgcaacgggtcaggctggcgggcccggcgtgctcatcatctctgccccaggtgtacggtttctctctgacattaaatgcccttcatgga

SEQ ID NO: 431743 - DNA, 2171 bp, Homo sapiens
cgggcgcaggaagagccgggccgggccgagcggcgcccggagcccgcgggcctgacacgcggcgggacatgcagggaaccctactctggaaactgtcagtcccagggcactggggagggctgaggccgaccatgcccagcctgctgctgctgttcacggctgctctgctgtccagctgggctcagcttctgacagacgccaactcctggtggtcattagctttgaacccggtgcagagacccgagatgtttatcatcggtgcccagcccgtgtgcagtcagcttcccgggctctcccctggccagaggaagctgtgccaattgtaccaggagcacatggcctacataggggagggagccaagactggcatcaaggaatgccagcaccagttccggcagcggcggtggaattgcagcacagcggacaacgcatctgtctttgggagagtcatgcagataggcagccgagagaccgccttcacccacgcggtgagcgccgcgggcgtggtcaacgccatcagccgggcctgccgcgagggcgagctctccacctgcggctgcagccggacggcgcggcccaaggacctgccccgggactggctgtggggcggctgtggggacaacgtggagtacggctaccgcttcgccaaggagtttgtggatgcccgggagcgagagaagaactttgccaaaggatcagaggagcagggccgggtgctcatgaacctgcaaaacaacgaggccggtcgcagggctgtgtataagatggcagacgtagcctgcaaatgccacggcgtctcggggtcctgcagcctcaagacctgctggctgcagctggccgagttccgcaaggtcggggaccggctgaaggagaagtacgacagcgcggccgccatgcgcgtcacccgcaagggccggctggagctggtcaacagccgcttcacccagcccaccccggaggacctggtctatgtggaccccagccccgactactgcctgcgcaacgagagcacgggctccctgggcacgcagggccgcctctgcaacaagacctcggagggcatggatggctgtgagctcatgtgctgcgggcgtggctacaaccagttcaagagcgtgcaggtggagcgctgccactgcaagttccactggtgctgcttcgtcaggtgtaagaagtgcacggagatcgtggaccagtacatctgtaaatagcccggagggcctgctcccggcccccctgcactctgcctcacaaaggtctatattatataaatctatataaatctattttatatttgtataagtaaatgggtgggtgctatacaatggaaagatgaaaatggaaaggaagagcttatttaagagacgctggagatctctgaggagtggactttgctggttctctcctcttggtgggtgggagacagggctttttctctccctctggtgaggactctcaggatgtagggacttggaaatatttactgtctgtccaccacggcctggaggagggaggttgtggttggatggaggagatgatcttgtctggaagtctagagtctttgttggttagaggactgcctgtgatcctggccactaggccaagaggccctatgaaggtggcgggaactcagcttcaacctcgatgtcttcagggtcttgtccagaatgtagatgggttccgtaagaggcctggtgctctcttactctttcatccacgtgcacttgtgcggcatctgcagtttacaggaacggctccttccctaaaatgagaagtccaaggtcatctctggcccagtgaccacagagagatctgcacctcccggacttcaggcctgcctttccagcgagaattcttcatcctccacggttcactagctcctacctgaagaggaaagggggccatttgacctgacatgtcaggaaagccctaaactgaatgtttgcgcctgggctgcagaagccagggtgcatgaccaggctgcgtggacgttatactgtcttcccccacccccggggaggggaagcttgagctgctgctgtcactcctccaccgagggaggcctcacaaaccacaggacgctgcaacgggtcaggctggcgggcccggcgtgctcatcatctctgccccaggtgtacggtttctctctgacattaaatgcccttcatgga

SEQ ID NO: 431744 - DNA, 2206 bp, Homo sapiens
aagcttttctctcgtcctccctactcgggacctggtcgcctcccctccataaaaccattagctcctggtgccagccctatctctgctccatctctcgtggttccagccgggaaccctactctggaaactgtcagtcccagggcactggggagggctgaggccgaccatgcccagcctgctgctgctgttcacggctgctctgctgtccagctgggctcagcttctgacagacgccaactcctggtggtcattagctttgaacccggtgcagagacccgagatgtttatcatcggtgcccagcccgtgtgcagtcagcttcccgggctctcccctggccagaggaagctgtgccaattgtaccaggagcacatggcctacataggggagggagccaagactggcatcaaggaatgccagcaccagttccggcagcggcggtggaattgcagcacagcggacaacgcatctgtctttgggagagtcatgcagataggcagccgagagaccgccttcacccacgcggtgagcgccgcgggcgtggtcaacgccatcagccgggcctgccgcgagggcgagctctccacctgcggctgcagccggacggcgcggcccaaggacctgccccgggactggctgtggggcggctgtggggacaacgtggagtacggctaccgcttcgccaaggagtttgtggatgcccgggagcgagagaagaactttgccaaaggatcagaggagcagggccgggtgctcatgaacctgcaaaacaacgaggccggtcgcagggctgtgtataagatggcagacgtagcctgcaaatgccacggcgtctcggggtcctgcagcctcaagacctgctggctgcagctggccgagttccgcaaggtcggggaccggctgaaggagaagtacgacagcgcggccgccatgcgcgtcacccgcaagggccggctggagctggtcaacagccgcttcacccagcccaccccggaggacctggtctatgtggaccccagccccgactactgcctgcgcaacgagagcacgggctccctgggcacgcagggccgcctctgcaacaagacctcggagggcatggatggctgtgagctcatgtgctgcgggcgtggctacaaccagttcaagagcgtgcaggtggagcgctgccactgcaagttccactggtgctgcttcgtcaggtgtaagaagtgcacggagatcgtggaccagtacatctgtaaatagcccggagggcctgctcccggcccccctgcactctgcctcacaaaggtctatattatataaatctatataaatctattttatatttgtataagtaaatgggtgggtgctatacaatggaaagatgaaaatggaaaggaagagcttatttaagagacgctggagatctctgaggagtggactttgctggttctctcctcttggtgggtgggagacagggctttttctctccctctggtgaggactctcaggatgtagggacttggaaatatttactgtctgtccaccacggcctggaggagggaggttgtggttggatggaggagatgatcttgtctggaagtctagagtctttgttggttagaggactgcctgtgatcctggccactaggccaagaggccctatgaaggtggcgggaactcagcttcaacctcgatgtcttcagggtcttgtccagaatgtagatgggttccgtaagaggcctggtgctctcttactctttcatccacgtgcacttgtgcggcatctgcagtttacaggaacggctccttccctaaaatgagaagtccaaggtcatctctggcccagtgaccacagagagatctgcacctcccggacttcaggcctgcctttccagcgagaattcttcatcctccacggttcactagctcctacctgaagaggaaagggggccatttgacctgacatgtcaggaaagccctaaactgaatgtttgcgcctgggctgcagaagccagggtgcatgaccaggctgcgtggacgttatactgtcttcccccacccccggggaggggaagcttgagctgctgctgtcactcctccaccgagggaggcctcacaaaccacaggacgctgcaacgggtcaggctggcgggcccggcgtgctcatcatctctgccccaggtgtacggtttctctctgacattaaatgcccttcatgga

SEQ ID NO: 431745 - DNA, 2134 bp, Homo sapiens
gctcacttccgagctggctctgcatgacaaaggggaaggagcaagtgtcttctttgatctgccccctgccggccccacacacctgcctgttggtgcccccgccccagccgaggcttcgagaaggaaaatcaaaagggggcttggggaagggctgtgtcccagctctcctggaccctgctcgggccactgtcctctcctggcggccccaggacaaaaatacttcccgggctgatgacccgaagcacccgccgccccctcccggagagcctggggacgccgacgcgcgagagtggcgcagtgagccggggcgcgcggggctgcgctcgtcagggaaccctactctggaaactgtcagtcccagggcactggggagggctgaggccgaccatgcccagcctgctgctgctgttcacggctgctctgctgtccagctgggctcagcttctgacagacgccaactcctggtggtcattagctttgaacccggtgcagagacccgagatgtttatcatcggtgcccagcccgtgtgcagtcagcttcccgggctctcccctggccagaggaagctgtgccaattgtaccaggagcacatggcctacataggggagggagccaagactggcatcaaggaatgccagcaccagttccggcagcggcggtggaattgcagcacagcggacaacgcatctgtctttgggagagtcatgcagataggctgtgtataagatggcagacgtagcctgcaaatgccacggcgtctcggggtcctgcagcctcaagacctgctggctgcagctggccgagttccgcaaggtcggggaccggctgaaggagaagtacgacagcgcggccgccatgcgcgtcacccgcaagggccggctggagctggtcaacagccgcttcacccagcccaccccggaggacctggtctatgtggaccccagccccgactactgcctgcgcaacgagagcacgggctccctgggcacgcagggccgcctctgcaacaagacctcggagggcatggatggctgtgagctcatgtgctgcgggcgtggctacaaccagttcaagagcgtgcaggtggagcgctgccactgcaagttccactggtgctgcttcgtcaggtgtaagaagtgcacggagatcgtggaccagtacatctgtaaatagcccggagggcctgctcccggcccccctgcactctgcctcacaaaggtctatattatataaatctatataaatctattttatatttgtataagtaaatgggtgggtgctatacaatggaaagatgaaaatggaaaggaagagcttatttaagagacgctggagatctctgaggagtggactttgctggttctctcctcttggtgggtgggagacagggctttttctctccctctggtgaggactctcaggatgtagggacttggaaatatttactgtctgtccaccacggcctggaggagggaggttgtggttggatggaggagatgatcttgtctggaagtctagagtctttgttggttagaggactgcctgtgatcctggccactaggccaagaggccctatgaaggtggcgggaactcagcttcaacctcgatgtcttcagggtcttgtccagaatgtagatgggttccgtaagaggcctggtgctctcttactctttcatccacgtgcacttgtgcggcatctgcagtttacaggaacggctccttccctaaaatgagaagtccaaggtcatctctggcccagtgaccacagagagatctgcacctcccggacttcaggcctgcctttccagcgagaattcttcatcctccacggttcactagctcctacctgaagaggaaagggggccatttgacctgacatgtcaggaaagccctaaactgaatgtttgcgcctgggctgcagaagccagggtgcatgaccaggctgcgtggacgttatactgtcttcccccacccccggggaggggaagcttgagctgctgctgtcactcctccaccgagggaggcctcacaaaccacaggacgctgcaacgggtcaggctggcgggcccggcgtgctcatcatctctgccccaggtgtacggtttctctctgacattaaatgcccttcatgga

SEQ ID NO: 431746 - DNA, 1770 bp, Homo sapiens
ggctctagttaccgtgtcagcctgtcctgggggcagtcacagccacagtgaccattagcaggcacccaggcctgtctttggctcggaaacggtggcccccaatgtagcctagtttgaacctaggaactgcaggaccagagagattccactggagcctgatggacgggtgacagagggaaccctactctggaaactgtcagtcccagggcactggggagggctgaggccgaccatgcccagcctgctgctgctgttcacggctgctctgctgtccagctgggctcagcttctgacagacgccaactcctggtggtcattagctttgaacccggtgcagagacccgagatgtttatcatcggtgcccagcccgtgtgcagtcagcttcccgggctctcccctggccagaggaagctgtgccaattgtaccaggagcacatggcctacataggggagggagccaagactggcatcaaggaatgccagcaccagttccggcagcggcggtggaattgcagcacagcggacaacgcatctgtctttgggagagtcatgcagataggcagccgagagaccgccttcacccacgcggtgagcgccgcgggcgtggtcaacgccatcagccgggcctgccgcgagggcgagctctccacctgcggctgcagccggacggcgcggcccaaggacctgccccgggactggctgtggggcggctgtggggacaacgtggagtacggctaccgcttcgccaaggagtttgtggatgcccgggagcgagagaagaactttgccaaaggatcagaggagcagggccgggtgctcatgaacctgcaaaacaacgaggccggtcgcagggctgtgtataagatggcagacgtagcctgcaaatgccacggcgtctcggggtcctgcagcctcaagacctgctggctgcagctggccgagttccgcaaggtcggggaccggctgaaggagaagtacgacagcgcggccgccatgcgcgtcacccgcaagggccggctggagctggtcaacagccgcttcacccagcccaccccggaggacctggtctatgtggaccccagccccgactactgcctgcgcaacgagagcacgggctccctgggcacgcagggccgcctctgcaacaagacctcggagggcatggatggctgtgagctcatgtgctgcgggcgtggctacaaccagttcaagagcgtgcaggtggagcgctgccactgcaagttccactggtgctgcttcgtcaggtgtaagaagtgcacggagatcgtggaccagtacatctgtaaatagcccggagggcctgctcccggcccccctgcactctgcctcacaaaggtctatattatataaatctatataaatctattttatatttgtataagtaaatgggtgggtgctatacaatggaaagatgaaaatggaaaggaagagcttatttaagagacgctggagatctctgaggagtggactttgctggttctctcctcttggtgggtgggagacagggctttttctctccctctggtgaggactctcaggatgtagggacttggaaatatttactgtctgtccaccacggcctggaggagggaggttgtggttggatggaggagatgatctcttaagtaaatcaaggaccttttttggttggcgtacttaatgtggtatctcgccagtggagtgaagaagcctctataaacgttgttgaaccatacaagcaatactcttttctgcagacatatgagccc

SEQ ID NO: 431747 - DNA, 2272 bp, Homo sapiens
ggctctagttaccgtgtcagcctgtcctgggggcagtcacagccacagtgaccattagcaggcacccaggcctgtctttggctcggaaacggtggcccccaatgtagcctagtttgaacctaggaactgcaggaccagagagattccactggagcctgatggacgggtgacagagggaaccctactctggaaactgtcagtcccagggcactggggagggctgaggccgaccatgcccagcctgctgctgctgttcacggctgctctgctgtccagctgggctcagcttctgacagacgccaactcctggtggtcattagctttgaacccggtgcagagacccgagatgtttatcatcggtgcccagcccgtgtgcagtcagcttcccgggctctcccctggccagaggaagctgtgccaattgtaccaggagcacatggcctacataggggagggagccaagactggcatcaaggaatgccagcaccagttccggcagcggcggtggaattgcagcacagcggacaacgcatctgtctttgggagagtcatgcagataggcagccgagagaccgccttcacccacgcggtgagcgccgcgggcgtggtcaacgccatcagccgggcctgccgcgagggcgagctctccacctgcggctgcagccggacggcgcggcccaaggacctgccccgggactggctgtggggcggctgtggggacaacgtggagtacggctaccgcttcgccaaggagtttgtggatgcccgggagcgagagaagaactttgccaaaggatcagaggagcagggccgggtgctcatgaacctgcaaaacaacgaggccggtcgcagggctgtgtataagatggcagacgtagcctgcaaatgccacggcgtctcggggtcctgcagcctcaagacctgctggctgcagctggccgagttccgcaaggtcggggaccggctgaaggagaagtacgacagcgcggccgccatgcgcgtcacccgcaagggccggctggagctggtcaacagccgcttcacccagcccaccccggaggacctggtctatgtggaccccagccccgactactgcctgcgcaacgagagcacgggctccctgggcacgcagggccgcctctgcaacaagacctcggagggcatggatggctgtgagctcatgtgctgcgggcgtggctacaaccagttcaagagcgtgcaggtggagcgctgccactgcaagttccactggtgctgcttcgtcaggtgtaagaagtgcacggagatcgtggaccagtacatctgtaaatagcccggagggcctgctcccggcccccctgcactctgcctcacaaaggtctatattatataaatctatataaatctattttatatttgtataagtaaatgggtgggtgctatacaatggaaagatgaaaatggaaaggaagagcttatttaagagacgctggagatctctgaggagtggactttgctggttctctcctcttggtgggtgggagacagggctttttctctccctctggtgaggactctcaggatgtagggacttggaaatatttactgtctgtccaccacggcctggaggagggaggttgtggttggatggaggagatgatcttgtctggaagtctagagtctttgttggttagaggactgcctgtgatcctggccactaggccaagaggccctatgaaggtggcgggaactcagcttcaacctcgatgtcttcagggtcttgtccagaatgtagatgggttccgtaagaggcctggtgctctcttactctttcatccacgtgcacttgtgcggcatctgcagtttacaggaacggctccttccctaaaatgagaagtccaaggtcatctctggcccagtgaccacagagagatctgcacctcccggacttcaggcctgcctttccagcgagaattcttcatcctccacggttcactagctcctacctgaagaggaaagggggccatttgacctgacatgtcaggaaagccctaaactgaatgtttgcgcctgggctgcagaagccagggtgcatgaccaggctgcgtggacgttatactgtcttcccccacccccggggaggggaagcttgagctgctgctgtcactcctccaccgagggaggcctcacaaaccacaggacgctgcaacgggtcaggctggcgggcccggcgtgctcatcatctctgccccaggtgtacggtttctctctgacattaaatgcccttcatgga

SEQ ID NO: 431748 - DNA, 2156 bp, Homo sapiens
gctggtctgcccttatccgctgagtttccacactgactctccatttctgttttctccagggaaccctactctggaaactgtcagtcccagggcactggggagggctgaggccgaccatgcccagcctgctgctgctgttcacggctgctctgctgtccagctgggctcagcttctgacagacgccaactcctggtggtcattagctttgaacccggtgcagagacccgagatgtttatcatcggtgcccagcccgtgtgcagtcagcttcccgggctctcccctggccagaggaagctgtgccaattgtaccaggagcacatggcctacataggggagggagccaagactggcatcaaggaatgccagcaccagttccggcagcggcggtggaattgcagcacagcggacaacgcatctgtctttgggagagtcatgcagataggcagccgagagaccgccttcacccacgcggtgagcgccgcgggcgtggtcaacgccatcagccgggcctgccgcgagggcgagctctccacctgcggctgcagccggacggcgcggcccaaggacctgccccgggactggctgtggggcggctgtggggacaacgtggagtacggctaccgcttcgccaaggagtttgtggatgcccgggagcgagagaagaactttgccaaaggatcagaggagcagggccgggtgctcatgaacctgcaaaacaacgaggccggtcgcagggctgtgtataagatggcagacgtagcctgcaaatgccacggcgtctcggggtcctgcagcctcaagacctgctggctgcagctggccgagttccgcaaggtcggggaccggctgaaggagaagtacgacagcgcggccgccatgcgcgtcacccgcaagggccggctggagctggtcaacagccgcttcacccagcccaccccggaggacctggtctatgtggaccccagccccgactactgcctgcgcaacgagagcacgggctccctgggcacgcagggccgcctctgcaacaagacctcggagggcatggatggctgtgagctcatgtgctgcgggcgtggctacaaccagttcaagagcgtgcaggtggagcgctgccactgcaagttccactggtgctgcttcgtcaggtgtaagaagtgcacggagatcgtggaccagtacatctgtaaatagcccggagggcctgctcccggcccccctgcactctgcctcacaaaggtctatattatataaatctatataaatctattttatatttgtataagtaaatgggtgggtgctatacaatggaaagatgaaaatggaaaggaagagcttatttaagagacgctggagatctctgaggagtggactttgctggttctctcctcttggtgggtgggagacagggctttttctctccctctggtgaggactctcaggatgtagggacttggaaatatttactgtctgtccaccacggcctggaggagggaggttgtggttggatggaggagatgatcttgtctggaagtctagagtctttgttggttagaggactgcctgtgatcctggccactaggccaagaggccctatgaaggtggcgggaactcagcttcaacctcgatgtcttcagggtcttgtccagaatgtagatgggttccgtaagaggcctggtgctctcttactctttcatccacgtgcacttgtgcggcatctgcagtttacaggaacggctccttccctaaaatgagaagtccaaggtcatctctggcccagtgaccacagagagatctgcacctcccggacttcaggcctgcctttccagcgagaattcttcatcctccacggttcactagctcctacctgaagaggaaagggggccatttgacctgacatgtcaggaaagccctaaactgaatgtttgcgcctgggctgcagaagccagggtgcatgaccaggctgcgtggacgttatactgtcttcccccacccccggggaggggaagcttgagctgctgctgtcactcctccaccgagggaggcctcacaaaccacaggacgctgcaacgggtcaggctggcgggcccggcgtgctcatcatctctgccccaggtgtacggtttctctctgacattaaatgcccttcatgga

SEQ ID NO: 431749 - DNA, 2427 bp, Homo sapiens
gctcacttccgagctggctctgcatgacaaaggggaaggagcaagtgtcttctttgatctgccccctgccggccccacacacctgcctgttggtgcccccgccccagccgaggcttcgagaaggaaaatcaaaagggggcttggggaagggctgtgtcccagctctcctggaccctgctcgggccactgtcctctcctggcggccccaggacaaaaatacttcccgggctgatgacccgaagcacccgccgccccctcccggagagcctggggacgccgacgcgcgagagtggcgcagtgagccggggcgcgcggggctgcgctcgtcagggaaccctactctggaaactgtcagtcccagggcactggggagggctgaggccgaccatgcccagcctgctgctgctgttcacggctgctctgctgtccagctgggctcagcttctgacagacgccaactcctggtggtcattagctttgaacccggtgcagagacccgagatgtttatcatcggtgcccagcccgtgtgcagtcagcttcccgggctctcccctggccagaggaagctgtgccaattgtaccaggagcacatggcctacataggggagggagccaagactggcatcaaggaatgccagcaccagttccggcagcggcggtggaattgcagcacagcggacaacgcatctgtctttgggagagtcatgcagataggcagccgagagaccgccttcacccacgcggtgagcgccgcgggcgtggtcaacgccatcagccgggcctgccgcgagggcgagctctccacctgcggctgcagccggacggcgcggcccaaggacctgccccgggactggctgtggggcggctgtggggacaacgtggagtacggctaccgcttcgccaaggagtttgtggatgcccgggagcgagagaagaactttgccaaaggatcagaggagcagggccgggtgctcatgaacctgcaaaacaacgaggccggtcgcagggctgtgtataagatggcagacgtagcctgcaaatgccacggcgtctcggggtcctgcagcctcaagacctgctggctgcagctggccgagttccgcaaggtcggggaccggctgaaggagaagtacgacagcgcggccgccatgcgcgtcacccgcaagggccggctggagctggtcaacagccgcttcacccagcccaccccggaggacctggtctatgtggaccccagccccgactactgcctgcgcaacgagagcacgggctccctgggcacgcagggccgcctctgcaacaagacctcggagggcatggatggctgtgagctcatgtgctgcgggcgtggctacaaccagttcaagagcgtgcaggtggagcgctgccactgcaagttccactggtgctgcttcgtcaggtgtaagaagtgcacggagatcgtggaccagtacatctgtaaatagcccggagggcctgctcccggcccccctgcactctgcctcacaaaggtctatattatataaatctatataaatctattttatatttgtataagtaaatgggtgggtgctatacaatggaaagatgaaaatggaaaggaagagcttatttaagagacgctggagatctctgaggagtggactttgctggttctctcctcttggtgggtgggagacagggctttttctctccctctggtgaggactctcaggatgtagggacttggaaatatttactgtctgtccaccacggcctggaggagggaggttgtggttggatggaggagatgatcttgtctggaagtctagagtctttgttggttagaggactgcctgtgatcctggccactaggccaagaggccctatgaaggtggcgggaactcagcttcaacctcgatgtcttcagggtcttgtccagaatgtagatgggttccgtaagaggcctggtgctctcttactctttcatccacgtgcacttgtgcggcatctgcagtttacaggaacggctccttccctaaaatgagaagtccaaggtcatctctggcccagtgaccacagagagatctgcacctcccggacttcaggcctgcctttccagcgagaattcttcatcctccacggttcactagctcctacctgaagaggaaagggggccatttgacctgacatgtcaggaaagccctaaactgaatgtttgcgcctgggctgcagaagccagggtgcatgaccaggctgcgtggacgttatactgtcttcccccacccccggggaggggaagcttgagctgctgctgtcactcctccaccgagggaggcctcacaaaccacaggacgctgcaacgggtcaggctggcgggcccggcgtgctcatcatctctgccccaggtgtacggtttctctctgacattaaatgcccttcatgga

SEQ ID NO: 431750 - DNA, 1328 bp, Homo sapiens
gcggccgcgctgtcgtacttctccttcagccggtccccgaccttgcggaactcggccagctgcagccagcaggtcttgaggctgcaggaccccgagacgccgtggcatttgcaggctacgtctgccatcttatacacagccctgcgacctgcctgcgcaacgagagcacgggctccctgggcacgcagggccgcctctgcaacaagacctcggagggcatggatggctgtgagctcatgtgctgcgggcgtggctacaaccagttcaagagcgtgcaggtggagcgctgccactgcaagttccactggtgctgcttcgtcaggtgtaagaagtgcacggagatcgtggaccagtacatctgtaaatagcccggagggcctgctcccggcccccctgcactctgcctcacaaaggtctatattatataaatctatataaatctattttatatttgtataagtaaatgggtgggtgctatacaatggaaagatgaaaatggaaaggaagagcttatttaagagacgctggagatctctgaggagtggactttgctggttctctcctcttggtgggtgggagacagggctttttctctccctctggtgaggactctcaggatgtagggacttggaaatatttactgtctgtccaccacggcctggaggagggaggttgtggttggatggaggagatgatcttgtctggaagtctagagtctttgttggttagaggactgcctgtgatcctggccactaggccaagaggccctatgaaggtggcgggaactcagcttcaacctcgatgtcttcagggtcttgtccagaatgtagatgggttccgtaagaggcctggtgctctcttactctttcatccacgtgcacttgtgcggcatctgcagtttacaggaacggctccttccctaaaatgagaagtccaaggtcatctctggcccagtgaccacagagagatctgcacctcccggacttcaggcctgcctttccagcgagaattcttcatcctccacggttcactagctcctacctgaagaggaaagggggccatttgacctgacatgtcaggaaagccctaaactgaatgtttgcgcctgggctgcagaagccagggtgcatgaccaggctgcgtggacgttatactgtcttcccccacccccggggaggggaagcttgagctgctgctgtcactcctccaccgagggaggcctcacaaaccacaggacgctgcaacgggtcaggctggcgggcccggcgtgctcatcatctctgccccaggtgtacggtttctctctgacattaaatgcccttcatgga

SEQ ID NO: 431751 - DNA, 1530 bp, Homo sapiens
ggctctagttaccgtgtcagcctgtcctgggggcagtcacagccacagtgaccattagcaggcacccaggcctgtctttggctcggaaacggtggcccccaatgtagcctagtttgaacctaggaactgcaggaccagagagattccactggagcctgatggacgggtgacagagggaaccctactctggaaactgtcagtcccagggcactggggagggctgaggccgaccatgcccagcctgctgctgctgttcacggctgctctgctgtccagctgggctcagcttctgacagacgccaactcctggtggtcattagctttgaacccggtgcagagacccgagatgtttatcatcggtgcccagcccgtgtgcagtcagcttcccgggctctcccctggccagaggaagctgtgccaattgtaccaggagcacatggcctacataggggagggagccaagactggcatcaaggaatgccagcaccagttccggcagcggcggtggaattgcagcacagcggacaacgcatctgtctttgggagagtcatgcagataggcagccgagagaccgccttcacccacgcggtgagcgccgcgggcgtggtcaacgccatcagccgggcctgccgcgagggcgagctctccacctgcggctgcagccggacggcgcggcccaaggacctgccccgggactggctgtggggcggctgtggggacaacgtggagtacggctaccgcttcgccaaggagtttgtggatgcccgggagcgagagaagaactttgccaaaggatcagaggagcagggccgggtgctcatgaacctgcaaaacaacgaggccggtcgcagggctgtgtataagatggcagacgtagcctgcaaatgccacggcgtctcggggtcctgcagcctcaagacctgctggctgcagctggccgagttccgcaaggtcggggaccggctgaaggagaagtacgacagcgcggccgccatgcgcgtcacccgcaagggccggctggagctggtcaacagccgcttcacccagcccaccccggaggacctggtctatgtggaccccagccccgactactgcctgcgcaacgagagcacgggctccctgggcacgcagggccgcctctgcaacaagacccagtgaccacagagagatctgcacctcccggacttcaggcctgcctttccagcgagaattcttcatcctccacggttcactagctcctacctgaagaggaaagggggccatttgacctgacatgtcaggaaagccctaaactgaatgtttgcgcctgggctgcagaagccagggtgcatgaccaggctgcgtggacgttatactgtcttcccccacccccggggaggggaagcttgagctgctgctgtcactcctccaccgagggaggcctcacaaaccacaggacgctgcaacgggtcaggctggcgggcccggcgtgctcatcatctctgccccaggtgtacggtttctctctgacattaaatgcccttcatgga

SEQ ID NO: 431752 - DNA, 2785 bp, Homo sapiens
aagaacgcccccaaaatctgtttctaattttacagaaatcttttgaaacttggcacggtattcaaaagtccgtggaaagaaaaaaaccttgtcctggcttcagcttccaactacaaagacagacttggtccttttcaacggttttcacagatccagtgacccacgctctgaagacagaattagctaactttcaaaaacatctggaaaaatgaagacttgggtaaaaatcgtatttggagttgccacctctgctgtgcttgccttattggtgatgtgcattgtcttacgcccttcaagagttcataactctgaagaaaatacaatgagagcactcacactgaaggatattttaaatggaacattttcttataaaacattttttccaaactggatttcaggacaagaatatcttcatcaatctgcagataacaatatagtactttataatattgaaacaggacaatcatataccattttgagtaatagaaccatgaaaagtgtgaatgcttcaaattacggcttatcacctgatcggcaatttgtatatctagaaagtgattattcaaagctttggagatactcttacacagcaacatattacatctatgaccttagcaatggagaatttgtaagaggaaatgagcttcctcgtccaattcagtatttatgctggtcgcctgttgggagtaaattagcatatgtctatcaaaacaatatctatttgaaacaaagaccaggagatccaccttttcaaataacatttaatggaagagaaaataaaatatttaatggaatcccagactgggtttatgaagaggaaatgcttgctacaaaatatgctctctggtggtctcctaatggaaaatttttggcatatgcggaatttaatgatacggatataccagttattgcctattcctattatggcgatgaacaatatcctagaacaataaatattccatacccaaaggctggagctaagaatcccgttgttcggatatttattatcgataccacttaccctgcgtatgtaggtccccaggaagtgcctgttccagcaatgatagcctcaagtgattattatttcagttggctcacgtgggttactgatgaacgagtatgtttgcagtggctaaaaagagtccagaatgtttcggtcctgtctatatgtgacttcagggaagactggcagacatgggattgtccaaagacccaggagcatatagaagaaagcagaactggatgggctggtggattctttgtttcaacaccagttttcagctatgatgccatttcgtactacaaaatatttagtgacaaggatggctacaaacatattcactatatcaaagacactgtggaaaatgctattcaaattacaagtggcaagtgggaggccataaatatattcagagtaacacaggattcactgttttattctagcaatgaatttgaagaataccctggaagaagaaacatctacagaattagcattggaagctatcctccaagcaagaagtgtgttacttgccatctaaggaaagaaaggtgccaatattacacagcaagtttcagcgactacgccaagtactatgcacttgtctgctacggcccaggcatccccatttccacccttcatgatggacgcactgatcaagaaattaaaatcctggaagaaaacaaggaattggaaaatgctttgaaaaatatccagctgcctaaagaggaaattaagaaacttgaagtagatgaaattactttatggtacaagatgattcttcctcctcaatttgacagatcaaagaagtatcccttgctaattcaagtgtatggtggtccctgcagtcagagtgtaaggtctgtatttgctgttaattggatatcttatcttgcaagtaaggaagggatggtcattgccttggtggatggtcgaggaacagctttccaaggtgacaaactcctctatgcagtgtatcgaaagctgggtgtttatgaagttgaagaccagattacagctgtcagaaaattcatagaaatgggtttcattgatgaaaaaagaatagccatatggggctggtcctatggaggatacgtttcatcactggcccttgcatctggaactggtcttttcaaatgtggtatagcagtggctccagtctccagctgggaatattacgcgtctgtctacacagagagattcatgggtctcccaacaaaggatgataatcttgagcactataagaattcaactgtgatggcaagagcagaatatttcagaaatgtagactatcttctcatccacggaacagcagatgataatgtgcactttcaaaactcagcacagattgctaaagctctggttaatgcacaagtggatttccaggcaatgtggtactctgaccagaaccacggcttatccggcctgtccacgaaccacttatacacccacatgacccacttcctaaagcagtgtttctctttgtcagactaaaaacgatgcagatgcaagcctgtatcagaatctgaaaaccttatataaacccctcagacagtttgcttattttattttttatgttgtaaaatgctagtataaacaaacaaattaatgttgttctaaaggctgttaaaaaaaagatgaggactcagaagttcaagctaaatattgtttacattttctggtactctgtgaaagaagagaaaagggagtcatgcattttgctttggacacagtgttttatcacctgttcatttgaagaaaaataataaagtcagaagttcaagtgct

SEQ ID NO: 431753 - DNA, 1568 bp, Homo sapiens
aagaacgcccccaaaatctgtttctaattttacagaaatcttttgaaacttggcacggtattcaaaagtccgtggaaagaaaaaaaccttgtcctggcttcagcttccaactacaaagacagacttggtccttttcaacggttttcacagatccagtgacccacgctctgaagacagaattagctaactttcaaaaacatctggaaaaatgaaggttttattctagcaatgaatttgaagaataccctggaagaagaaacatctacagaattagcattggaagctatcctccaagcaagaagtgtgttacttgccatctaaggaaagaaaggtgccaatattacacagcaagtttcagcgactacgccaagtactatgcacttgtctgctacggcccaggcatccccatttccacccttcatgatggacgcactgatcaagaaattaaaatcctggaagaaaacaaggaattggaaaatgctttgaaaaatatccagctgcctaaagaggaaattaagaaacttgaagtagatgaaattactttatggtacaagatgattcttcctcctcaatttgacagatcaaagaagtatcccttgctaattcaagtgtatggtggtccctgcagtcagagtgtaaggtctgtatttgctgttaattggatatcttatcttgcaagtaaggaagggatggtcattgccttggtggatggtcgaggaacagctttccaaggtgacaaactcctctatgcagtgtatcgaaagctgggtgtttatgaagttgaagaccagattacagctgtcagaaaattcatagaaatgggtttcattgatgaaaaaagaatagccatatggggctggtcctatggaggatacgtttcatcactggcccttgcatctggaactggtcttttcaaatgtggtatagcagtggctccagtctccagctgggaatattacgcgtctgtctacacagagagattcatgggtctcccaacaaaggatgataatcttgagcactataagaattcaactgtgatggcaagagcagaatatttcagaaatgtagactatcttctcatccacggaacagcagatgataatgtgcactttcaaaactcagcacagattgctaaagctctggttaatgcacaagtggatttccaggcaatgtggtactctgaccagaaccacggcttatccggcctgtccacgaaccacttatacacccacatgacccacttcctaaagcagtgtttctctttgtcagactaaaaacgatgcagatgcaagcctgtatcagaatctgaaaaccttatataaacccctcagacagtttgcttattttattttttatgttgtaaaatgctagtataaacaaacaaattaatgttgttctaaaggctgttaaaaaaaagatgaggactcagaagttcaagctaaatattgtttacattttctggtactctgtgaaagaagagaaaagggagtcatgcattttgctttggacacagtgttttatcacctgttcatttgaagaaaaataataaagtcagaagttcaagtgct

SEQ ID NO: 431754 - DNA, 1467 bp, Homo sapiens
cagcttctggggtgcatttgtgtaattcgatattaatgattcaggattagtcttggaaaagtgcacaggcaaggcttctttcacagctgttctttgagtgggctttgatctcatgtattgtttaaatgtgacttagaagtgatgttttcttctctatggggaaaaaaatagctgcagaattaaaagatgtactggcacttgacactaatcacaaatactaccagcagcccgtcttgaaaaggaattgttattttaacactaagccatgattttgttttcatcctgcccacaggcccaggcatccccatttccacccttcatgatggacgcactgatcaagaaattaaaatcctggaagaaaacaaggaattggaaaatgctttgaaaaatatccagctgcctaaagaggaaattaagaaacttgaagtagatgaaattactttatggtacaagatgattcttcctcctcaatttgacagatcaaagaagtatcccttgctaattcaagtgtatggtggtccctgcagtcagagtgtaaggtctgtatttgctgttaattggatatcttatcttgcaagtaaggaagggatggtcattgccttggtggatggtcgaggaacagctttccaaggtgacaaactcctctatgcagtgtatcgaaagctgggtgtttatgaagttgaagaccagattacagctgtcagaaaattcatagaaatgggtttcattgatgaaaaaagaatagccatatggggctggtcctatggaggatacgtttcatcactggcccttgcatctggaactggtcttttcaaatgtggtatagcagtggctccagtctccagctgggaatattacgcgtctgtctacacagagagattcatgggtctcccaacaaaggatgataatcttgagcactataagaattcaactgtgatggcaagagcagaatatttcagaaatgtagactatcttctcatccacggaacagcagatgataatgtgcactttcaaaactcagcacagattgctaaagctctggttaatgcacaagtggatttccaggcaatgtggtactctgaccagaaccacggcttatccggcctgtccacgaaccacttatacacccacatgacccacttcctaaagcagtgtttctctttgtcagactaaaaacgatgcagatgcaagcctgtatcagaatctgaaaaccttatataaacccctcagacagtttgcttattttattttttatgttgtaaaatgctagtataaacaaacaaattaatgttgttctaaaggctgttaaaaaaaagatgaggactcagaagttcaagctaaatattgtttacattttctggtactctgtgaaagaagagaaaagggagtcatgcattttgctttggacacagtgttttatcacctgttcatttgaagaaaaataataaagtcagaagttcaagtgct

SEQ ID NO: 431755 - DNA, 2285 bp, Homo sapiens
aagaacgcccccaaaatctgtttctaattttacagaaatcttttgaaacttggcacggtattcaaaagtccgtggaaagaaaaaaaccttgtcctggcttcagcttccaactacaaagacagacttggtccttttcaacggttttcacagatccagtgacccacgctctgaagacagaattagctaactttcaaaaacatctggaaaaatgaagacttgggtaaaaatcgtatttggagttgccacctctgctgtgcttgccttattggtgatgtgcattgtcttacgcccttcaagagttcataactctgaagaaaatacaatgagagcactcacactgaaggatattttaaatggaacattttcttataaaacattttttccaaactggatttcaggacaagaatatcttcatcaatctgcagataacaatatagtactttataatattgaaacaggacaatcatataccattttgagtaatagaaccatgaaaagtgtgaatgcttcaaattacggcttatcacctgatcggcaatttgtatatctagaaagtgattattcaaagctttggagatactcttacacagcaacatattacatctatgaccttagcaatggagaatttgtaagaggaaatgagcttcctcgtccaattcagtatttatgctggtcgcctgttgggagtaaattagcatatgtctatcaaaacaatatctatttgaaacaaagaccaggagatccaccttttcaaataacatttaatggaagagaaaataaaatatttaatggaatcccagactgggtttatgaagaggaaatgcttgctacaaaatatgctctctggtggtctcctaatggaaaatttttggcatatgcggaatttaatgatacggatataccagttattgcctattcctattatggcgatgaacaatatcctagaacaataaatattccatacccaaaggctggagctaagaatcccgttgttcggatatttattatcgataccacttaccctgcgtatgtaggtccccaggaagtgcctgttccagcaatgatagcctcaagtgattattatttcagttggctcacgtgggttactgatgaacgagtatgtttgcagtggctaaaaagagtccagaatgtttcggtcctgtctatatgtgacttcagggaagactggcagacatgggattgtccaaagacccaggagcatatagaagaaagcagaactggatgggctggtggattctttgtttcaacaccagttttcagctatgatgccatttcgtactacaaaatatttagtgacaaggatggctacaaacatattcactatatcaaagacactgtggaaaatgctattcaaattacaagtggcaagtgggaggccataaatatattcagagtaacacaggattcactgttttattctagcaatgaatttgaagaataccctggaagaagaaacatctacagaattagcattggaagctatcctccaagcaagaagtgtgttacttgccatctaaggaaagaaaggtgccaatattacacagcaagtttcagcgactacgccaagtactatgcacttgtctgctacggcccaggcatccccatttccacccttcatgatggacgcactgatcaagctacatcacattgttgccacgtatgaacgccctgaaatttggaggctctttccattttcaactgctatcaagacagtcctcctctatcctgtatttgtgatattggttcaaaatagttcacatctcaaagacgaccagttttgctcgcagcagagttgtccaagtatctaattgctctgatactcttcctgctggctctccattatcttttgatttactattaaacaacattatagggttggagttgttggaggccagggacaatgaggcagatgccactttcttcagcactcatgcctgcgattgtccctggacagctttggtgacaagtcaggagactgccttgggattactttggctgtcagctcaatggctcaagtgtaggtgaaaataacaagaaaaaaaaacaaaaacagaatcaatttgggaactctggacaggacaggcattgtgataatgggactgtgaatttagtttcattttaaggttttttttgaaaccttgtgtctaataaggaaatacttttaagaataacagattatatttcttaatttgaccatctcagtcagtgagattgatttcaagtcgacaaggttttgttttaatagaaatcactattagcatata

SEQ ID NO: 431756 - DNA, 1732 bp, Homo sapiens
aagaacgcccccaaaatctgtttctaattttacagaaatcttttgaaacttggcacggtattcaaaagtccgtggaaagaaaaaaaccttgtcctggcttcagcttccaactacaaagacagacttggtccttttcaacggttttcacagatccagtgacccacgctctgaagacagaattagctaactttcaaaaacatctggaaaaatgaagacttgggtaaaaatcgtatttggagttgccacctctgctgtgcttgccttattggtgatgtgcattgtcttacgcccttcaagagttcataactctgaagaaaatacaatgagagcactcacactgaaggatattttaaatggaacattttcttataaaacattttttccaaactggatttcaggacaagaatatcttcatcaatctgcagataacaatatagtactttataatattgaaacaggacaatcatataccattttgagtaatagaaccatgaaaagtgtgaatgcttcaaattacggcttatcacctgatcggcaatttgtatatctagaaagtgattattcaaagctttggagatactcttacacagcaacatattacatctatgaccttagcaatggagaatttgtaagaggaaatgagcttcctcgtccaattcagtatttatgctggtcgcctgttgggagtaaattagcatatgtctatcaaaacaatatctatttgaaacaaagaccaggagatccaccttttcaaataacatttaatggaagagaaaataaaatatttaatggaatcccagactgggtttatgaagaggaaatgcttgctacaaaatatgctctctggtggtctcctaatggaaaatttttggcatatgcggaatttaatgatacggatataccagttattgcctattcctattatggcgatgaacaatatcctagaacaataaatattccatacccaaaggctggagctaagaatcccgttgttcggatatttattatcgataccacttaccctgcgtatgtaggtccccaggaagtgcctgttccagcaatgatagcctcaagtgattattatttcagttggctcacgtgggttactgatgaacgagtatgtttgcagtggctaaaaagagtccagaatgtttcggtcctgtctatatgtgacttcagggaagactggcagacatgggattgtccaaagacccaggagcatatagaagaaagcagaactggatgggctggtggattctttgtttcaacaccagttttcagctatgatgccatttcgtactacaaaatatttagtgacaaggatggctacaaacatattcactatatcaaagacactgtggaaaatgctattcaaattacaagtggcaagtgggaggccataaatatattcagagtaacacaggattcactgttttattctagcaatgaatttgaagaataccctggaagaagaaacatctacagaattagcattggaagctatcctccaagcaagaagtgtgttacttgccatctaaggaaagaaaggtgccaatattacacagcaagtttcagcgactacgccaagtactatgcacttgtctgctacggggaatgaacaacggcttggaaacccgagatgcccacgtcggaggtcaatcattcctcaaactgtagtttcaatggggatagaagatgaacctttgtcctttctaaatttggaaaacatcgt

SEQ ID NO: 431757 - DNA, 254 bp, Homo sapiens
tgtttgtttattttttctgttcatacagattattatttttttgcattaaacagcaaggtttgttgtttttctttctttctttccttctagagaatttgtaagaggaaatgagcttcctcgtccaattcagtatttatgctggtcgcctgttgggagtaaattagtaagtgtttaaatttttgaagtgtttaatcatgtaaataaaagaggagccatttgattttggcctttgttaaatttccctgcctgaaaga

SEQ ID NO: 431758 - DNA, 478 bp, Homo sapiens
aaactggaaacaaattctacatgtaacttcttcagttcagagcagagggtgactgtcacaccagctttttttgttttaacagctacatcacattgttgccacgtatgaacgccctgaaatttggaggctctttccattttcaactgctatcaagacagtcctcctctatcctgtatttgtgatattggttcaaaatagttcacatctcaaagacgaccagttttgctcgcagcagagttgtccaagtatctaattgctctgatactcttcctgctggctctccattatcttttgatttactattaaacaacattatagggttggagttgttggaggccagggacaatgaggcagatgccactttcttcagcactcatgcctgcgattgtccctggacagctttggtgacaagtcaggagactgccttgggattactttggctgtcagctcaatggctcaagtgtaggtgaaaataaca

SEQ ID NO: 431759 - DNA, 3051 bp, Homo sapiens
aagaacgcccccaaaatctgtttctaattttacagaaatcttttgaaacttggcacggtattcaaaagtccgtggaaagaaaaaaaccttgtcctggcttcagcttccaactacaaagacagacttggtccttttcaacggttttcacagatccagtgacccacgctctgaagacagaattagctaactttcaaaaacatctggaaaaatgaagacttgggtaaaaatcgtatttggagttgccacctctgctgtgcttgccttattggtgatgtgcattgtcttacgcccttcaagagttcataactctgaagaaaatacaatgagagcactcacactgaaggatattttaaatggaacattttcttataaaacattttttccaaactggatttcaggacaagaatatcttcatcaatctgcagataacaatatagtactttataatattgaaacaggacaatcatataccattttgagtaatagaaccatgaaaagtgtgaatgcttcaaattacggcttatcacctgatcggcaatttgtatatctagaaagtgattattcaaagctttggagatactcttacacagcaacatattacatctatgaccttagcaatggagaatttgtaagaggaaatgagcttcctcgtccaattcagtatttatgctggtcgcctgttgggagtaaattagcatatgtctatcaaaacaatatctatttgaaacaaagaccaggagatccaccttttcaaataacatttaatggaagagaaaataaaatatttaatggaatcccagactgggtttatgaagaggaaatgcttgctacaaaatatgctctctggtggtctcctaatggaaaatttttggcatatgcggaatttaatgatacggatataccagttattgcctattcctattatggcgatgaacaatatcctagaacaataaatattccatacccaaaggctggagctaagaatcccgttgttcggatatttattatcgataccacttaccctgcgtatgtaggtccccaggaagtgcctgttccagcaatgatagcctcaagtgattattatttcagttggctcacgtgggttactgatgaacgagtatgtttgcagtggctaaaaagagtccagaatgtttcggtcctgtctatatgtgacttcagggaagactggcagacatgggattgtccaaagacccaggagcatatagaagaaagcagaactggatgggctggtggattctttgtttcaacaccagttttcagctatgatgccatttcgtactacaaaatatttagtgacaaggatggctacaaacatattcactatatcaaagacactgtggaaaatgctattcaaattacaagtggcaagtgggaggccataaatatattcagagtaacacaggattcactgttttattctagcaatgaatttgaagaataccctggaagaagaaacatctacagaattagcattggaagctatcctccaagcaagaagtgtgttacttgccatctaaggaaagaaaggtgccaatattacacagcaagtttcagcgactacgccaagtactatgcacttgtctgctacggcccaggcatccccatttccacccttcatgatggacgcactgatcaagaaattaaaatcctggaagaaaacaaggaattggaaaatgctttgaaaaatatccagctgcctaaagaggaaattaagaaacttgaagtagatgaaattactttatggtacaagatgattcttcctcctcaatttgacagatcaaagaagtatcccttgctaattcaagtgtatggtggtccctgcagtcagagtgtaaggtctgtatttgctgttaattggatatcttatcttgcaagtaaggaagggatggtcattgccttggtggatggtcgaggaacagctttccaaggtgacaaactcctctatgcagtgtatcgaaagctgggtgtttatgaagttgaagaccagattacagctgtcagaaaattcatagaaatgggtttcattgatgaaaaaagaatagccatatggggctggtcctatggaggatacgtttcatcactggcccttgcatctggaactggtcttttcaaatgtggtatagcagtggctccagtctccagctgggaatattacgcgtctgtctacacagagagattcatgggtctcccaacaaaggatgataatcttgagcactataagaattcaactgtgatggcaagagcagaatatttcagaaatgtagactatcttctcatccacggaacagcagatgataatgtgcactttcaaaactcagcacagattgctaaagctctggttaatgcacaagtggatttccaggcaatgtggtactctgaccagaaccacggcttatccggcctgtccacgaaccacttatacacccacatgacccacttcctaaagcagtgtttctctttgtcagactaaaaacgatgcagatgcaagcctgtatcagaatctgaaaaccttatataaacccctcagacagtttgcttattttattttttatgttgtaaaatgctagtataaacaaacaaattaatgttgttctaaaggctgttaaaaaaaagatgaggactcagaagttcaagctaaatattgtttacattttctggtactctgtgaaagaagagaaaagggagtcatgcattttgctttggacacagtgttttatcacctgttcatttgaagaaaaataataaagtcagaagttcaagtgctattgtgttgtctgtattcattgatttcaggttccaggttttatcacagaaagaggtgtttgtgcaaagcaagtgcatgaataacattagggtggtcatggaggagaagaatctagaagtggttttggatttctgtcatgagaactccaaatactggaaccaacagctcagagtaggcaaaagcattgttcagaaaatgcaagtgaatcacgtttgagatgtttgcactctatgctgtccctccaagaaatgtttattacatttctc

SEQ ID NO: 431760 - DNA, 2731 bp, Homo sapiens
aagaacgcccccaaaatctgtttctaattttacagaaatcttttgaaacttggcacggtattcaaaagtccgtggaaagaaaaaaaccttgtcctggcttcagcttccaactacaaagacagacttggtccttttcaacggttttcacagatccagtgacccacgctctgaagacagaattagctaactttcaaaaacatctggaaaaatgaagacttgggtaaaaatcgtatttggagttgccacctctgctgtgcttgccttattggtgatgtgcattgtcttacgcccttcaagagttcataactctgaagaaaatacaatgagagcactcacactgaaggatattttaaatggaacattttcttataataacaatatagtactttataatattgaaacaggacaatcatataccattttgagtaatagaaccatgaaaagtgtgaatgcttcaaattacggcttatcacctgatcggcaatttgtatatctagaaagtgattattcaaagctttggagatactcttacacagcaacatattacatctatgaccttagcaatggagaatttgtaagaggaaatgagcttcctcgtccaattcagtatttatgctggtcgcctgttgggagtaaattagcatatgtctatcaaaacaatatctatttgaaacaaagaccaggagatccaccttttcaaataacatttaatggaagagaaaataaaatatttaatggaatcccagactgggtttatgaagaggaaatgcttgctacaaaatatgctctctggtggtctcctaatggaaaatttttggcatatgcggaatttaatgatacggatataccagttattgcctattcctattatggcgatgaacaatatcctagaacaataaatattccatacccaaaggctggagctaagaatcccgttgttcggatatttattatcgataccacttaccctgcgtatgtaggtccccaggaagtgcctgttccagcaatgatagcctcaagtgattattatttcagttggctcacgtgggttactgatgaacgagtatgtttgcagtggctaaaaagagtccagaatgtttcggtcctgtctatatgtgacttcagggaagactggcagacatgggattgtccaaagacccaggagcatatagaagaaagcagaactggatgggctggtggattctttgtttcaacaccagttttcagctatgatgccatttcgtactacaaaatatttagtgacaaggatggctacaaacatattcactatatcaaagacactgtggaaaatgctattcaaattacaagtggcaagtgggaggccataaatatattcagagtaacacaggattcactgttttattctagcaatgaatttgaagaataccctggaagaagaaacatctacagaattagcattggaagctatcctccaagcaagaagtgtgttacttgccatctaaggaaagaaaggtgccaatattacacagcaagtttcagcgactacgccaagtactatgcacttgtctgctacggcccaggcatccccatttccacccttcatgatggacgcactgatcaagaaattaaaatcctggaagaaaacaaggaattggaaaatgctttgaaaaatatccagctgcctaaagaggaaattaagaaacttgaagtagatgaaattactttatggtacaagatgattcttcctcctcaatttgacagatcaaagaagtatcccttgctaattcaagtgtatggtggtccctgcagtcagagtgtaaggtctgtatttgctgttaattggatatcttatcttgcaagtaaggaagggatggtcattgccttggtggatggtcgaggaacagctttccaaggtgacaaactcctctatgcagtgtatcgaaagctgggtgtttatgaagttgaagaccagattacagctgtcagaaaattcatagaaatgggtttcattgatgaaaaaagaatagccatatggggctggtcctatggaggatacgtttcatcactggcccttgcatctggaactggtcttttcaaatgtggtatagcagtggctccagtctccagctgggaatattacgcgtctgtctacacagagagattcatgggtctcccaacaaaggatgataatcttgagcactataagaattcaactgtgatggcaagagcagaatatttcagaaatgtagactatcttctcatccacggaacagcagatgataatgtgcactttcaaaactcagcacagattgctaaagctctggttaatgcacaagtggatttccaggcaatgtggtactctgaccagaaccacggcttatccggcctgtccacgaaccacttatacacccacatgacccacttcctaaagcagtgtttctctttgtcagactaaaaacgatgcagatgcaagcctgtatcagaatctgaaaaccttatataaacccctcagacagtttgcttattttattttttatgttgtaaaatgctagtataaacaaacaaattaatgttgttctaaaggctgttaaaaaaaagatgaggactcagaagttcaagctaaatattgtttacattttctggtactctgtgaaagaagagaaaagggagtcatgcattttgctttggacacagtgttttatcacctgttcatttgaagaaaaataataaagtcagaagttcaagtgct

SEQ ID NO: 431761 - DNA, 878 bp, Homo sapiens
aaacaaagaaaatgtagcgtttctattaaatctttggattaaatatggttgtgtaatgaagtaaatgtcatgtgtatacacttaacattctaaaaatttgtttcttttactttagaaaattcatagaaatgggtttcattgatgaaaaaagaatagccatatggggctggtcctatggaggatacgtttcatcactggcccttgcatctggaactggtcttttcaaatgtggtatagcagtggctccagtctccagctgggaatattacgcgtctgtctacacagagagattcatgggtctcccaacaaaggatgataatcttgagcactataagaattcaactgtgatggcaagagcagaatatttcagaaatgtagactatcttctcatccacggaacagcagatgataatgtgcactttcaaaactcagcacagattgctaaagctctggttaatgcacaagtggatttccaggcaatgtggtactctgaccagaaccacggcttatccggcctgtccacgaaccacttatacacccacatgacccacttcctaaagcagtgtttctctttgtcagactaaaaacgatgcagatgcaagcctgtatcagaatctgaaaaccttatataaacccctcagacagtttgcttattttattttttatgttgtaaaatgctagtataaacaaacaaattaatgttgttctaaaggctgttaaaaaaaagatgaggactcagaagttcaagctaaatattgtttacattttctggtactctgtgaaagaagagaaaagggagtcatgcattttgctttggacacagtgttttatcacctgttcatttgaagaaaaataataaagtcagaagttcaagtgct

SEQ ID NO: 431762 - DNA, 1703 bp, Homo sapiens
agcggagcgcggaggccgctgggacgcggttcagctcattccctgaggccggcccgcgtcccgtcaggcgccgcgcggggttagcgcggggtcagcggaggtcagcgggggtcagcagcagcggctccgagggcgcggcggacgcaggcaggatgtacacgctgctgtcgggcttgtacaagtacatgtttcagaaggacgagtactgcatcctgatcctgggcctggacaatgctgggaagacgaccttcctggagcagtcgaaaacccgatttaacaagaactacaaggggatgagtctatccaaaatcaccaccaccgtgggcctaaacatcggcactgtggatgtgggaaaggctcggctcatgttctgggacttaggagggcaggaagagctgcagtctttgtgggacaagtattatgcggagtgtcacggcgtcatctacgtcattgactccaccgacgaggagaggctggctgagtccaagcaggcgtttgagaaggtggtgaccagcgaggcgctgtgcggtgtccccgtcttggtgctggccaacaagcaggatgtggagacgtgcctctcaatccctgacatcaagacggccttcagcgactgcaccagcaagatcggcaggcgcgattgcctgacccaggcctgctcggccctcacaggcaaaggggtgcgcgagggcatcgagtggatggtgaagtgtgtcgtgcggaatgtgcaccggccgccgcggcagagggacatcacgtaggcgcagccgcgctgccgtcgggacggctggtcccctggtgctggaggagtggcctcctgttggctcccatgctgctgatctggggggtgggtttgctttgctttggggttcttctatttactttgttttctcgaagacaaactttcctctatgtctggaaaagcgtaggcatccggaggctttggaggggagtctggcagcccggctggcccaggccctgcagcggcagcctttccacagggcgcagcggcggcctttcgaggccctttctggggggtctgagggagacctggttgggaattggggctccagtgctcaggctggcttgggctgcatgaggacagccctgtgggaccctcgggagaccccgtggctgtctccgccccatcgaggaggaggcccgtcagccatggctgccatctggcttctgccctgtgaccccgtgaccccggaagtggtctggggctgatcttgccttgaggaagacccaggccatgttcccaaaggccagcgggggccctggattgtgatgcagcctcgggacagggctgaggcctgcgggggaagacctataccccacgcctgggcctggcttcacctcaccctaatcccccgggagggagctgactgatgcaaaaagctgagggggcctgctgggagtggctgtttttatgccccagccccgcaagttggggagtgtttgtgggggtccagagccctcccccagccaggagagaacctcccggaggggttctctgtggggccctgtgtcccctgctcgggagtaaggctggtcctggggtcctccctgcacggaccccactgggcctgccgagtgctgtgttcttcctcagtctggctgtgggcaggagcggcctgcccagtgtcacccagggtgagtgcaaaataaagacggcgagtgtggctctgtccatcccttccctc

SEQ ID NO: 431763 - DNA, 1333 bp, Homo sapiens
ctctgaggtgccactgcccccgggagcactggccacgctgagttctagctgttctcttggagtggctttgcacagaagcagcccggcgtccagagggccgggtgaatcttcacttcctgccttctctggggtggctctgttgcccccagcctgtaaggctggcctcccctacaatctcagccgacaagagggacatctgacgtgcctctcaatccctgacatcaagacggccttcagcgactgcaccagcaagatcggcaggcgcgattgcctgacccaggcctgctcggccctcacaggcaaaggggtgcgcgagggcatcgagtggatggtgaagtgtgtcgtgcggaatgtgcaccggccgccgcggcagagggacatcacgtaggcgcagccgcgctgccgtcgggacggctggtcccctggtgctggaggagtggcctcctgttggctcccatgctgctgatctggggggtgggtttgctttgctttggggttcttctatttactttgttttctcgaagacaaactttcctctatgtctggaaaagcgtaggcatccggaggctttggaggggagtctggcagcccggctggcccaggccctgcagcggcagcctttccacagggcgcagcggcggcctttcgaggccctttctggggggtctgagggagacctggttgggaattggggctccagtgctcaggctggcttgggctgcatgaggacagccctgtgggaccctcgggagaccccgtggctgtctccgccccatcgaggaggaggcccgtcagccatggctgccatctggcttctgccctgtgaccccgtgaccccggaagtggtctggggctgatcttgccttgaggaagacccaggccatgttcccaaaggccagcgggggccctggattgtgatgcagcctcgggacagggctgaggcctgcgggggaagacctataccccacgcctgggcctggcttcacctcaccctaatcccccgggagggagctgactgatgcaaaaagctgagggggcctgctgggagtggctgtttttatgccccagccccgcaagttggggagtgtttgtgggggtccagagccctcccccagccaggagagaacctcccggaggggttctctgtggggccctgtgtcccctgctcgggagtaaggctggtcctggggtcctccctgcacggaccccactgggcctgccgagtgctgtgttcttcctcagtctggctgtgggcaggagcggcctgcccagtgtcacccagggtgagtgcaaaataaagacggcgagtgtggctctgtccatcccttccctc

SEQ ID NO: 431764 - DNA, 1703 bp, Homo sapiens
agcggagcgcggaggccgctgggacgcggttcagctcattccctgaggccggcccgcgtcccgtcaggcgccgcgcggggttagcgcggggtcagcggaggtcagcgggggtcagcagcagcggctccgagggcgcggcggacgcaggcaggatgtacacgctgctgtcgggcttgtacaagtacatgtttcagaaggacgagtactgcatcctgatcctgggcctggacaatgctgggaagacgaccttcctggagcagtcgaaaacccgatttaacaagaactacaaggggatgagtctatccaaaatcaccaccaccgtgggcctaaacatcggcactgtggatgtgggaaaggctcggctcatgttctgggacttaggagggcaggaagagctgcagtctttgtgggacaagtattatgcggagtgtcacggcgtcatctacgtcattgactccaccgacgaggagaggctggctgagtccaagcaggcgtttgacgtgcctctcaatccctgacatcaagacggccttcagcgactgcaccagcaagatcggcaggcgcgattgcctgacccaggcctgctcggccctcacagggtgagtgggggctgcacctgcgggggctttggggaccgagaccccccgcctcacacccgctgtcttcacagcaaaggggtgcgcgagggcatcgagtggatggtgaagtgtgtcgtgcggaatgtgcaccggccgccgcggcagagggacatcacgtaggcgcagccgcgctgccgtcgggacggctggtcccctggtgctggaggagtggcctcctgttggctcccatgctgctgatctggggggtgggtttgctttgctttggggttcttctatttactttgttttctcgaagacaaactttcctctatgtctggaaaagcgtaggcatccggaggctttggaggggagtctggcagcccggctggcccaggccctgcagcggcagcctttccacagggcgcagcggcggcctttcgaggccctttctggggggtctgagggagacctggttgggaattggggctccagtgctcaggctggcttgggctgcatgaggacagccctgtgggaccctcgggagaccccgtggctgtctccgccccatcgaggaggaggcccgtcagccatggctgccatctggcttctgccctgtgaccccgtgaccccggaagtggtctggggctgatcttgccttgaggaagacccaggccatgttcccaaaggccagcgggggccctggattgtgatgcagcctcgggacagggctgaggcctgcgggggaagacctataccccacgcctgggcctggcttcacctcaccctaatcccccgggagggagctgactgatgcaaaaagctgagggggcctgctgggagtggctgtttttatgccccagccccgcaagttggggagtgtttgtgggggtccagagccctcccccagccaggagagaacctcccggaggggttctctgtggggccctgtgtcccctgctcgggagtaaggctggtcctggggtcctccctgcacggaccccactgggcctgccgagtgctgtgttcttcctcagtctggctgtgggcaggagcggcctgcccagtgtcacccagggtgagtgcaaaataaagacggcgagtgtggctctgtccatcccttccctc

SEQ ID NO: 431765 - DNA, 1774 bp, Homo sapiens
agcggagcgcggaggccgctgggacgcggttcagctcattccctgaggccggcccgcgtcccgtcaggcgccgcgcggggttagcgcggggtcagcggaggtcagcgggggtcagcagcagcggctccgagggcgcggcggacgcaggcaggatgtacacgctgctgtcgggcttgtacaagtacatgtttcagaaggacgagtactgcatcctgatcctgggcctggacaatgctgggaagacgaccttcctggagcagtcgaaaacccgatttaacaagaactacaaggggatgagtctatccaaaatcaccaccaccgtgggcctaaacatcggcactgtggatgtgggaaaggctcggctcatgttctgggacttaggagggcaggaagagctgcagtctttgtgggacaagtattatgcggagtgtcacggcgtcatctacgtcattgactccaccgacgaggagaggctggctgagtccaagcaggcgtttgagaaggtggtgaccagcgaggcgctgtgcggtgtccccgtcttggtgctggccaacaagcaggatgtggagacgtgcctctcaatccctgacatcaagacggccttcagcgactgcaccagcaagatcggcaggcgcgattgcctgacccaggcctgctcggccctcacagggtgagtgggggctgcacctgcgggggctttggggaccgagaccccccgcctcacacccgctgtcttcacagcaaaggggtgcgcgagggcatcgagtggatggtgaagtgtgtcgtgcggaatgtgcaccggccgccgcggcagagggacatcacgtaggcgcagccgcgctgccgtcgggacggctggtcccctggtgctggaggagtggcctcctgttggctcccatgctgctgatctggggggtgggtttgctttgctttggggttcttctatttactttgttttctcgaagacaaactttcctctatgtctggaaaagcgtaggcatccggaggctttggaggggagtctggcagcccggctggcccaggccctgcagcggcagcctttccacagggcgcagcggcggcctttcgaggccctttctggggggtctgagggagacctggttgggaattggggctccagtgctcaggctggcttgggctgcatgaggacagccctgtgggaccctcgggagaccccgtggctgtctccgccccatcgaggaggaggcccgtcagccatggctgccatctggcttctgccctgtgaccccgtgaccccggaagtggtctggggctgatcttgccttgaggaagacccaggccatgttcccaaaggccagcgggggccctggattgtgatgcagcctcgggacagggctgaggcctgcgggggaagacctataccccacgcctgggcctggcttcacctcaccctaatcccccgggagggagctgactgatgcaaaaagctgagggggcctgctgggagtggctgtttttatgccccagccccgcaagttggggagtgtttgtgggggtccagagccctcccccagccaggagagaacctcccggaggggttctctgtggggccctgtgtcccctgctcgggagtaaggctggtcctggggtcctccctgcacggaccccactgggcctgccgagtgctgtgttcttcctcagtctggctgtgggcaggagcggcctgcccagtgtcacccagggtgagtgcaaaataaagacggcgagtgtggctctgtccatcccttccctc

SEQ ID NO: 431766 - DNA, 375 bp, Homo sapiens
  misc_feature (44)..(44): n is a, c, g, or t
  misc_feature (67)..(67): n is a, c, g, or t
ccccccaatattggccatatcaccatccaaaaaaaaaaaaaaangcctataggcacggagagaaacntaataactgggagatgaaacaggaagctctatgacacacttgatcgaatatgacagacaccgaaaatcacgactcatccccctccagcacctctacctgttgcccgccgatcacagccggaatgcagctgaaagattccctggggcctggttccaaccgcccactgtggactctgaggcctctgcatttgcgggtggtctgcctgtgatattttggtcatgggctggtctggtcggtttcccatttgtctggccagtctctatgtgtcttaatcccttgtccttcattaaaagcaaaactaaagaaaa

SEQ ID NO: 431767 - DNA, 363 bp, Homo sapiens
cggcgaatgctagaacgcgcgacaaccgtcgcaaaatcgtataagcttagtggaaaaataactgggagatgaaacaggaagctctatgacacacttgatcgaatatgacagacaccgaaaatcacgactcatccccctccagcacctctacctgttgcccgccgatcacagccggaatgcagctgaaagattccctggggcctggttccaaccgcccactgtggactctgaggcctctgcatttgcgggtggtctgcctgtgatattttggtcatgggctggtctggtcggtttcccatttgtctggccagtctctatgtgtcttaatcccttgtccttcattaaaagcaaaactaaagaaaa

SEQ ID NO: 431768 - DNA, 735 bp, Homo sapiens
  misc_feature (74)..(74): n is a, c, g, or t
cttagcgtctacgatgtagatatcttcacaattatcactttatacatgataaaattgaaacttgggagccttgnaaggaagcaaatgaagccataagggcaaggccctgatgcaatagaactggcgtccttgtgagaataggaagatgccaggagtgtgatgcacaggtgaaggaccacgtgagaatgcagcagatggcagcttgctcctggcacagtcttttctctactcacgcccaaagttacggaggacccagcaaccatctcctgcagcccctgaaaacctcttgactcttctgtgatgtccccagtgatccagcagccccggccttcttttgatggcttgaacatttggtcttcattgaacagtttgtatattggaaacttgccagcctccatccacattccaacctccgtctgcatccctcgaataactgggagatgaaacaggaagctctatgacacacttgatcgaatatgacagacaccgaaaatcacgactcatccccctccagcacctctacctgttgcccgccgatcacagccggaatgcagctgaaagattccctggggcctggttccaaccgcccactgtggactctgaggcctctgcatttgcgggtggtctgcctgtgatattttggtcatgggctggtctggtcggtttcccatttgtctggccagtctctatgtgtcttaatcccttgtccttcattaaaagcaaaactaaagaaaa

SEQ ID NO: 431769 - DNA, 395 bp, Homo sapiens
  misc_feature (59)..(59): n is a, c, g, or t
  misc_feature (75)..(75): n is a, c, g, or t
  misc_feature (83)..(83): n is a, c, g, or t
  misc_feature (85)..(85): n is a, c, g, or t
cccacccccccagaagaggggaaagacagtaaataaccacacgctgcccaatcaaaaanagctcacataactggncacgaacntngagaataactgggagatgaaacaggaagctctatgacacacttgatcgaatatgacagacaccgaaaatcacgactcatccccctccagcacctctacctgttgcccgccgatcacagccggaatgcagctgaaagattccctggggcctggttccaaccgcccactgtggactctgaggcctctgcatttgcgggtggtctgcctgtgatattttggtcatgggctggtctggtcggtttcccatttgtctggccagtctctatgtgtcttaatcccttgtccttcattaaaagcaaaactaaagaaaa

SEQ ID NO: 431770 - DNA, 366 bp, Homo sapiens
  misc_feature (8)..(8): n is a, c, g, or t
  misc_feature (31)..(31): n is a, c, g, or t
  misc_feature (54)..(54): n is a, c, g, or t
ggcacganctcgtgcgaattcggcacgaggnggaaggtggagccaccagcctcnccctgaataactgggagatgaaacaggaagctctatgacacacttgatcgaatatgacagacaccgaaaatcacgactcatccccctccagcacctctacctgttgcccgccgatcacagccggaatgcagctgaaagattccctggggcctggttccaaccgcccactgtggactctgaggcctctgcatttgcgggtggtctgcctgtgatattttggtcatgggctggtctggtcggtttcccatttgtctggccagtctctatgtgtcttaatcccttgtccttcattaaaagcaaaactaaagaaaa

SEQ ID NO: 431771 - DNA, 517 bp, Homo sapiens
  misc_feature (24)..(24): n is a, c, g, or t
  misc_feature (30)..(33): n is a, c, g, or t
tgctgaactgtttgcagggggcanaggaannnnaaaaaatactgttgtccattcactatgtcagatgctaatccagcgtgcgtcctggcagaggttgaagggggctcctcaagtcccaggtccagcttggtgtggttcagctactcgagagacatctgctgctaatggatgagcagtcaacctggacgcaggaaatcattttttatttggaataactgggagatgaaacaggaagctctatgacacacttgatcgaatatgacagacaccgaaaatcacgactcatccccctccagcacctctacctgttgcccgccgatcacagccggaatgcagctgaaagattccctggggcctggttccaaccgcccactgtggactctgaggcctctgcatttgcgggtggtctgcctgtgatattttggtcatgggctggtctggtcggtttcccatttgtctggccagtctctatgtgtcttaatcccttgtccttcattaaaagcaaaactaaagaaaa

SEQ ID NO: 431772 - DNA, 375 bp, Homo sapiens
tggggaggatggttcgcggacctgaccttcatatctatcctcattctttacatcaccgggcacagaacaataactgggagatgaaacaggaagctctatgacacacttgatcgaatatgacagacaccgaaaatcacgactcatccccctccagcacctctacctgttgcccgccgatcacagccggaatgcagctgaaagattccctggggcctggttccaaccgcccactgtggactctgaggcctctgcatttgcgggtggtctgcctgtgatattttggtcatgggctggtctggtcggtttcccatttgtctggccagtctctatgtgtcttaatcccttgtccttcattaaaagcaaaactaaagaaaa

SEQ ID NO: 431773 - DNA, 369 bp, Homo sapiens
caccagtacactctacacccgcgcctgcgcagccagcgaaaaccattacccttaacagaaccaataactgggagatgaaacaggaagctctatgacacacttgatcgaatatgacagacaccgaaaatcacgactcatccccctccagcacctctacctgttgcccgccgatcacagccggaatgcagctgaaagattccctggggcctggttccaaccgcccactgtggactctgaggcctctgcatttgcgggtggtctgcctgtgatattttggtcatgggctggtctggtcggtttcccatttgtctggccagtctctatgtgtcttaatcccttgtccttcattaaaagcaaaactaaagaaaa

SEQ ID NO: 431774 - DNA, 368 bp, Homo sapiens
  misc_feature (42)..(42): n is a, c, g, or t
  misc_feature (51)..(51): n is a, c, g, or t
  misc_feature (61)..(61): n is a, c, g, or t
cccccccccaccccaacgtcaagagggaagcagaaacccacnatacctcangataccgggnaataactgggagatgaaacaggaagctctatgacacacttgatcgaatatgacagacaccgaaaatcacgactcatccccctccagcacctctacctgttgcccgccgatcacagccggaatgcagctgaaagattccctggggcctggttccaaccgcccactgtggactctgaggcctctgcatttgcgggtggtctgcctgtgatattttggtcatgggctggtctggtcggtttcccatttgtctggccagtctctatgtgtcttaatcccttgtccttcattaaaagcaaaactaaagaaaa

SEQ ID NO: 431775 - DNA, 362 bp, Homo sapiens
ccgcgcgggtgtggaggtagggtgtggtaagatgacgggataggcgcggcctttcaataactgggagatgaaacaggaagctctatgacacacttgatcgaatatgacagacaccgaaaatcacgactcatccccctccagcacctctacctgttgcccgccgatcacagccggaatgcagctgaaagattccctggggcctggttccaaccgcccactgtggactctgaggcctctgcatttgcgggtggtctgcctgtgatattttggtcatgggctggtctggtcggtttcccatttgtctggccagtctctatgtgtcttaatcccttgtccttcattaaaagcaaaactaaagaaaa

SEQ ID NO: 431776 - DNA, 898 bp, Homo sapiens
ttttttttccttcttagtcgtgtgtacatcattgggaatggagggaaataaatgactggatggtcgctgctttttaagtttcaaattgacattccagacaagcggtgcctgagcccgtgcctgtcttcagatcttcacagcacagttcctgggaaggtggagccaccagcctctccctgaataactgggagatgaaacaggaagctctatgacacacttgatcgaatatgacagacaccgaaaatcacgactcatccccctccagcacctctacctgttgcccgccgatcacagccggaatgcagctgaaagattccctggggcctggttccaaccgcccactgtggactctgaggcctctgcatttgcgggtggtctgcctgtgatattttggtcatgggctggtctggtcggtttcccatttgtctggccagtctctatgtgtcttaatcccttgtccttcattaaaagcaaaactaaagaaaaaaaaaaaaaaaaaaaaaaaatttttggggggctgggccgaaaaagtttttaaacacaattgtttggggcggggggcccaagggtgacggaacagctggcccatcgcgtgctcccaagggaacgcgcggccggaatagcgcgtgggtctctccaccacaaaaaaaaaagcggcggcgggcggaaccggagcgtgtctggaccaacccaaagagaggtccgggggcaaccggggatcacacacagggaggccaagggagcgaatataaaatagcagaggcaggagataagcagacgagaccagacaacagcacaacagacaccacagcagacggaccgcgacagcagtgcacacacagagcagagactatcaccagggacataaaccgacagagaagaacaacaacaagtcgcc

SEQ ID NO: 431777 - DNA, 696 bp, Homo sapiens
ttttttttccttcttagtcgtgtgtacatcattgggaatggagggaaataaatgactggatggtcgctgctttttaagtttcaaattgacattccagacaagcggtgcctgagcccgtgcctgtcttcagatcttcacagcacagttcctgggaaggtggagccaccagcctctccctgaataactgggagatgaaacaggaagctctatgacacacttgatcgaatatgacagacaccgaaaatcacgactcatccccctccagcacctctacctgttgcccgccgatcacagccggaatgcagctgaaagattccctggggcctggttccaaccgcccactgtggactctgaggcctctgcatttgcgggtggtctgcctgtgatattttggtcatgggctggtctggtcggtttcccatttgtctggccagtctctatgtgtcttaatcccttgtccttcattaaaagcaaaactaaagaaaacaataatcatatcctctcctcttcgctctctctacccctctccctctacacctctaactccctccccttctacccaacaatttcggcccgcttggcccagcccatttttacctctgccaggtttatcaatgcgctccgaattcgggtccacttggcccaattcccccttaagggggcccgtttactccatggcccgcgttttcgcgtccg

SEQ ID NO: 431778 - DNA, 862 bp, Homo sapiens
tttttttcgaattatcaacttagtcctttattaacaacttcaaggtgcaaatttgtgagattccagacaggcagttcaatgagcagctggattttgctggttcccaagagcaaggaaaattcccttgttttaaaaagccagatccatttggaatagtctttcttccccacatattacagcatgaacgtgactctaaagtacctgccgagggtctttctttttgtgacggtgggcgctgttccccactgtcgtggacttctcacagcgctcagtgtgcattcggttgcttctctccataacgcctctcagctaactgtgctgtttctgtgctcctgggttgttaatgttcaagtcttggctctataccattttccttatcatttaggattccactgggaagacatcactaagttgtgaaatcaaacttcatgagttggctgagatcatagggttgggtgtcctctgagcacttgcaggctgggggaagacagaaaacctggacaccttgcaattgtttgcaacaaagtggaaaaactaaagtagttttgatatgtgcattagtttgcttggactgctataacgaaatactacttggtggcttaaacaacagaaatttcttttcttacagtcctggaggctggaagtgcaaaaggaaggtgtcggcaagatcgtttttttctgagagctctctccttggcttgcagatggcagcttgctcctggcacagtcttttctctgtatgtgctcatgtctgtgtcctgatttccatttcctagtagggccagtcaaattggattagggcctaaagtaattatctcattttactttacttctttaaaggccatatgtccaaatacagtca

SEQ ID NO: 431779 - DNA, 435 bp, Homo sapiens
ttttttttccttcttagtcgtgtgtacatcattgggaatggagggaaataaatgactggatggtcgctgctttttaagtttcaaattgacattccagacaagcggtgcctgagcccgtgcctgtcttcagatcttcacagcacagttcctgggaaggtggagccaccagcctctccctggtgagtatgtttctgtcatttttagggttgcttctgcagtttgccttggagtctgggctgtgggaaaggctgctgcgtcctgggtgaggacactgcgtttctttcagactttgaagatctgtcgttttagaaaagtggctgcctctgtcaccagccccatggttactgtcctttagtgtgactgtcaggaggtgtttctcagtccttcgttgtaagaatgtagatgccggttgcaccttctgttgtcttggaagag

SEQ ID NO: 431780 - DNA, 646 bp, Homo sapiens
  misc_feature (373)..(373): n is a, c, g, or t
cacaataatttaaacagctttcttatttcttaacttctctgggtattttgtgtgctactgtatcttgtgaatgaatctcaagaggaaggatgaagcttttccaaaatcacatgccttcatctcattttacagaaaaatttgtgcctaatattaaccaaaggaaatggggagcggcagggccagtgggttttcatggtgaactgagggttgcatcttggacaggttgcatgtggaagggacagcagggttcccaaggaagctttgcacggtcatgggtagagccatcccttcttcatccatagtgaatatggctggaaatagcgggtagtcttggatttgacctccctcccatggaagtgctgtctccagctcnctcctggaaaaactgctttctccccaaagtgtgtctgagcagcagatttaagcatgaagttggttttgtggggctacagtatggactttgggaagatggtgccatctgtatttctgattctaccgtccctctgtctgtctttggaagtatcctttcacttgtttgggagactgagaatgattttctgcaaacagtgagccagaccatgctggtctcaagcggcagagcagttattaacagaatccccggtcgaccaatcggtgaaatccccgt

SEQ ID NO: 431781 - DNA, 396 bp, Homo sapiens
ttttttttccttcttagtcgtgtgtacatcattgggaatggagggaaataaatgactggatggtcgctgctttttaagtttcaaattgacattccagacaagcggtgcctgagcccgtgcctgtcttcagatcttcacagcacagttccacctctacctgttgcccgccgatcacagccggaatgcagctgaaagattccctggggcctggttccaaccgcccactgtggactctgaggcctctgcatttgcgggtggtctgcctgtgatattttggtcatgggctggtctggtcggtttcccatttgtctggccagtctctatgtgtcttaatcccttgtccttcattaaaagcaaaactaaagaaaaacaatgaaaacaaacagaaaaacatgt

SEQ ID NO: 431782 - DNA, 1245 bp, Homo sapiens
tttttttcgaattatcaacttagtcctttattaacaacttcaaggtgcaaatttgtgagattccagacaggcagttcaatgagcagctggattttgctggttcccaagagcaaggaaaattcccttgttttaaaaagccagatccatttggaatagtctttcttccccacatattacagcatgaacgtgactctaaagtacctgccgagggtctttctttttgtgacggtgggcgctgttccccactgtcgtggacttctcacagcgctcagtgtgcattcggttgcttctctccataacgcctctcagctaactgtgctgtttctgtgctcctgggttgttaatgttcaagtcttggctctataccattttccttatcatttaggattccactgggaagacatcactaagttgtgaaatcaaacttcatgagttggctgagatcatagggttgggtgtcctctgagcacttgcaggctgggggaagacagaaaacctggacaccttgcaattgtttgcaacaaagtggaaaaactaaagtagttttgatatgtgcattagtttgcttggactgctataacgaaatactacttggtggcttaaacaacagaaatttcttttcttacagtcctggaggctggaagtgcaaaaggaaggtgtcggcaagatcgtttttttctgagagctctctccttggcttgcagatggcagcttgctcctggcacagtcttttctctactcacgcccaaagttacggaggacccagcaaccatctcctgcagcccctgaaaacctcttgactcttctgtgatgtccccagtgatccagcagccccggccttcttttgatggcttgaacatttggtcttcattgaacagtttgtatattggaaacttgccagcctccatccacattccaacctccgtctgcatccctcgaataactgggagatgaaacaggaagctctatgacacacttgatcgaatatgacagacaccgaaaatcacgactcatccccctccagcacctctacctgttgcccgccgatcacagccggaatgcagctgaaagattccctggggcctggttccaaccgcccactgtggactctgaggcctctgcatttgcgggtggtctgcctgtgatattttggtcatgggctggtctggtcggtttcccatttgtctggccagtctctatgtgtcttaatcccttgtccttcattaaaagcaaaactaaagaaaa

SEQ ID NO: 431783 - DNA, 796 bp, Homo sapiens
ttttttttccttcttagtcgtgtgtacatcattgggaatggagggaaataaatgactggatggtcgctgctttttaagtttcaaattgacattccagacaagcggtgcctgagcccgtgcctgtcttcagatcttcacagcacagttcctgggaaggtggagccaccagcctctccctgtcctggaggctggaagtgcaaaaggaaggtgtcggcaagatcgtttttttctgagagctctctccttggcttgcagatggcagcttgctcctggcacagtcttttctctactcacgcccaaagttacggaggacccagcaaccatctcctgcagcccctgaaaacctcttgactcttctgtgatgtccccagtgatccagcagccccggccttcttttgatggcttgaacatttggtcttcattgaacagtttgtatattggaaacttgccagcctccatccacattccaacctccgtctgcatccctcgaataactgggagatgaaacaggaagctctatgacacacttgatcgaatatgacagacaccgaaaatcacgactcatccccctccagcacctctacctgttgcccgccgatcacagccggaatgcagctgaaagattccctggggcctggttccaaccgcccactgtggactctgaggcctctgcatttgcgggtggtctgcctgtgatattttggtcatgggctggtctggtcggtttcccatttgtctggccagtctctatgtgtcttaatcccttgtccttcattaaaagcaaaactaaagaaaa

SEQ ID NO: 431784 - DNA, 865 bp, Homo sapiens
gtctctctttcagacttttttttggttttatggtggtaaatacaacccacttggcctttcccctgagactactggttcttttgtcactggagtcccagagatcagggtttgaactagcctaccacttactggtcatgtaactttgggcaattcagtttgcatccctaagcctcaatgtcttcatctgtaggatggaggtaaccataatgcctgtctcagaggctgctgctagtgttaactgtgggacacaacacagagtaaggcacagacgaggtgtgcagaaaacatcagcttcgtggttttttactcttctgcacttgctgtagcattctgcaaagctattattcctttcctagaactcacgcccaaagttacggaggacccagcaaccatctcctgcagcccctgaaaacctcttgactcttctgtgatgtccccagtgatccagcagccccggccttcttttgatggcttgaacatttggtcttcattgaacagtttgtatattggaaacttgccagcctccatccacattccaacctccgtctgcatccctcgaataactgggagatgaaacaggaagctctatgacacacttgatcgaatatgacagacaccgaaaatcacgactcatccccctccagcacctctacctgttgcccgccgatcacagccggaatgcagctgaaagattccctggggcctggttccaaccgcccactgtggactctgaggcctctgcatttgcgggtggtctgcctgtgatattttggtcatgggctggtctggtcggtttcccatttgtctggccagtctctatgtgtcttaatcccttgtccttcattaaaagcaaaactaaagaaaa

SEQ ID NO: 431785 - DNA, 555 bp, Homo sapiens
gtctctccttttccccctccccgccaagaacctcggttttcatctccactcacgcccaaagttacggaggacccagcaaccatctcctgcagcccctgaaaacctcttgactcttctgtgatgtccccagtgatccagcagccccggccttcttttgatggcttgaacatttggtcttcattgaacagtttgtatattggaaacttgccagcctccatccacattccaacctccgtctgcatccctcgaataactgggagatgaaacaggaagctctatgacacacttgatcgaatatgacagacaccgaaaatcacgactcatccccctccagcacctctacctgttgcccgccgatcacagccggaatgcagctgaaagattccctggggcctggttccaaccgcccactgtggactctgaggcctctgcatttgcgggtggtctgcctgtgatattttggtcatgggctggtctggtcggtttcccatttgtctggccagtctctatgtgtcttaatcccttgtccttcattaaaagcaaaactaaagaaaa

SEQ ID NO: 431786 - DNA, 871 bp, Homo sapiens
ttttttttccttcttagtcgtgtgtacatcattgggaatggagggaaataaatgactggatggtcgctgctttttaagtttcaaattgacattccagacaagcggtgcctgagcccgtgcctgtcttcagatcttcacagcacagttcctgggaaggtggagccaccagcctctccctgactcacgcccaaagttacggaggacccagcaaccatctcctgcagcccctgaaaacctcttgactcttctgtgatgtccccagtgatccagcagccccggccttcttttgatggcttgaacatttggtcttcattgaacagtttgtatattggaaacttgccagcctccatccacattccaacctccgtctgcatccctcggtacaaaatggttcaatctgtctacctcctttcacattccaccaagatattccaaggtccagggttcctttgaccacctcacacctaacaagttccctcactgtctctcactctcccctgaagattctaagctgcctctgtcctgctaaaactgtagacctgagaatgaagtaaggtgcttcagaataactgggagatgaaacaggaagctctatgacacacttgatcgaatatgacagacaccgaaaatcacgactcatccccctccagcacctctacctgttgcccgccgatcacagccggaatgcagctgaaagattccctggggcctggttccaaccgcccactgtggactctgaggcctctgcatttgcgggtggtctgcctgtgatattttggtcatgggctggtctggtcggtttcccatttgtctggccagtctctatgtgtcttaatcccttgtccttcattaaaagcaaaactaaagaaaa

SEQ ID NO: 431787 - DNA, 523 bp, Homo sapiens
  misc_feature (498)..(498): n is a, c, g, or t
ttttttttccttcttagtcgtgtgtacatcattgggaatggagggaaataaatgactggatggtcgctgctttttaagtttcaaattgacattccagacaagcggtgcctgagcccgtgcctgtcttcagatcttcacagcacagttcctgggaaggtggagccaccagcctctccctgaataactgggagatgaaacaggaagctctatgacacacttgatcgaatatgacagacaccgaaaatcacgactcatccccctccagcacctctacctgttgcccgccgatcacagccggaatgcagctgaaagattccctggggcctggttccaaccgcccactgtggactctgaggcctctgcatttgcgggtggtctgcctgtgatattttggtcatgggctggtctggtcggtttcccatttgtctggccagtctctatgtgtcttaatcccttgtccttcattaaaagcaaaactaaagaaaagaaaaacaaaantatttggttttatctggctcttaaa

SEQ ID NO: 431788 - DNA, 1374 bp, Homo sapiens
  misc_feature (1349)..(1349): n is a, c, g, or t
tttttttcgaattatcaacttagtcctttattaacaacttcaaggtgcaaatttgtgagattccagacaggcagttcaatgagcagctggattttgctggttcccaagagcaaggaaaattcccttgttttaaaaagccagatccatttggaatagtctttcttccccacatattacagcatgaacgtgactctaaagtacctgccgagggtctttctttttgtgacggtgggcgctgttccccactgtcgtggacttctcacagcgctcagtgtgcattcggttgcttctctccataacgcctctcagctaactgtgctgtttctgtgctcctgggttgttaatgttcaagtcttggctctataccattttccttatcatttaggattccactgggaagacatcactaagttgtgaaatcaaacttcatgagttggctgagatcatagggttgggtgtcctctgagcacttgcaggctgggggaagacagaaaacctggacaccttgcaattgtttgcaacaaagtggaaaaactaaagtagttttgatatgtgcattagtttgcttggactgctataacgaaatactacttggtggcttaaacaacagaaatttcttttcttacagtcctggaggctggaagtgcaaaaggaaggtgtcggcaagatcgtttttttctgagagctctctccttggcttgcagatggcagcttgctcctggcacagtcttttctctactcacgcccaaagttacggaggacccagcaaccatctcctgcagcccctgaaaacctcttgactcttctgtgatgtccccagtgatccagcagccccggccttcttttgatggcttgaacatttggtcttcattgaacagtttgtatattggaaacttgccagcctccatccacattccaacctccgtctgcatccctcggtacaaaatggttcaatctgtctacctcctttcacattccaccaagatattccaaggtccagggttcctttgaccacctcacacctaacaagttccctcactgtctctcactctcccctgaagattctaagctgcctctgtcctgctaaaactgtagacctgagaatgaagtaaggtgcttcagaataactgggagatgaaacaggaagctctatgacacacttgatcgaatatgacagacaccgacacctctacctgttgcccgccgatcacagccggaatgcagctgaaagattccctggggcctggttccaaccgcccactctgcatttgcgggtggtctgcctgtgatattttggtcatgggctggtctggtcggtttcccatttgtctggccaggaaaaacaaaantatttggttttatctggctcttaaa

SEQ ID NO: 431789 - DNA, 1598 bp, Homo sapiens
  misc_feature (373)..(373): n is a, c, g, or t
cacaataatttaaacagctttcttatttcttaacttctctgggtattttgtgtgctactgtatcttgtgaatgaatctcaagaggaaggatgaagcttttccaaaatcacatgccttcatctcattttacagaaaaatttgtgcctaatattaaccaaaggaaatggggagcggcagggccagtgggttttcatggtgaactgagggttgcatcttggacaggttgcatgtggaagggacagcagggttcccaaggaagctttgcacggtcatgggtagagccatcccttcttcatccatagtgaatatggctggaaatagcgggtagtcttggatttgacctccctcccatggaagtgctgtctccagctcnctcctggaaaaactgctttctccccaaagtgtgtctgagcagcagatttaagcatgaagttggttttgtggggctacagtatggactttgggaagatggtgccatctgtatttctgattctaccgtccctctgtctgtctttggaagtatcctttcacttgtttgggagactgagaatgattttctgcaaacagtgagccagaccatgctggtctcaagcggcagagcagttattaacagaatcacagtctttctggagctgctgtcagtcctgtgctgtcctcagggcctttgcttggtcaggggccccacttcttatccacccttccctctacctcaccgaggctgctaggcccaggtgtattgtgattatttgatgcacctgggaggccatgtctcccggggagtctcaggacctcattgggctggaattccacggggatctctcattgggtctctttgggcctttggagaggggagtgcagggcaccacctgggcgaacacctgtgccatcctgtaagtccttgtgtgactcttcatccaagtcaacaggggcatgtaggggaagagcctcagggcccatcaggagtcagaccctgaccaggaagtcagaactgaatcaacttttcaataaacacacaggctggccccaaacaaagcagcaggcttttgggaacatctgccttttcagtctcttctgaattctgtttatgtggacaccccatgtcccgcaccaccattgccgccagcaatgtttgttgcttgccaatatttgaatagatgctgataaatttgattctctggcttattgtggcattcatgatatgtctttcccttttcagtttccatgtactagagcgactgtcagtgtggttggcagtgacctgtgtttttcatgcatgtttttgtttcagaataataactgggagatgaaacaggaagctctatgacacacttgatcgaatatgacagacaccgaaaatcacgactcatccccctccagcacctctacctgttgcccgccgatcacagccggaatgcagctgaaagattccctggggcctggttccaaccgcccactgtggactctgaggcctctgcatttgcgggtggtctgcctgtgatattttggtcatgggctggtctggtcggtttcccatttgtctggccagtctctatgtgtcttaatcccttgtccttcattaaaagcaaaactaaagaaaa

SEQ ID NO: 431790 - DNA, 403 bp, Homo sapiens
ctttgactgatcattccaagaacaaaaaattgaccagcccaggcccaccttgccagaatcggggacaataactgggagatgaaacaggaagctctatgacacacttgatcgaatatgacagacaccgaaaatcacgactcatccccctccagcacctctacctgttgcccgccgatcacagccggaatgcagctgaaagattccctggggcctggttccaaccgcccactgtggactctgaggcctctgcatttgcgggtggtctgcctgtgatattttggtcatgggctggtctggtcggtttcccatttgtctggccagtctctatgtgtcttaatcccttgtccttcattaaaagcaaaactaaagaaaaaaaaccaccatggcctctttggcctaagca

SEQ ID NO: 431791 - DNA, 540 bp, Homo sapiens
ttttttttccttcttagtcgtgtgtacatcattgggaatggagggaaataaatgactggatggtcgctgctttttaagtttcaaattgacattccagacaagcggtgcctgagcccgtgcctgtcttcagatcttcacagcacagttcctgggaaggtggagccaccagcctctccctgaataactgggagatgaaacaggaagctctatgacacacttgatcgaatatgacagacaccgaaaatcacgactcatccccctccagcacctctacctgttgcccgccgatcacagccggaatgcagctgaaagattccctggggcctggttccaaccgcccactgtggactctgaggcctctgcatttgcgggtggtctgcctgtgatattttggtcatgggctggtctggtcggtttcccatttgtctggccagtctctatgtgtcttaatcccttgtccttcattaaaagcaaaactaaagaaaaggggggggcgcccaaacatactggcctcgttggactcaaaaaaaaagctttgtg

SEQ ID NO: 431792 - DNA, 508 bp, Homo sapiens
ttttttttccttcttagtcgtgtgtacatcattgggaatggagggaaataaatgactggatggtcgctgctttttaagtttcaaattgacattccagacaagcggtgcctgagcccgtgcctgtcttcagatcttcacagcacagttcctgggaaggtggagccaccagcctctccctgaataactgggagatgaaacaggaagctctatgacacacttgatcgaatatgacagacaccgaaaatcacgactcatccccctccagcacctctacctgttgcccgccgatcacagccggaatgcagctgaaagattccctggggcctggttccaaccgcccactgtggactctgaggcctctgcatttgcgggtggtctgcctgtgatattttggtcatgggctggtctggtcggtttcccatttgtctggccagtctctatgtgtcttaatcccttgtccttcattaaaagcaaaactaaagaaaaaatcggccctcgctggcctcac

SEQ ID NO: 431793 - DNA, 486 bp, Homo sapiens
ttttttttccttcttagtcgtgtgtacatcattgggaatggagggaaataaatgactggatggtcgctgctttttaagtttcaaattgacattccagacaagcggtgcctgagcccgtgcctgtcttcagatcttcacagcacagttcctgggaaggtggagccaccagcctctccctgaataactgggagatgaaacaggaagctctatgacacacttgatcgaatatgacagacaccgaaaatcacgactcatccccctccagcacctctacctgttgcccgccgatcacagccggaatgcagctgaaagattccctggggcctggttccaaccgcccactgtggactctgaggcctctgcatttgcgggtggtctgcctgtgatattttggtcatgggctggtctggtcggtttcccatttgtctggccagtctctatgtgtcttaatcccttgtccttcattaaaagcaaaactaaagaaaa

SEQ ID NO: 431794 - DNA, 1897 bp, Homo sapiens
tcactgcaagctccgcctcccaggttcacgccattctcctgcctcagcctcccgagcagctgggactacaggctcccatcaccacgctcggctaagtttttgtaattttagtagagacagggtttcaccgtgttagccaggatggtctcgatctcctgacctcgtgatctgcctgcctcggcctcccaaagtgctgggattacaggcgtgaaccactgcacccggcccagtactgcatcttaacagcaaagccattttattctactttataactgagagacttgataccatccatctctttaggttacagaggataatttgaagagaaatgttactgtagaatatatagttctgtacttttttttttttttttaagagatagggtttcactattgctcaggctggtctcaaactgctgggctcaggagatcctcctgccttggcctcccaaattgctgggattacaggtgtgagccgcagcatccagccagttctgtactttgaatatggagtagtttacagctatttttttttcttactggtaatcttaactaatatgattcccttgttagagagcctctcactcccccacccccaaaaatgtctactattcatgacagtaaccaattattctggacaaattgcttctttttaatttgagctatctgccatggactttctaaaatggaaacacagcctgagtgtatcttagggagagtttgattgaaaaaatccaaatcactatccatatagatcatggatataaagagatacctgatttttattaaaaagatactttttcaaatttaagagttaatcttggaaatttggaacaagtaaaggggcaagtaaaccttttgatgaaatataaaaggaactcattgcatgaagttgactatcaaattctgtgatgtgtggcttcttaaaaatattctcagtgtcttttgtgtgcgtgcagcatgtacatttgatgttatgtgaatgttgagttttttcttctaattttcacttcagcagtgtttagggctttcagatgccttattccagtgtgaacagaaaaagttcatattttatgtggttaatgctttgatgtgtcacataaagagtagtttgtagaaaatgttggcacaattttaacttcttagtggcttgtgacattatatattatatatatatatgtacatatatctttataacattcctgtgtttagtagtgtaaatgttctgggcaagttttaatattttgaatgcctttggatattccagcaataaaggcatcatgttctgcaataggatttcttactcatttacctattttaacactaaaatagaccacaactgagcacaaattccttttataaatgttatagaagcagggaagaataataaacacatttgtgaattgtggttcagtttatttatctttagggaaggctgatcatttatcttatagcagataaccccagcctcttattcattatggttaacttttataatttatcttattttataatttaagaatatagtacatatcagttgggtttggttttggtcatcgagactaaaagctccatcaaaacagaactttgtgttttctgctaacttatttaatgacacaagttttaagagaaccacaattcattgattcacttattcttttccctaattgtgaattttagtgataaatacacctgtactactgaagaaaatattctgacacttcacgtgtgcaaagtatagaactgacagtgtcagtttcagattttgtatgtacgatttctggcttatatatccaatggtgcagattttgaaatttgtaagaacaaaatttgttaagaaaaacaacttgctctagttttgtgaccttgtgtacttttgaaataaaatcaagaaagca

SEQ ID NO: 431795 - DNA, 2729 bp, Homo sapiens
agcggagtctggccgcagtcgcggcagtggtggcttcccatccccaaaaggcgccctccgactccttgcgccgcactgctcgccgggccagtccggaaacgggtcgtggagctccgcaccactcccgctggttcccgaaggcagatcccttctcccgagagttgcgagaaactttcccttgtccccgacgctgcagcggctcgggtaccgtggcagccgcaggtttctgaaccccgggccacgctccccgcgcctcggcttcgcgctcgtgtagatcgttccctctctggttgcacgctggggatcccggacctcgattctgcgggcgagatgcccctgggacacatcatgaggctggacctggagaaaattgccctggagtacatcgtgccctgtctgcacgaggtgggcttctgctacctggacaacttcctgggcgaggtggtgggcgactgcgtcctggagcgcgtcaagcagctgcactgcaccggggccctgcgggacggccagctggcggggccgcgcgccggcgtctccaagcgacacctgcggggcgaccagatcacgtggatcgggggcaacgaggagggctgcgaggccatcagcttcctcctgtccctcatcgacaggctggtcctctactgcgggagccggctgggcaaatactacgtcaaggagaggtctaaggcaatggtggcttgctatccgggaaatggaacaggttatgttcgccacgtggacaaccccaacggtgatggtcgctgcatcacctgcatctactatctgaacaagaattgggatgccaagctacatggtgggatcctgcggatatttccagaggggaaatcattcatagcagatgtggagcccatttttgacagactcctgttcttctggtcagatcgtaggaacccacacgaagtgcagccctcttacgcaaccagatatgctatgactgtctggtactttgatgctgaagaaagggcagaagccaaaaagaaattcaggaatttaactaggaaaactgaatctgccctcactgaagactgaccgtgctctgaaatctgctggccttgttcattttagtaacggttcctgaattctcttaaattctttgagatccaaagatggcctcttcagtgacaacaatctccctgctacttcttgcatccttcacatccctgtcttgtgtgtggtacttcatgttttcttgccaagactgtgttgatcttcagatactctctttgccagatgaagttatttgctaactccagaaattcctgcagacatcctactcggccagcggtttacctgatagattcggtaatactatcaagagaagagcctaggagcacagcgagggaatgaaccttacttgcactttatgtatacttcctgatttgaaaggaggaggtttgaaaagaaaaaaatggaggtggtagatgccacagagaggcatcacggaagccttaacagcaggaaacagagaaatttgtgtcatctgaacaatttccagatgttcttaatccagggctgttggggtttctggagaattatcacaacctaatgacattaatacctctagaaagggctgctgtcatagtgaacaatttataagtgtcccatggggcagacactccttttttcccagtcctgcaacctggattttctgcctcagctccattttgctgaaaataatgactttctgaataaagatggcaacacaattttttctccattttcagttcttacctgggaacctaattccccagaagctaaaaaactagacattagttgttttggttgctttgttggaatggaatttaaatttaaatgaaaggaaaaatatatccctggtagttttgtgttaaccactgataactgtggaaagagctaggtctactgatatacaataaacatgtgtgcatcttgaacaatttgagaggggaggtggagttggaaatgtgggtgttcctgtttttttttttttttttttttttttttagttttcctttttaatgagctcaccctttaacacaaaaaaagcagggtgatgtattttaaaaaaggaagtggaaataaaaaaatctcaaagctatttgagttctcgtctgtccctagcagtctttcttcagctcacttggctctctagatccactgtggttggcagtatgaccagaatcatggaatttgctagaactgtggaagcttctactcctgcagtaagcacagatcgcactgcctcaataacttggtattgagcacgtattttgcaaaagctacttttcctagttttcagtattactttcatgttttaaaaatccctttaatttcttgcttgaaaatcccatgaacattaaagagccagaaatattttcctttgttatgtacggatatatatatatatagtcttccaagatagaagtttactttttcctcttctggttttggaaaatttccagataagacatgtcaccattaattctcaacgactgctctattttgttgtacggtaatagttatcaccttctaaattactatgtaatttactcacttattatgtttattgtcttgtatcctttctctggagtgtaagcacaatgaagacaggaattttgtatatttttaaccaatgcaacatactctcagcacctaaaatagtgccgggaacatagtaagggctcagtaaatacttgttgaataaactcagtctcctacattagcattct

SEQ ID NO: 431796 - DNA, 1725 bp, Homo sapiens
agcggagtctggccgcagtcgcggcagtggtggcttcccatccccaaaaggcgccctccgactccttgcgccgcactgctcgccgggccagtccggaaacgggtcgtggagctccgcaccactcccgctggttcccgaaggcagatcccttctcccgagagttgcgagaaactttcccttgtccccgacgctgcagcggctcgggtaccgtggcagccgcaggtttctgaaccccgggccacgctccccgcgcctcggcttcgcgctcgtgtagatcgttccctctctggttgcacgctggggatcccggacctcgattctgcgggcgagatgcccctgggacacatcatgaggctggacctggagaaaattgccctggagtacatcgtgccctgtctgcacgaggtgggcttctgctacctggacaacttcctgggcgaggtggtgggcgactgcgtcctggagcgcgtcaagcagctgcactgcaccggggccctgcgggacggccagctggcggggccgcgcgccggcgtctccaagcgacacctgcggggcgaccagatcacgtggatcgggggcaacgaggagggctgcgaggccatcagcttcctcctgtccctcatcgacaggctggtcctctactgcgggagccggctgggcaaatactacgtcaaggagaggtctaaggcaatggtggcttgctatccgggaaatggaacaggttatgttcgccacgtggacaaccccaacggtgatggtcgctgcatcacctgcatctactatctgaacaagaattgggatgccaagctacatggtgggatcctgcggatatttccagaggggaaatcattcatagcagatgtggagcccatttttgacagactcctgttcttctggtcagatcgtaggaacccacacgaagtgcagccctcttacgcaaccagatatgctatgactgtctggtactttgatgctgaagaaagggcagaagccaaaaagaaattcaggaatttaactaggaaaactgaatctgccctcactgaagactgaccgtgctctgaaatctgctggccttgttcattttagtaacggttcctgaattctcttaaattctttgagatccaaagatggcctcttcagtgacaacaatctccctgctacttcttgcatccttcacatccctgtcttgtgtgtggtacttcatgttttcttgccaagactgtgttgatcttcagatactctctttgccagatgaagttatttgctaactccagaaattcctgcagacatcctactcggccagcggtttacctgatagattcggtaatactatcaagagaagagcctaggagcacagcgagggaatgaaccttacttgcactttatgtatacttcctgatttgaaaggaggaggtttgaaaagaaaaaaatggaggtggtagatgccacagagaggcatcacggaagccttaacagcaggaaacagagaaatttgtgtcatctgaacaatttccagatgttcttaatccagggctgttggggtttctggagaattatcacaacctaatgacattaatacctctagaaagggctgctgtcatagtgaacaatttataagtgtcccatggggcagacactccttttttcccagtcctgcaacctggattttctgcctcagctccattttgctgaaaataatgactttctgaataaagatggcaacac

SEQ ID NO: 431797 - DNA, 697 bp, Homo sapiens
tgtggtacagcaaaggccaaacagctaccaggaggcagcctgaacgtgtcagggcctgggcacgacacttgcctttcttggaggagtgatttgaagccatagtggaagactgagcctctataaaaaatgaacgaggacactcttaatggacagatacaaaacaagccccaggagaaaggtgtatcaaccattttaaatctgccctcaaaagcacagaacaaatcagacagcattttgctcacagaggagagggtgtatgagaaccaaattccagcttcagcacatggccttgggtacagctacaagatggaggaagctatttgacctgcatcagactttacgtgaacaaaagggtgttgttatgtccaaagccatcttgccatgcgcagcctgagaatggagccaatgactgagggtggcagagcagaaagatgagataaatggtacgaggctgatatgggagcatccatcactgactaccaggttgctactcccagctcctgtcttcacatctgcataccaaccagtaagaagaggagaaggagcaaggagagcacataactttccttttaaggacacaactagatgccatgttgtgagctgctctgtggagggggacctgtggcgaggaactgagggcagccagcaggcaacagccagctgccatgttgtgagtagccctatggaggggcccaca

SEQ ID NO: 431798 - DNA, 2677 bp, Homo sapiens
agcggagtctggccgcagtcgcggcagtggtggcttcccatccccaaaaggcgccctccgactccttgcgccgcactgctcgccgggccagtccggaaacgggtcgtggagctccgcaccactcccgctggttcccgaaggcagatcccttctcccgagagttgcgagaaactttcccttgtccccgacggctccccgcgcctcggcttcgcgctcgtgtagatcgttccctctctggttgcacgctggggatcccggacctcgattctgcgggcgagatgcccctgggacacatcatgaggctggacctggagaaaattgccctggagtacatcgtgccctgtctgcacgaggtgggcttctgctacctggacaacttcctgggcgaggtggtgggcgactgcgtcctggagcgcgtcaagcagctgcactgcaccggggccctgcgggacggccagctggcggggccgcgcgccggcgtctccaagcgacacctgcggggcgaccagatcacgtggatcgggggcaacgaggagggctgcgaggccatcagcttcctcctgtccctcatcgacaggctggtcctctactgcgggagccggctgggcaaatactacgtcaaggagaggtctaaggcaatggtggcttgctatccgggaaatggaacaggttatgttcgccacgtggacaaccccaacggtgatggtcgctgcatcacctgcatctactatctgaacaagaattgggatgccaagctacatggtgggatcctgcggatatttccagaggggaaatcattcatagcagatgtggagcccatttttgacagactcctgttcttctggtcagatcgtaggaacccacacgaagtgcagccctcttacgcaaccagatatgctatgactgtctggtactttgatgctgaagaaagggcagaagccaaaaagaaattcaggaatttaactaggaaaactgaatctgccctcactgaagactgaccgtgctctgaaatctgctggccttgttcattttagtaacggttcctgaattctcttaaattctttgagatccaaagatggcctcttcagtgacaacaatctccctgctacttcttgcatccttcacatccctgtcttgtgtgtggtacttcatgttttcttgccaagactgtgttgatcttcagatactctctttgccagatgaagttatttgctaactccagaaattcctgcagacatcctactcggccagcggtttacctgatagattcggtaatactatcaagagaagagcctaggagcacagcgagggaatgaaccttacttgcactttatgtatacttcctgatttgaaaggaggaggtttgaaaagaaaaaaatggaggtggtagatgccacagagaggcatcacggaagccttaacagcaggaaacagagaaatttgtgtcatctgaacaatttccagatgttcttaatccagggctgttggggtttctggagaattatcacaacctaatgacattaatacctctagaaagggctgctgtcatagtgaacaatttataagtgtcccatggggcagacactccttttttcccagtcctgcaacctggattttctgcctcagctccattttgctgaaaataatgactttctgaataaagatggcaacacaattttttctccattttcagttcttacctgggaacctaattccccagaagctaaaaaactagacattagttgttttggttgctttgttggaatggaatttaaatttaaatgaaaggaaaaatatatccctggtagttttgtgttaaccactgataactgtggaaagagctaggtctactgatatacaataaacatgtgtgcatcttgaacaatttgagaggggaggtggagttggaaatgtgggtgttcctgtttttttttttttttttttttttttttagttttcctttttaatgagctcaccctttaacacaaaaaaagcagggtgatgtattttaaaaaaggaagtggaaataaaaaaatctcaaagctatttgagttctcgtctgtccctagcagtctttcttcagctcacttggctctctagatccactgtggttggcagtatgaccagaatcatggaatttgctagaactgtggaagcttctactcctgcagtaagcacagatcgcactgcctcaataacttggtattgagcacgtattttgcaaaagctacttttcctagttttcagtattactttcatgttttaaaaatccctttaatttcttgcttgaaaatcccatgaacattaaagagccagaaatattttcctttgttatgtacggatatatatatatatagtcttccaagatagaagtttactttttcctcttctggttttggaaaatttccagataagacatgtcaccattaattctcaacgactgctctattttgttgtacggtaatagttatcaccttctaaattactatgtaatttactcacttattatgtttattgtcttgtatcctttctctggagtgtaagcacaatgaagacaggaattttgtatatttttaaccaatgcaacatactctcagcacctaaaatagtgccgggaacatagtaagggctcagtaaatacttgttgaataaactcagtctcctacattagcattct

SEQ ID NO: 431799 - DNA, 988 bp, Homo sapiens
gtcattaggttgtgataattctctagaaagggctgctgtcatagtgaacaatttataagtgtcccatggggcagacactccttttttcccagtcctgcaacctggattttctgcctcagctccattttgctgaaaataatgactttctgaataaagatggcaacacaattttttctccattttcagttcttacctgggaacctaattccccagaagctaaaaaactagacattagttgttttggttgctttgttggaatggaatttaaatttaaatgaaaggaaaaatatatccctggtagttttgtgttaaccactgataactgtggaaagagctaggtctactgatatacaataaacatgtgtgcatcttgaaaaaaaaaaaaaaaaaaaaaaaaaaaaaacaaaaacaggggagccgccaaaacagaaacaccccgcaggcgcacacaccatgaccacgatcaaccgcagcctacatgagaaaacgaggtcgcaccacaaagcagaggcgagccacaagcacagaccaagacacgacagtcgcacggagagtaaaaaaagaggagataagaggaagacaagacaacaggaagaggaaaaccgatgggaaagaacacaacaatacagcgagagagagacaaaaaaggggcaaaacaaacaccaaaagagaaatacagcaacagagagaaaataccaaacaccacaacagagaggaaaaccagcaggcggtaaaaacagaaaggagagacataacagcacacgagggaaaaaaaagaaaccaaagcaccaaaacccgggagaatcatcgaataaggaaagaagacaaaataaaagcaccaacagggacacaacgcggcgagaactaaaagacaacacaaacaacaacgacagccacgcacgcgacaacaacaagcacaaagcgcgcaacacaaaaagaagaagacagaagagaggacagacacaaaaaccgcaacaaagaagacaaa

SEQ ID NO: 431800 - DNA, 2301 bp, Homo sapiens
tgtggtacagcaaaggccaaacagctaccaggaggcagcctgaacgtgtcagggcctgggcacgacacttgcctttcttggaggagtgatttgaagccatagtggaagactgagcctctataaaaaatgaacgaggacactcttaatggacagatacaaaacaagccccaggagaaaggtgttgttatgtccaaagccatcttgccatgcgcagcctgagaatggagccaatgactgagggtggcagagcagaaagatggcaatggtggcttgctatccgggaaatggaacaggttatgttcgccacgtggacaaccccaacggtgatggtcgctgcatcacctgcatctactatctgaacaagaattgggatgccaagctacatggtgggatcctgcggatatttccagaggggaaatcattcatagcagatgtggagcccatttttgacagactcctgttcttctggtcagatcgtaggaacccacacgaagtgcagccctcttacgcaaccagatatgctatgactgtctggtactttgatgctgaagaaagggcagaagccaaaaagaaattcaggaatttaactaggaaaactgaatctgccctcactgaagactgaccgtgctctgaaatctgctggccttgttcattttagtaacggttcctgaattctcttaaattctttgagatccaaagatggcctcttcagtgacaacaatctccctgctacttcttgcatccttcacatccctgtcttgtgtgtggtacttcatgttttcttgccaagactgtgttgatcttcagatactctctttgccagatgaagttatttgctaactccagaaattcctgcagacatcctactcggccagcggtttacctgatagattcggtaatactatcaagagaagagcctaggagcacagcgagggaatgaaccttacttgcactttatgtatacttcctgatttgaaaggaggaggtttgaaaagaaaaaaatggaggtggtagatgccacagagaggcatcacggaagccttaacagcaggaaacagagaaatttgtgtcatctgaacaatttccagatgttcttaatccagggctgttggggtttctggagaattatcacaacctaatgacattaatacctctagaaagggctgctgtcatagtgaacaatttataagtgtcccatggggcagacactccttttttcccagtcctgcaacctggattttctgcctcagctccattttgctgaaaataatgactttctgaataaagatggcaacacaattttttctccattttcagttcttacctgggaacctaattccccagaagctaaaaaactagacattagttgttttggttgctttgttggaatggaatttaaatttaaatgaaaggaaaaatatatccctggtagttttgtgttaaccactgataactgtggaaagagctaggtctactgatatacaataaacatgtgtgcatcttgaacaatttgagaggggaggtggagttggaaatgtgggtgttcctgtttttttttttttttttttttttttttagttttcctttttaatgagctcaccctttaacacaaaaaaagcagggtgatgtattttaaaaaaggaagtggaaataaaaaaatctcaaagctatttgagttctcgtctgtccctagcagtctttcttcagctcacttggctctctagatccactgtggttggcagtatgaccagaatcatggaatttgctagaactgtggaagcttctactcctgcagtaagcacagatcgcactgcctcaataacttggtattgagcacgtattttgcaaaagctacttttcctagttttcagtattactttcatgttttaaaaatccctttaatttcttgcttgaaaatcccatgaacattaaagagccagaaatattttcctttgttatgtacggatatatatatatatagtcttccaagatagaagtttactttttcctcttctggttttggaaaatttccagataagacatgtcaccattaattctcaacgactgctctattttgttgtacggtaatagttatcaccttctaaattactatgtaatttactcacttattatgtttattgtcttgtatcctttctctggagtgtaagcacaatgaagacaggaattttgtatatttttaaccaatgcaacatactctcagcacctaaaatagtgccgggaacatagtaagggctcagtaaatacttgttgaataaactcagtctcctacattagcattct

SEQ ID NO: 431801 - DNA, 1342 bp, Homo sapiens
tataagctattttcttcataagtagaaatggaagatttctgttaggaaggtagaagtcagttttgtccgtatgtgggccaaactattaaaaataataaggcctggggattcctatgttcttagatgctcaataaacatttcagttcatcaaactatgaccaacttacaagtctgtggcattgtgctagttcactggaccctgggaaagtcttttaaatccaaatgatactttttgttttttaaagagacaggattttgctctgttgcctaggctggagtgcagtggcatgtgatcacagctcactgtaaccttgagctcctggggctccagtgtcctacctcagcctcttcagtagctaggactaaggcacatcccaccacacccaggcaattttaggaattttttgtagatggctcttactatgttgttcaggctgggtctcttactcctgggcctcaagtgatcctcctggcctcagcctcccagtgttgggactacaagcaccagccactgcccccaaccctgcattatgttcttaaaggcagacctgaatcctgtgcggtgtcaattcaggtgtgcactggcccctgagccttacatacaggacccgttccttaggatgacgttgcgttcccttgcttagagcctcagcaccatggcacctggctctcccccgatgcctgggtcttgctcttgcccatttcctagccagggtttgtggtccaggcaacctgtcacatcagtgtgttccaaacatggcacccagatctcaaaagcttcttcaacgctcccatggtttgggatacacctcaagttttaacttacgtacttcaagtttcttttattcaattagatacaaaccgtctgacttttggcttctgaaacaggaaagtcaattttgttgttttcactgtaccatgcttttttatctcagaatcttgatgaactctgaaatgacccctgatgggggcatgcctctatttatgctgaataagagccattttacattttactacaggttgagtgcccctaatccaaaaatttgaaatgctccaaaatctgaaactttttgagcacttacatggtattgaaaggaaatgctcattggaacatttcctattaggcatgctcagccgttaagcataatgcaaatattaaaaaaaaaaatttcctaaatcttttaatacttctggttccaagcatttcagataagggatactcaagctctacctattcccaaattcccactaactagctctttggcaggtctatggaataaaaatcgatgcttctgattactttaaggcattataacctcatgaagtggtttctgagatgcaa

SEQ ID NO: 431802 - DNA, 590 bp, Homo sapiens
cacgcgtacggggccaattctctagttgacagtgcccctcagattggccccatccaggtgggaggaacccctttgggatggtgagtatccaatctgctgtgcatttgacaggatctctgaatggctaggtaatggatcccaagcaggctcacaaatttaaatgagggctttgtgtgcagaaagaggaataagtacagattattttcctaccactagatttttggggagagtcaccatggaatgttgacaattacttaaaatattttaagctcccttgctgaattcctgtcctgtccctgaggaatcagatggtcatacagccataggcacccacccgaaatttccctaggagttggagtaatgctagaattgaagaccttctgagtaaagggcttctctgccttctcagaggcaggagaatttgcactggttgtgttaaatgtataaaaagctatatgttcaccagtttactcatttccaatgtgtagatgaataaaatgtagtgtacaaattatttgaaaatcccagaaggaaggtacttttcaaatacagtattttttttaacaaataaacttacgatttttacagca

SEQ ID NO: 431803 - DNA, 2609 bp, Homo sapiens
ctaatgcagggttaggcttacgtctgaattccacaagacatcctccccctccagtacggaagttccaaggcacttgttttccagcatatcagcctaacctcagtgccttgaaatatggctttaagctttgagaactgagatttcctgaaaccataggcccttgccccaggggtttctccacatccgggtgttaagacacctgatggcactgttggtttgtcccctataccccagaaaatctatcctgcaaggtagctacttcaatcttgtcattaaaatgtgtcaagtcacagctcgcaatgccaaaggaatgctggggcagtaagtgaggtggataagtgagaagggcctggtggtgaaagcggccagggaccagaatgctccagacctacagagctggtcaaggttaagtgccttaaacttaccaatcctgggctcagttctcctttgaaaggagaaagtctttgtcctctacttaggcagctgggctagaagtgccttttgacttctaatgttaactaccctccaaagcctcctgggtcaagaaggctctcccaaactccacccctgttcttcctggtcagagaaccagtcagtcattctagtcttctagtccttaaactgatctgatgacttggaacataggatttcactgcaagtctggctttttagtctggaaatacatttgaggtctgttttcgcacagctggatcacctgtttcctggttttattacacaattcagaaggctagaagaggagtttgggggcttggcacctgaaaatttagaccgcattcttattaagtaaaggaagaggtagggaggccgaggcgggcggatcatgaaatcaggagatccagaccgtcctggctaacacagaaaccccgtctctactaaaaatacaaaaaattagctgggcatggtgacatgtgcctgtagtccatcccagctactcgggaggccgaggcaagagaatcacctaaacctggaaggcggaggttgcagtgagccgagatcacaccactgcacttcaggctgggcagcagagcgagactccatctcaaaaaaaaaaaaaaaaggaagaggtaaaaggcaaggcagcatttaataagtacctgttgtatccttttaagtgtttgttgtggtaatcctcacaaagaccgggactgatggaaactccttgctattaaactttttttcttgaggaattttgcttttcaagtgcatatacactattaatattttttacccaagagagcattctaagctaatttatgcagtgtgactgtattaagcattaagcttccttcagagctggcctatcggagatgctactgccctctctacagatgtgtctgaaatgcctgcccaaggatggcccttagccagttaacagctttatagcccatcctcattgcttactgccacccctcagctggggtccaaggcagtactattcagtttattcaccagacctgcctccagacatctacttctttcaaaaattagtgttttccatcaaggagcatgttccagagcatttcccagagatgtcccaaagaacactgtccggtgctgtggcgtacagtggcaacagcattagactaagtggaacatcccagcaggctgctttagaatccgctcatttgactagatacgatgtaattggctgtctttaaaaaacgcgcacacacacacaatctgataggcatatctcatgcccattcaatatggaatgttcttcgcttgctgaatttaagcctgtattttaaggttttgtggttcctcggccacaatgggtgatgtcactgatagaacgaagctgagtttccaagggtttggggctgtgcaagagtaaacactagagcttgagttgttatccagctggcaagcacggaagtctttgaagaatgtaatgtacaaaagggaaaagaatgtaaagctttttgtaccaaatgagagttggagcccagccaacaaatgcttttccctgtgtaaaagtctctctggaagggacattccatctccatggtgcactctgaggggcactgtcaactagagattggccccatccaggtgggaggaacccctttgggatggtgagtatccaatctgctgtgcatttgacaggatctctgaatggctaggtaatggatcccaagcaggctcacaaatttaaatgagggctttgtgtgcagaaagaggaataagtacagattattttcctaccactagatttttggggagagtcaccatggaatgttgacaattacttaaaatattttaagctcccttgctgaattcctgtcctgtccctgaggaatcagatggtcatacagccataggcacccacccgaaatttccctaggagttggagtaatgctagaattgaagaccttctgagtaaagggcttctctgccttctcagaggcaggagaatttgcactggttgtgttaaatgtataaaaagctatatgttcaccagtttactcatttccaatgtgtagatgaataaaatgtagtgtacaaattatttgaaaatcccagaaggaaggtacttttcaaatacagtattttttttaacaaataaacttacgatttttacagca

SEQ ID NO: 431804 - DNA, 1253 bp, Homo sapiens
tgtctggaggcaggtctggtgaataaactgaatagtactgccttggaccccagctgaggggtggcagtaagcaatgaggatgggctattaagcagtactattcagtttattcaccagacctgcctccagacatctacttctttcaaaaattagtgttttccatcaaggagcatgttccagagcatttcccagagatgtcccaaagaacactgtccggtgctgtggcgtacagtggcaacagcattagactaagtggaacatcccagcaggctgctttagaatccgctcatttgactagatacgatgtaattggctgtctttaaaaaacgcgcacacacacacaatctgataggcatatctcatgcccattcaatatggaatgttcttcgcttgctgaatttaagcctgtattttaaggttttgtggttcctcggccacaatgggtgatgtcactgatagaacgaagctgagtttccaagggtttggggctgtgcaagagtaaacactagagcttgagttgttatccagctggcaagcacggaagtctttgaagaatgtaatgtacaaaagggaaaagaatgtaaagctttttgtaccaaatgagagttggagcccagccaacaaatgcttttccctgtgtaaaagtctctctggaagggacattccatctccatggtgcactctgaggggcactgtcaactagagattggccccatccaggtgggaggaacccctttgggatggtgagtatccaatctgctgtgcatttgacaggatctctgaatggctaggtaatggatcccaagcaggctcacaaatttaaatgagggctttgtgtgcagaaagaggaataagtacagattattttcctaccactagatttttggggagagtcaccatggaatgttgacaattacttaaaatattttaagctcccttgctgaattcctgtcctgtccctgaggaatcagatggtcatacagccataggcacccacccgaaatttccctaggagttggagtaatgctagaattgaagaccttctgagtaaagggcttctctgccttctcagaggcaggagaatttgcactggttgtgttaaatgtataaaaagctatatgttcaccagtttactcatttccaatgtgtagatgaataaaatgtagtgtacaaattatttgaaaatcccagaaggaaggtacttttcaaatacagtattttttttaacaaataaacttacgatttttacagca

SEQ ID NO: 431805 - DNA, 2961 bp, Homo sapiens
ctaatgcagggttaggcttacgtctgaattccacaagacatcctccccctccagtacggaagttccaaggcacttgttttccagcatatcagcctaacctcagtgccttgaaatatggctttaagctttgagaactgagatttcctgaaaccataggcccttgccccaggggtttctccacatccgggtgttaagacacctgatggcactgttggtttgtcccctataccccagaaaatctatcctgcaaggtagctacttcaatcttgtcattaaaatgtgtcaagtcacagctcgcaatgccaaaggaatgctggggcagtaagtgaggtggataagtgagaagggcctggtggtgaaagcggccagggaccagaatgctccagacctacagagctggtcaaggttaagtgccttaaacttaccaatcctgggctcagttctcctttgaaaggagaaagtctttgtcctctacttaggcagctgggctagaagtgccttttgacttctaatgttaactaccctccaaagcctcctgggtcaagaaggctctcccaaactccacccctgttcttcctggtcagagaaccagtcagtcattctagtcttctagtccttaaactgatctgatgacttggaacataggatttcactgcaagtctggctttttagtctggaaatacatttgaggtctgttttcgcacagctggatcacctgtttcctggttttattacacaattcagaaggctagaagaggagtttgggggcttggcacctgaaaatttagaccgcattcttattaagtaaaggaagaggtagggaggccgaggcgggcggatcatgaaatcaggagatccagaccgtcctggctaacacagaaaccccgtctctactaaaaatacaaaaaattagctgggcatggtgacatgtgcctgtagtccatcccagctactcgggaggccgaggcaagagaatcacctaaacctggaaggcggaggttgcagtgagccgagatcacaccactgcacttcaggctgggcagcagagcgagactccatctcaaaaaaaaaaaaaaaaggaagaggtaaaaggcaaggcagcatttaataagtacctgttgtatccttttaagtgtttgttgtggtaatcctcacaaagaccgggactgatggaaactccttgctattaaactttttttcttgaggaattttgcttttcaagtgcatatacactattaatattttttacccaagagagcattctaagctaatttatgcagtgtgactgtattaagcattaagcttccttcagagctggcctatcggagatgctactgccctctctacagatgtgtctgaaatgcctgcccaaggatggcccttagccagttaacagctttatagcccatcctcattgcttactgccacccctcagctggggtccaaggcagtactattcagtttattcaccagacctgcctccagacatctacttctttcaaaaattagtgttttccatcaaggagcatgttccagagcatttcccagagatgtcccaaagaacactgtccggtgctgtggcgtacagtggcaacagcattagactaagtggaacatcccagcaggctgctttagaatccgctcatttgactagatacgatgtaattggctgtctttaaaaaacgcgcacacacacacaatctgataggcatatctcatgcccattcaatatggaatgttcttcgcttgctgaatttaagcctgtattttaaggttttgtggttcctcggccacaatgggtgatgtcactgatagaacgaagctgagtttccaagggtttggggctgtgcaagagtaaacactagagcttgagttgttatccagctggcaagcacggaagtctttgaagaatgtaatgtacaaaagggaaaagaatgtaaagctttttgtaccaaatgagagttggagcccagccaacaaatgcttttccctgtgtaaaagtctctctggaagggacattccatctccatggtgcactctgaggggcactgtcaactagagattggccccatccaggtgggaggaacccctttgggatggtgagtatccaatctgctgtgcatttgacaggatctctgaatggctaggtaatggatcccaagcaggctcacaaatttaaatgagggctttgtgtgcagaaagaggaataagtacagattattttcctaccactagatttttggggagagtcaccatggaatgttgacaattacttaaaatattttaagctcccttgctgaattcctgtcctgtccctgaggaatcagatggtcatacagccataggcacccacccgaaatttccctaggagttggagtaatgctagaattgaagaccttctgagtaaagggcttctctgccttctcagaggcaggagaatttgcactggttgtgttaaatgtataaaaagctatatgttcaccagtttactcatttccaatgtgtagatgaataaaatgtagtgtacaaattatttgaaaatcccagaaggaaggtacttttcaaatacagtattttttttaacaaataaacttacgatttttacagcaactgtttttgccaagagttgtgaaataacttgtgtacttggggaagtggaggttaaatacctgccctaaagtcattccaccaccgagtcagcactggaaatctcatctcttgctttgccacactattttaagagctgtccctgttggaacataacaactagacagactcatgtagcattagagttggaaggtctttttaaagacatctggtcctacttcttacatgatacacaattccccctaccaactacctatgaagagcccttctgtcatacggagctccatcctgggataattctattttaggaactattagattgtcatactaagccaaaagctgcctcatgtcccg

SEQ ID NO: 431806 - DNA, 2877 bp, Homo sapiens
ctaatgcagggttaggcttacgtctgaattccacaagacatcctccccctccagtacggaagttccaaggcacttgttttccagcatatcagcctaacctcagtgccttgaaatatggctttaagctttgagaactgagatttcctgaaaccataggcccttgccccaggggtttctccacatccgggtgttaagacacctgatggcactgttggtttgtcccctataccccagaaaatctatcctgcaaggtagctacttcaatcttgtcattaaaatgtgtcaagtcacagctcgcaatgccaaaggaatgctggggcagtaagtgaggtggataagtgagaagggcctggtggtgaaagcggccagggaccagaatgctccagacctacagagctggtcaaggttaagtgccttaaacttaccaatcctgggctcagttctcctttgaaaggagaaagtctttgtcctctacttaggcagctgggctagaagtgccttttgacttctaatgttaactaccctccaaagcctcctgggtcaagaaggctctcccaaactccacccctgttcttcctggtcagagaaccagtcagtcattctagtcttctagtccttaaactgatctgatgacttggaacataggatttcactgcaagtctggctttttagtctggaaatacatttgaggtctgttttcgcacagctggatcacctgtttcctggttttattacacaattcagaaggctagaagaggagtttgggggcttggcacctgaaaatttagaccgcattcttattaagtaaaggaagaggtagggaggccgaggcgggcggatcatgaaatcaggagatccagaccgtcctggctaacacagaaaccccgtctctactaaaaatacaaaaaattagctgggcatggtgacatgtgcctgtagtccatcccagctactcgggaggccgaggcaagagaatcacctaaacctggaaggcggaggttgcagtgagccgagatcacaccactgcacttcaggctgggcagcagagcgagactccatctcaaaaaaaaaaaaaaaaggaagaggtaaaaggcaaggcagcatttaataagtacctgttgtatccttttaagtgtttgttgtggtaatcctcacaaagaccgggactgatggaaactccttgctattaaactttttttcttgaggaattttgcttttcaagtgcatatacactattaatattttttacccaagagagcattctaagctaatttatgcagtgtgactgtattaagcattaagcttccttcagagctggcctatcggagatgctactgccctctctacagatgtgtctgaaatgcctgcccaaggatggcccttagccagttaacagctttatagcccatcctcattgcttactgccacccctcagctggggtccaaggcagtactattcagtttattcaccagacctgcctccagacatctacttctttcaaaaattagtgttttccatcaaggagcatgttccagagcatttcccagagatgtcccaaagaacactgtccggtgctgtggcgtacagtggcaacagcattagactaagtggaacatcccagcaggctgctttagaatccgctcatttgactagatacgatgtaattggctgtctttaaaaaacgcgcacacacacacaatctgataggcatatctcatgcccattcaatatggaatgttcttcgcttgctgaatttaagcctgtattttaaggttttgtggttcctcggccacaatgggtgatgtcactgatagaacgaagctgagtttccaagggtttggggctgtgcaagagtaaacactagagcttgagttgttatccagctggcaagcacggaagtctttgaagaatgtaatgtacaaaagggaaaagaatgtaaagctttttgtaccaaatgagagttggagcccagccaacaaatgcttttccctgtgtaaaagtctctctggaagggacattccatctccatggtgcactctgaggggcactgtcaactagagattggccccatccaggtgggaggaacccctttgggatggtgagtatccaatctgctgtgcatttgacaggatctctgaatggctaggtaatggatcccaagcaggctcacaaatttaaatgagggctttgtgtgcagaaagaggaataagtacagattattttcctaccactagatttttggggagagtcaccatggaatgttgacaattacttaaaatattttaagctcccttgctgaattcctgtcctgtccctgagtaaagggcttctctgccttctcagaggcaggagaatttgcactggttgtgttaaatgtataaaaagctatatgttcaccagtttactcatttccaatgtgtagatgaataaaatgtagtgtacaaattatttgaaaatcccagaaggaaggtacttttcaaatacagtattttttttaacaaataaacttacgatttttacagcaactgtttttgccaagagttgtgaaataacttgtgtacttggggaagtggaggttaaatacctgccctaaagtcattccaccaccgagtcagcactggaaatctcatctcttgctttgccacactattttaagagctgtccctgttggaacataacaactagacagactcatgtagcattagagttggaaggtctttttaaagacatctggtcctacttcttacatgatacacaattccccctaccaactacctatgaagagcccttctgtcatacggagctccatcctgggataattctattttaggaactattagattgtcatactaagccaaaagctgcctcatgtcccg

SEQ ID NO: 431807 - DNA, 454 bp, Homo sapiens
actgaatctggctcaaggggacatgaaatttgactgggtcatgggactcaggagcatcactctcaaaaatagcagtacaggaagaggcgatggccctaaacagcatttgcaggcagatcccatgttaatcataagggccaggactctctcactgtctgtctctctctctgtctctcctctagggctgaccccacattggacaccgctgcatccatgtccatcacacaacacagctgccgtttcttctgcctgcttatgggaaatgggctcaggaggtctggatctggggtggggatctggagtggaaggggaattcatttgttcattgtctatccttttgtattgattgaattttttatatatatatgtgaattttcacaataaaatttttttccaaaataaaataaacaaaaggggctttttgcaacccaattcctatctatgtctgagtcca

SEQ ID NO: 431808 - DNA, 2174 bp, Homo sapiens
gtccgatccctaaccagtcccaggcccagccccagcccagcaccacctggaaggttcaagtacatggaggagaggagtaaggcggacttgggcgtatggagaaaggggtgaagggagaaagaggacttgcgctcaggagggagcgtggcctactggttgggaaagcaggcgtggccgcctgtgcgggaggttgcggatccacagtgggcgagaccaggccccagccccatcagggcgcggggtgcgcagccaggtggtgctccagcagcgcccagtgagaggagaccttgcggtagacgggggaagggcgcgcgctctggccgctgagtgcgcatgtgcatattgagcgaactcttctgcgggaagggcttggcgtagaccgcgcactggaaggcgtgcgcgcaggtgtgcgtgaccatgtgcttgaaacggcagtagcgcagcgagaaggatcgccatcacacggcgcactggtgcggcttctcccccgagtggatgaacatgtgcttggtgtcgtttttccttgagctgaacgtcttgcaacagtggccgcacgcatagggctgaccccacattggacaccgctgcatccatgtccatcacacaacacagctgccgtttcttctgcctgcttatgggaaagtcccctcttctcctccgttttcttctcttcctgccctatcacaccgtgcacttctccctttccttaaagaaccaccatcaactttaggaggagggaaaggggtggctctggcaggaaaagccagaatcccctctagccagcagagagagagaggaatggctgcatgttttctcccccagtccaaggcactgggtcttggctgggttgaaggttccaagctgctctcctgctgtgtcggtgagttctggtcaacctgcaacctcctgatatggccattgcagttcatcgagtcttcagggactccccatggcctggagtactttgccttgcttacacgggagaggagaatggatttatagagaacatcatctaaatccaacttgaccattgtgtggccacacttgctagattgctatagtctaaatctagcattgtagaaagacgggggagcttggagctgcacaaacccaggtctggaactggctccttaccttggaaggtgaatgatcctgccaggactcttagcctccctgggtctcaatttctttatctgtttcatgggaatgaggatctctgctgggtggttgggtgatgtgggggctgtgtgaaaacagcttgtcaatacaagccaaaatagaaatatttctccacagagtatgaaggtcaaatgagagaatacatttaaattaaatggaaaattaaaatggtaaaaaatgcaaagctgtattgaaagttccgagcttctctataaggagctttttgactatgtaagaatcctgtactcgttccccctaaatataaaaaaaaagttgaaggaggcagaagggagagtgatgcacgatgggcaaggacttcacctgctgttgctggctttgaggatggaggaaggaggccacaaacctagaagctggagcccctagaagctagaaaaggcagggacccgattctttccttgagcctccagaagggacacagccccgccagcaccttgactttagcctggtgagatcctcttaggacttttggcaatcagaactataagacagaaatggaagccactgagtctgtagctgtttgttgcagcagcaatagaaaactaatgcagggcccaagaaatcactggtgatgagatcgggaaagtgggctcaggaggtctggatctgtgatgagatggggaaagtgggctcaggaggtctggatctgtgatgagatcgggaaagtgggctcaagaggtctggatctgtggtgagatgggggaagtgggctcaggaggtctggatctgtgatgagatggggaaagtgggctcaggaggtctggatctgtgatgagatgggggaagtgggctcaggaggtctggatctggggtggggatctggagtggaaggggaattcatttgttcattgtctatccttttgtattgattgaattttttatatatatatgtgaattttcacaataaaatttttttccaaaataaaataaacaaaaggggctttttgcaacccaattcctatctatgtctgagtcca

SEQ ID NO: 431809 - DNA, 2068 bp, Homo sapiens
ccaggaggtccaggctgcagtgagccatgatcaggccactgcactccagcctgggtgacagagtgaaacactgtttctaaaaataaaaattaaagaataatggatggccttattcagccatggggagcaccaccaatacatgtattggtggtgctccagcagcgcccagtgagaggagaccttgcggtagacgggggaagggcgcgcgctctggccgctgagtgcgcatgtgcatattgagcgaactcttctgcgggaagggcttggcgtagaccgcgcactggaaggcgtgcgcgcaggtgtgcgtgaccatgtgcttgaaacggcagtagcgcagcgagaaggatcgccatcacacggcgcactggtgcggcttctcccccgagtggatgaacatgtgcttggtgtcgtttttccttgagctgaacgtcttgcaacagtggccgcacgcatagggctgaccccacattggacaccgctgcatccatgtccatcacacaacacagctgccgtttcttctgcctgcttatgggaaagtcccctcttctcctccgttttcttctcttcctgccctatcacaccgtgcacttctccctttccttaaagaaccaccatcaactttaggaggagggaaaggggtggctctggcaggaaaagccagaatcccctctagccagcagagagagagaggaatggctgcatgttttctcccccagtccaaggcactgggtcttggctgggttgaaggttccaagctgctctcctgctgtgtcggtgagttctggtcaacctgcaacctcctgatatggccattgcagttcatcgagtcttcagggactccccatggcctggagtactttgccttgcttacacgggagaggagaatggatttatagagaacatcatctaaatccaacttgaccattgtgtggccacacttgctagattgctatagtctaaatctagcattgtagaaagacgggggagcttggagctgcacaaacccaggtctggaactggctccttaccttggaaggtgaatgatcctgccaggactcttagcctccctgggtctcaatttctttatctgtttcatgggaatgaggatctctgctgggtggttgggtgatgtgggggctgtgtgaaaacagcttgtcaatacaagccaaaatagaaatatttctccacagagtatgaaggtcaaatgagagaatacatttaaattaaatggaaaattaaaatggtaaaaaatgcaaagctgtattgaaagttccgagcttctctataaggagctttttgactatgtaagaatcctgtactcgttccccctaaatataaaaaaaaagttgaaggaggcagaagggagagtgatgcacgatgggcaaggacttcacctgctgttgctggctttgaggatggaggaaggaggccacaaacctagaagctggagcccctagaagctagaaaaggcagggacccgattctttccttgagcctccagaagggacacagccccgccagcaccttgactttagcctggtgagatcctcttaggacttttggcaatcagaactataagacagaaatggaagccactgagtctgtagctgtttgttgcagcagcaatagaaaactaatgcagggcccaagaaatcactggtgatgagatcgggaaagtgggctcaggaggtctggatctgtgatgagatggggaaagtgggctcaggaggtctggatctgtgatgagatcgggaaagtgggctcaagaggtctggatctgtggtgagatgggggaagtgggctcaggaggtctggatctgtgatgagatggggaaagtgggctcaggaggtctggatctgtgatgagatgggggaagtgggctcaggaggtctggatctggggtggggatctggagtggaaggggaattcatttgttcattgtctatccttttgtattgattgaattttttatatatatatgtgaattttcacaataaaatttttttccaaaataaaataaacaaaaggggctttttgcaacccaattcctatctatgtctgagtcca

SEQ ID NO: 431810 - DNA, 1552 bp, Homo sapiens
gtccgatccctaaccagtcccaggcccagccccagcccagcaccacctggaaggttcaagtacatggaggagaggagtaaggcggacttgggcgtatggagaaaggggtgaagggagaaagaggacttgcgctcaggagggagcgtggcctactggttgggaaagcaggcgtggccgcctgtgcgggaggttgcggatccacagtgggcgagaccaggccccagccccatcagggcgcggggtgcgcagccaggtggtgctccagcagcgcccagtgagaggagaccttgcggtagacgggggaagggcgcgcgctctggccgctgagtgcgcatgtgcatattgagcgaactcttctgcgggaagggcttggcgtagaccgcgcactggaaggcgtgcgcgcaggtgtgcgtgaccatgtgcttgaaacggcagtagcgcagcgagaaggatcgccatcacacggcgcactggtgcggcttctcccccgagtggatgaacatgtgcttggtgtcgtttttccttgagctgaacgtcttgcaacagtggccgcacgcatagggctgaccccacattggacaccgctgcatccatgtccatcacacaacacagctgccgtttcttctgcctgcttatgggaaagtcccctcttctcctccgttttcttctcttcctgccctatcacaccgtgcacttctccctttccttaaagaaccaccatcaactttaggaggagggaaaggggtggctctggcaggaaaagccagaatcccctctagccagcagagagagagaggaatggctgcatgttttctcccccagtccaaggcactgggtcttggctgggttgaaggttccaagctgctctcctgctgtgtcggtgagttctggtcaacctgcaacctcctgatatggccattgcagttcatcgagtcttcagggactccccatggcctggagtactttgccttgcttacacgggagaggagaatggatttatagagaacatcatctaaatccaacttgaccattgtgtggccacacttgctagattgctatagtctaaatctagcattgtagaaagacgggggagcttggagctgcacaaacccaggtctggaactggctccttaccttggaaggtgaatgatcctgccaggactcttagcctccctgggtctcaatttctttatctgtttcatgggaatgaggatctctgctgggtggttgggtgatgtgggggctgtgtgaaaacagcttgtcaatacaagccaaaatagaaatatttctccacagagtatgaaggtcaaatgagagaatacatttaaattaaatggaaaattaaaatggtaaaaaatgcaaagctgtattgaaagttccgagcttctctataaggagctttttgactatgtaagaatcctgtactcgttccccctaaatataaaaaaaaagttgaaggaggcagaagggagagtgatgcacgatgcacgtgatccacaatgcacgtggatcacaatgcacgtggatcacatgagatcctctagatcaccct

SEQ ID NO: 431811 - DNA, 262 bp, Homo sapiens
ccactgagtctgtagctgtttgttgcagcagcaatagaaaactaatgcagggcccaagaaatcactggtgatgagatcgggaaagtgggctcaggaggtctggatctgtgatgagatggggaaagtgggctcaagaggtctggatctgtggtgagatgggggaagtgggctcaggaggtctggatctgtgatgagatggggaaagtgggctcaggaggtctggatctgtgatgagatggggaaagtgggctcaggaggtctg

SEQ ID NO: 431812 - DNA, 1516 bp, Homo sapiens
tccgggccgtgctgggacctttgctccacgaggtcctgcttgtgctcagctccagctcactggctggccaccgagacttctggacaggaaactgcaccatcctcttctcccagcaagggggctccagagactgcccacccaggaagtctggtggcctggggatttggacagtgccttggtaatgaccagggctccaggaagagatgtccttgtggctgggggcccctgtgcctgacattcctcctgactctgcggtggagctgtggaagccaggcgcacaggatgcaagcagccaggcccagggaggcagcagctgcatcctcagagaggaagccaggatgccccactctgctgggggtactgcaggggtggggctggaggctgcagagcccacagccctgctcaccagggcagagcccccttcagaacccacagagatccgtccacaaaagcggaaaaaggggccagcccccaaaatgctggggaacgagctatgcagcgtgtgtggggacaaggcctcgggcttccactacaatgttctgagctgcgagggctgcaagggattcttccgccgcagcgtcatcaagggagcgcactacatctgccacagtggcggccactgccccatggacacctacatgcgtcgcaagtgccaggagtgtcggcttcgcaaatgccgtcaggctggcatgcgggaggagtgtgtcctgtcagaagaacagatccgcctgaagaaactgaagcggcaagaggaggaacaggctcatgccacatccttgccccccagggcttcctcacccccccaaatcctgccccagctcagcccggaacaactgggcatgatcgagaagctcgtcgctgcccagcaacagtgtaaccggcgctccttttctgaccggcttcgagtcacggtgatgcttctggagacatctcggaggtacaaccctgggagtgagagtatcaccttcctcaaggatttcagttataaccgggaagactttgccaaagcagggctgcaagtggaattcatcaaccccatcttcgagttctccagggccatgaatgagctgcaactcaatgatgccgagtttgccttgctcattgctatcagcatcttctctgcagaccggcccaacgtgcaggaccagctccaggtagagaggctgcagcacacatatgtggaagccctgcatgcctacgtctccatccaccatccccatgaccgactgatgttcccacggatgctaatgaaactggtgagcctccggaccctgagcagcgtccactcagagcaagtgtttgcactgcgtctgcaggacaaaaagctcccaccgctgctctctgagatctgggatgtgcacgaatgactgttctgtccccatattttctgttttcttggccggatggctgaggcctggtggctgcctcctagaagtggaacagactgagaagggcaaacattcctgggagctgggcaaggagatcctcccgtggcattaaaagagagtcaaagggt

SEQ ID NO: 431813 - DNA, 1758 bp, Homo sapiens
ctgtggtcaccaggcaggaaggaggggtggcctgacccctcggcagtccctcccctcagcctttccccaaattgctacttctctggggctccaggtcctgcttgtgctcagctccagctcactggctggccaccgagacttctggacaggaaactgcaccatcctcttctcccagcaagggggctccagagactgcccacccaggaagtctggtggcctggggatttggacagtgccttggtaatgaccagggctccaggaagagatgtccttgtggctgggggcccctgtgcctgacattcctcctgactctgcggtggagctgtggaagccaggcgcacaggatgcaagcagccaggcccagggaggcagcagctgcatcctcagagaggaagccaggatgccccactctgctgggggtactgcaggggtggggctggaggctgcagagcccacagccctgctcaccagggcagagcccccttcagaacccacagagatccgtccacaaaagcggaaaaaggggccagcccccaaaatgctggggaacgagctatgcagcgtgtgtggggacaaggcctcgggcttccactacaatgttctgagctgcgagggctgcaagggattcttccgccgcagcgtcatcaagggagcgcactacatctgccacagtggcggccactgccccatggacacctacatgcgtcgcaagtgccaggagtgtcggcttcgcaaatgccgtcaggctggcatgcgggaggagtgtgtcctgtcagaagaacagatccgcctgaagaaactgaagcggcaagaggaggaacaggctcatgccacatccttgccccccagggcttcctcacccccccaaatcctgccccagctcagcccggaacaactgggcatgatcgagaagctcgtcgctgcccagcaacagtgtaaccggcgctccttttctgaccggcttcgagtcacgccttggcccatggcaccagatccccatagccgggaggcccgtcagcagcgctttgcccacttcactgagctggccatcgtctctgtgcaggagatagttgactttgctaaacagctacccggcttcctgcagctcagccgggaggaccagattgccctgctgaagacctctgcgatcgaggtgatgcttctggagacatctcggaggtacaaccctgggagtgagagtatcaccttcctcaaggatttcagttataaccgggaagactttgccaaagcagggctgcaagtggaattcatcaaccccatcttcgagttctccagggccatgaatgagctgcaactcaatgatgccgagtttgccttgctcattgctatcagcatcttctctgcagaccggcccaacgtgcaggaccagctccaggtagagaggctgcagcacacatatgtggaagccctgcatgcctacgtctccatccaccatccccatgaccgactgatgttcccacggatgctaatgaaactggtgagcctccggaccctgagcagcgtccactcagagcaagtgtttgcactgcgtctgcaggacaaaaagctcccaccgctgctctctgagatctgggatgtgcacgaatgactgttctgtccccatattttctgttttcttggccggatggctgaggcctggtggctgcctcctagaagtggaacagactgagaagggcaaacattcctgggagctgggcaaggagatcctcccgtggcattaaaagagagtcaaagggt

SEQ ID NO: 431814 - DNA, 1796 bp, Homo sapiens
tccgggccgtgctgggacctttgctccacgaggtgcctatggaggggagggaacacgattctggaggctgctgggattggggtgggggttcctgggaggcagtccttttgcaagagctgctaagagcgctgggtcctgcttgtgctcagctccagctcactggctggccaccgagacttctggacaggaaactgcaccatcctcttctcccagcaagggggctccagagactgcccacccaggaagtctggtggcctggggatttggacagtgccttggtaatgaccagggctccaggaagagatgtccttgtggctgggggcccctgtgcctgacattcctcctgactctgcggtggagctgtggaagccaggcgcacaggatgcaagcagccaggcccagggaggcagcagctgcatcctcagagaggaagccaggatgccccactctgctgggggtactgcaggggtggggctggaggctgcagagcccacagccctgctcaccagggcagagcccccttcagaacccacagagatccgtccacaaaagcggaaaaaggggccagcccccaaaatgctggggaacgagctatgcagcgtgtgtggggacaaggcctcgggcttccactacaatgttctgagctgcgagggctgcaagggattcttccgccgcagcgtcatcaagggagcgcactacatctgccacagtggcggccactgccccatggacacctacatgcgtcgcaagtgccaggagtgtcggcttcgcaaatgccgtcaggctggcatgcgggaggagtgtgtcctgtcagaagaacagatccgcctgaagaaactgaagcggcaagaggaggaacaggctcatgccacatccttgccccccagggcttcctcacccccccaaatcctgccccagctcagcccggaacaactgggcatgatcgagaagctcgtcgctgcccagcaacagtgtaaccggcgctccttttctgaccggcttcgagtcacgccttggcccatggcaccagatccccatagccgggaggcccgtcagcagcgctttgcccacttcactgagctggccatcgtctctgtgcaggagatagttgactttgctaaacagctacccggcttcctgcagctcagccgggaggaccagattgccctgctgaagacctctgcgatcgaggtgatgcttctggagacatctcggaggtacaaccctgggagtgagagtatcaccttcctcaaggatttcagttataaccgggaagactttgccaaagcagggctgcaagtggaattcatcaaccccatcttcgagttctccagggccatgaatgagctgcaactcaatgatgccgagtttgccttgctcattgctatcagcatcttctctgcagaccggcccaacgtgcaggaccagctccaggtagagaggctgcagcacacatatgtggaagccctgcatgcctacgtctccatccaccatccccatgaccgactgatgttcccacggatgctaatgaaactggtgagcctccggaccctgagcagcgtccactcagagcaagtgtttgcactgcgtctgcaggacaaaaagctcccaccgctgctctctgagatctgggatgtgcacgaatgactgttctgtccccatattttctgttttcttggccggatggctgaggcctggtggctgcctcctagaagtggaacagactgagaagggcaaacattcctgggagctgggcaaggagatcctcccgtggcattaaaagagagtcaaagggt

SEQ ID NO: 431815 - DNA, 1696 bp, Homo sapiens
tccgggccgtgctgggacctttgctccacgaggtcctgcttgtgctcagctccagctcactggctggccaccgagacttctggacaggaaactgcaccatcctcttctcccagcaagggggctccagagactgcccacccaggaagtctggtggcctggggatttggacagtgccttggtaatgaccagggctccaggaagagatgtccttgtggctgggggcccctgtgcctgacattcctcctgactctgcggtggagctgtggaagccaggcgcacaggatgcaagcagccaggcccagggaggcagcagctgcatcctcagagaggaagccaggatgccccactctgctgggggtactgcaggggtggggctggaggctgcagagcccacagccctgctcaccagggcagagcccccttcagaacccacagagatccgtccacaaaagcggaaaaaggggccagcccccaaaatgctggggaacgagctatgcagcgtgtgtggggacaaggcctcgggcttccactacaatgttctgagctgcgagggctgcaagggattcttccgccgcagcgtcatcaagggagcgcactacatctgccacagtggcggccactgccccatggacacctacatgcgtcgcaagtgccaggagtgtcggcttcgcaaatgccgtcaggctggcatgcgggaggagtgtgtcctgtcagaagaacagatccgcctgaagaaactgaagcggcaagaggaggaacaggctcatgccacatccttgccccccagggcttcctcacccccccaaatcctgccccagctcagcccggaacaactgggcatgatcgagaagctcgtcgctgcccagcaacagtgtaaccggcgctccttttctgaccggcttcgagtcacgccttggcccatggcaccagatccccatagccgggaggcccgtcagcagcgctttgcccacttcactgagctggccatcgtctctgtgcaggagatagttgactttgctaaacagctacccggcttcctgcagctcagccgggaggaccagattgccctgctgaagacctctgcgatcgaggtgatgcttctggagacatctcggaggtacaaccctgggagtgagagtatcaccttcctcaaggatttcagttataaccgggaagactttgccaaagcagggctgcaagtggaattcatcaaccccatcttcgagttctccagggccatgaatgagctgcaactcaatgatgccgagtttgccttgctcattgctatcagcatcttctctgcagaccggcccaacgtgcaggaccagctccaggtagagaggctgcagcacacatatgtggaagccctgcatgcctacgtctccatccaccatccccatgaccgactgatgttcccacggatgctaatgaaactggtgagcctccggaccctgagcagcgtccactcagagcaagtgtttgcactgcgtctgcaggacaaaaagctcccaccgctgctctctgagatctgggatgtgcacgaatgactgttctgtccccatattttctgttttcttggccggatggctgaggcctggtggctgcctcctagaagtggaacagactgagaagggcaaacattcctgggagctgggcaaggagatcctcccgtggcattaaaagagagtcaaagggt

SEQ ID NO: 431816 - DNA, 1709 bp, Homo sapiens
tccgggccgtgctgggacctttgctccacgaggtgcctatggaggggagggaacacgattctggaggctgctgggattggggtgggggttcctgggaggcagtccttttgcaagagctgctaagagcgctgggtcctgcttgtgctcagctccagctcactggctggccaccgagacttgacagtgccttggtaatgaccagggctccaggaagagatgtccttgtggctgggggcccctgtgcctgacattcctcctgactctgcggtggagctgtggaagccaggcgcacaggatgcaagcagccaggcccagggaggcagcagctgcatcctcagagaggaagccaggatgccccactctgctgggggtactgcaggggtggggctggaggctgcagagcccacagccctgctcaccagggcagagcccccttcagaacccacagagatccgtccacaaaagcggaaaaaggggccagcccccaaaatgctggggaacgagctatgcagcgtgtgtggggacaaggcctcgggcttccactacaatgttctgagctgcgagggctgcaagggattcttccgccgcagcgtcatcaagggagcgcactacatctgccacagtggcggccactgccccatggacacctacatgcgtcgcaagtgccaggagtgtcggcttcgcaaatgccgtcaggctggcatgcgggaggagtgtgtcctgtcagaagaacagatccgcctgaagaaactgaagcggcaagaggaggaacaggctcatgccacatccttgccccccagggcttcctcacccccccaaatcctgccccagctcagcccggaacaactgggcatgatcgagaagctcgtcgctgcccagcaacagtgtaaccggcgctccttttctgaccggcttcgagtcacgccttggcccatggcaccagatccccatagccgggaggcccgtcagcagcgctttgcccacttcactgagctggccatcgtctctgtgcaggagatagttgactttgctaaacagctacccggcttcctgcagctcagccgggaggaccagattgccctgctgaagacctctgcgatcgaggtgatgcttctggagacatctcggaggtacaaccctgggagtgagagtatcaccttcctcaaggatttcagttataaccgggaagactttgccaaagcagggctgcaagtggaattcatcaaccccatcttcgagttctccagggccatgaatgagctgcaactcaatgatgccgagtttgccttgctcattgctatcagcatcttctctgcagaccggcccaacgtgcaggaccagctccaggtagagaggctgcagcacacatatgtggaagccctgcatgcctacgtctccatccaccatccccatgaccgactgatgttcccacggatgctaatgaaactggtgagcctccggaccctgagcagcgtccactcagagcaagtgtttgcactgcgtctgcaggacaaaaagctcccaccgctgctctctgagatctgggatgtgcacgaatgactgttctgtccccatattttctgttttcttggccggatggctgaggcctggtggctgcctcctagaagtggaacagactgagaagggcaaacattcctgggagctgggcaaggagatcctcccgtggcattaaaagagagtcaaagggt

SEQ ID NO: 431817 - DNA, 1832 bp, Homo sapiens
tccgggccgtgctgggacctttgctccacgaggtgcctatggaggggagggaacacgattctggaggctgctgggattggggtgggggttcctgggaggcagtccttttgcaagagctgctaagagcgctgggtcctgcttgtgctcagctccagctcactggctggccaccgagacttctggacaggaaactgcaccatcctcttctcccagcaagggggctccagagactgcccacccaggaagtctggtggcctggggatttggtgggtctgctccttagcagtggcctggggctctgtgacagtgccttggtaatgaccagggctccaggaagagatgtccttgtggctgggggcccctgtgcctgacattcctcctgactctgcggtggagctgtggaagccaggcgcacaggatgcaagcagccaggcccagggaggcagcagctgcatcctcagagaggaagccaggatgccccactctgctgggggtactgcaggggtggggctggaggctgcagagcccacagccctgctcaccagggcagagcccccttcagaacccacagagatccgtccacaaaagcggaaaaaggggccagcccccaaaatgctggggaacgagctatgcagcgtgtgtggggacaaggcctcgggcttccactacaatgttctgagctgcgagggctgcaagggattcttccgccgcagcgtcatcaagggagcgcactacatctgccacagtggcggccactgccccatggacacctacatgcgtcgcaagtgccaggagtgtcggcttcgcaaatgccgtcaggctggcatgcgggaggagtgtgtcctgtcagaagaacagatccgcctgaagaaactgaagcggcaagaggaggaacaggctcatgccacatccttgccccccagggcttcctcacccccccaaatcctgccccagctcagcccggaacaactgggcatgatcgagaagctcgtcgctgcccagcaacagtgtaaccggcgctccttttctgaccggcttcgagtcacgccttggcccatggcaccagatccccatagccgggaggcccgtcagcagcgctttgcccacttcactgagctggccatcgtctctgtgcaggagatagttgactttgctaaacagctacccggcttcctgcagctcagccgggaggaccagattgccctgctgaagacctctgcgatcgaggtgatgcttctggagacatctcggaggtacaaccctgggagtgagagtatcaccttcctcaaggatttcagttataaccgggaagactttgccaaagcagggctgcaagtggaattcatcaaccccatcttcgagttctccagggccatgaatgagctgcaactcaatgatgccgagtttgccttgctcattgctatcagcatcttctctgcagaccggcccaacgtgcaggaccagctccaggtagagaggctgcagcacacatatgtggaagccctgcatgcctacgtctccatccaccatccccatgaccgactgatgttcccacggatgctaatgaaactggtgagcctccggaccctgagcagcgtccactcagagcaagtgtttgcactgcgtctgcaggacaaaaagctcccaccgctgctctctgagatctgggatgtgcacgaatgactgttctgtccccatattttctgttttcttggccggatggctgaggcctggtggctgcctcctagaagtggaacagactgagaagggcaaacattcctgggagctgggcaaggagatcctcccgtggcattaaaagagagtcaaagggt

SEQ ID NO: 431818 - DNA, 1875 bp, Homo sapiens
tccgggccgtgctgggacctttgctccacgaggtgcctatggaggggagggaacacgattctggaggctgctgggattggggtgggggttcctgggaggcagtccttttgcaagagctgctaagagcgctgggtcctgcttgtgctcagctccagctcactggctggccaccgagacttctggacaggaaactgcaccatcctcttctcccagcaagggggctccagagactgcccacccaggaagtctggtggcctggggatttgggaggatcaggtggagaagggagctgaggccagaaaggagcccagttctagaagagtataatctgggtccttcctgcaggacagtgccttggtaatgaccagggctccaggaagagatgtccttgtggctgggggcccctgtgcctgacattcctcctgactctgcggtggagctgtggaagccaggcgcacaggatgcaagcagccaggcccagggaggcagcagctgcatcctcagagaggaagccaggatgccccactctgctgggggtactgcaggggtggggctggaggctgcagagcccacagccctgctcaccagggcagagcccccttcagaacccacagagatccgtccacaaaagcggaaaaaggggccagcccccaaaatgctggggaacgagctatgcagcgtgtgtggggacaaggcctcgggcttccactacaatgttctgagctgcgagggctgcaagggattcttccgccgcagcgtcatcaagggagcgcactacatctgccacagtggcggccactgccccatggacacctacatgcgtcgcaagtgccaggagtgtcggcttcgcaaatgccgtcaggctggcatgcgggaggagtgtgtcctgtcagaagaacagatccgcctgaagaaactgaagcggcaagaggaggaacaggctcatgccacatccttgccccccagggcttcctcacccccccaaatcctgccccagctcagcccggaacaactgggcatgatcgagaagctcgtcgctgcccagcaacagtgtaaccggcgctccttttctgaccggcttcgagtcacgccttggcccatggcaccagatccccatagccgggaggcccgtcagcagcgctttgcccacttcactgagctggccatcgtctctgtgcaggagatagttgactttgctaaacagctacccggcttcctgcagctcagccgggaggaccagattgccctgctgaagacctctgcgatcgaggtgatgcttctggagacatctcggaggtacaaccctgggagtgagagtatcaccttcctcaaggatttcagttataaccgggaagactttgccaaagcagggctgcaagtggaattcatcaaccccatcttcgagttctccagggccatgaatgagctgcaactcaatgatgccgagtttgccttgctcattgctatcagcatcttctctgcagaccggcccaacgtgcaggaccagctccaggtagagaggctgcagcacacatatgtggaagccctgcatgcctacgtctccatccaccatccccatgaccgactgatgttcccacggatgctaatgaaactggtgagcctccggaccctgagcagcgtccactcagagcaagtgtttgcactgcgtctgcaggacaaaaagctcccaccgctgctctctgagatctgggatgtgcacgaatgactgttctgtccccatattttctgttttcttggccggatggctgaggcctggtggctgcctcctagaagtggaacagactgagaagggcaaacattcctgggagctgggcaaggagatcctcccgtggcattaaaagagagtcaaagggt

SEQ ID NO: 431819 - DNA, 1911 bp, Homo sapiens
tccgggccgtgctgggacctttgctccacgaggtgcctatggaggggagggaacacgattctggaggctgctgggattggggtgggggttcctgggaggcagtccttttgcaagagctgctaagagcgctgggtcctgcttgtgctcagctccagctcactggctggccaccgagacttctggacaggaaactgcaccatcctcttctcccagcaagggggctccagagactgcccacccaggaagtctggtggcctggggatttggtgggtctgctccttagcagtggcctggggctctgtggaggatcaggtggagaagggagctgaggccagaaaggagcccagttctagaagagtataatctgggtccttcctgcaggacagtgccttggtaatgaccagggctccaggaagagatgtccttgtggctgggggcccctgtgcctgacattcctcctgactctgcggtggagctgtggaagccaggcgcacaggatgcaagcagccaggcccagggaggcagcagctgcatcctcagagaggaagccaggatgccccactctgctgggggtactgcaggggtggggctggaggctgcagagcccacagccctgctcaccagggcagagcccccttcagaacccacagagatccgtccacaaaagcggaaaaaggggccagcccccaaaatgctggggaacgagctatgcagcgtgtgtggggacaaggcctcgggcttccactacaatgttctgagctgcgagggctgcaagggattcttccgccgcagcgtcatcaagggagcgcactacatctgccacagtggcggccactgccccatggacacctacatgcgtcgcaagtgccaggagtgtcggcttcgcaaatgccgtcaggctggcatgcgggaggagtgtgtcctgtcagaagaacagatccgcctgaagaaactgaagcggcaagaggaggaacaggctcatgccacatccttgccccccagggcttcctcacccccccaaatcctgccccagctcagcccggaacaactgggcatgatcgagaagctcgtcgctgcccagcaacagtgtaaccggcgctccttttctgaccggcttcgagtcacgccttggcccatggcaccagatccccatagccgggaggcccgtcagcagcgctttgcccacttcactgagctggccatcgtctctgtgcaggagatagttgactttgctaaacagctacccggcttcctgcagctcagccgggaggaccagattgccctgctgaagacctctgcgatcgaggtgatgcttctggagacatctcggaggtacaaccctgggagtgagagtatcaccttcctcaaggatttcagttataaccgggaagactttgccaaagcagggctgcaagtggaattcatcaaccccatcttcgagttctccagggccatgaatgagctgcaactcaatgatgccgagtttgccttgctcattgctatcagcatcttctctgcagaccggcccaacgtgcaggaccagctccaggtagagaggctgcagcacacatatgtggaagccctgcatgcctacgtctccatccaccatccccatgaccgactgatgttcccacggatgctaatgaaactggtgagcctccggaccctgagcagcgtccactcagagcaagtgtttgcactgcgtctgcaggacaaaaagctcccaccgctgctctctgagatctgggatgtgcacgaatgactgttctgtccccatattttctgttttcttggccggatggctgaggcctggtggctgcctcctagaagtggaacagactgagaagggcaaacattcctgggagctgggcaaggagatcctcccgtggcattaaaagagagtcaaagggt

SEQ ID NO: 431820 - DNA, 1553 bp, Homo sapiens
catcttacttagggacctgctggggtgcggggaaaaggcgcagtctcggtgggattgcgtgcaggagggtcgtggtctggctgtggcggaggagcataagaagactctgcggtggagctgtggaagccaggcgcacaggatgcaagcagccaggcccagggaggcagcagctgcatcctcagagaggaagccaggatgccccactctgctgggggtactgcaggggtggggctggaggctgcagagcccacagccctgctcaccagggcagagcccccttcagaacccacagagatccgtccacaaaagcggaaaaaggggccagcccccaaaatgctggggaacgagctatgcagcgtgtgtggggacaaggcctcgggcttccactacaatgttctgagctgcgagggctgcaagggattcttccgccgcagcgtcatcaagggagcgcactacatctgccacagtggcggccactgccccatggacacctacatgcgtcgcaagtgccaggagtgtcggcttcgcaaatgccgtcaggctggcatgcgggaggagtgtgtcctgtcagaagaacagatccgcctgaagaaactgaagcggcaagaggaggaacaggctcatgccacatccttgccccccagggcttcctcacccccccaaatcctgccccagctcagcccggaacaactgggcatgatcgagaagctcgtcgctgcccagcaacagtgtaaccggcgctccttttctgaccggcttcgagtcacgccttggcccatggcaccagatccccatagccgggaggcccgtcagcagcgctttgcccacttcactgagctggccatcgtctctgtgcaggagatagttgactttgctaaacagctacccggcttcctgcagctcagccgggaggaccagattgccctgctgaagacctctgcgatcgaggtgatgcttctggagacatctcggaggtacaaccctgggagtgagagtatcaccttcctcaaggatttcagttataaccgggaagactttgccaaagcagggctgcaagtggaattcatcaaccccatcttcgagttctccagggccatgaatgagctgcaactcaatgatgccgagtttgccttgctcattgctatcagcatcttctctgcagaccggcccaacgtgcaggaccagctccaggtagagaggctgcagcacacatatgtggaagccctgcatgcctacgtctccatccaccatccccatgaccgactgatgttcccacggatgctaatgaaactggtgagcctccggaccctgagcagcgtccactcagagcaagtgtttgcactgcgtctgcaggacaaaaagctcccaccgctgctctctgagatctgggatgtgcacgaatgactgttctgtccccatattttctgttttcttggccggatggctgaggcctggtggctgcctcctagaagtggaacagactgagaagggcaaacattcctgggagctgggcaaggagatcctcccgtggcattaaaagagagtcaaagggt

SEQ ID NO: 431821 - DNA, 1716 bp, Homo sapiens
tccgggccgtgctgggacctttgctccacgaggtgcctatggaggggagggaacacgattctggaggctgctgggattggggtgggggttcctgggaggcagtccttttgcaagagctgctaagagcgctgggtcctgcttgtgctcagctccagctcactggctggccaccgagacttctggacaggaaactgcaccatcctcttctcccagcaagggggctccagagactgcccacccaggaagtctggtggcctggggatttgactctgcggtggagctgtggaagccaggcgcacaggatgcaagcagccaggcccagggaggcagcagctgcatcctcagagaggaagccaggatgccccactctgctgggggtactgcaggggtggggctggaggctgcagagcccacagccctgctcaccagggcagagcccccttcagaacccacagagatccgtccacaaaagcggaaaaaggggccagcccccaaaatgctggggaacgagctatgcagcgtgtgtggggacaaggcctcgggcttccactacaatgttctgagctgcgagggctgcaagggattcttccgccgcagcgtcatcaagggagcgcactacatctgccacagtggcggccactgccccatggacacctacatgcgtcgcaagtgccaggagtgtcggcttcgcaaatgccgtcaggctggcatgcgggaggagtgtgtcctgtcagaagaacagatccgcctgaagaaactgaagcggcaagaggaggaacaggctcatgccacatccttgccccccagggcttcctcacccccccaaatcctgccccagctcagcccggaacaactgggcatgatcgagaagctcgtcgctgcccagcaacagtgtaaccggcgctccttttctgaccggcttcgagtcacgccttggcccatggcaccagatccccatagccgggaggcccgtcagcagcgctttgcccacttcactgagctggccatcgtctctgtgcaggagatagttgactttgctaaacagctacccggcttcctgcagctcagccgggaggaccagattgccctgctgaagacctctgcgatcgaggtgatgcttctggagacatctcggaggtacaaccctgggagtgagagtatcaccttcctcaaggatttcagttataaccgggaagactttgccaaagcagggctgcaagtggaattcatcaaccccatcttcgagttctccagggccatgaatgagctgcaactcaatgatgccgagtttgccttgctcattgctatcagcatcttctctgcagaccggcccaacgtgcaggaccagctccaggtagagaggctgcagcacacatatgtggaagccctgcatgcctacgtctccatccaccatccccatgaccgactgatgttcccacggatgctaatgaaactggtgagcctccggaccctgagcagcgtccactcagagcaagtgtttgcactgcgtctgcaggacaaaaagctcccaccgctgctctctgagatctgggatgtgcacgaatgactgttctgtccccatattttctgttttcttggccggatggctgaggcctggtggctgcctcctagaagtggaacagactgagaagggcaaacattcctgggagctgggcaaggagatcctcccgtggcattaaaagagagtcaaagggt

SEQ ID NO: 431822 - DNA, 1695 bp, Homo sapiens
ctgtggtcaccaggcaggaaggaggggtggcctgacccctcggcagtccctcccctcagcctttccccaaattgctacttctctggggctccaggtcctgcttgtgctcagctccagctcactggctggccaccgagacttctggacaggaaactgcaccatcctcttctcccagcaagggggctccagagactgcccacccaggaagtctggtggcctggggatttgggaggatcaggtggagaagggagctgaggccagaaaggagcccagttctagaagagtataatctgggtccttcctgcaggacagtgccttggtaatgaccagggctccaggaagagatgtccttgtggctgggggcccctgtgcctgacattcctcctgactctgcggtggagctgtggaagccaggcgcacaggatgcaagcagccaggcccagggaggcagcagctgcatcctcagagaggaagccaggatgccccactctgctgggggtactgcaggggtggggctggaggctgcagagcccacagccctgctcaccagggcagagcccccttcagaacccacagcgtcatcaagggagcgcactacatctgccacagtggcggccactgccccatggacacctacatgcgtcgcaagtgccaggagtgtcggcttcgcaaatgccgtcaggctggcatgcgggaggagtgtgtcctgtcagaagaacagatccgcctgaagaaactgaagcggcaagaggaggaacaggctcatgccacatccttgccccccagggcttcctcacccccccaaatcctgccccagctcagcccggaacaactgggcatgatcgagaagctcgtcgctgcccagcaacagtgtaaccggcgctccttttctgaccggcttcgagtcacgccttggcccatggcaccagatccccatagccgggaggcccgtcagcagcgctttgcccacttcactgagctggccatcgtctctgtgcaggagatagttgactttgctaaacagctacccggcttcctgcagctcagccgggaggaccagattgccctgctgaagacctctgcgatcgaggtgatgcttctggagacatctcggaggtacaaccctgggagtgagagtatcaccttcctcaaggatttcagttataaccgggaagactttgccaaagcagggctgcaagtggaattcatcaaccccatcttcgagttctccagggccatgaatgagctgcaactcaatgatgccgagtttgccttgctcattgctatcagcatcttctctgcagaccggcccaacgtgcaggaccagctccaggtagagaggctgcagcacacatatgtggaagccctgcatgcctacgtctccatccaccatccccatgaccgactgatgttcccacggatgctaatgaaactggtgagcctccggaccctgagcagcgtccactcagagcaagtgtttgcactgcgtctgcaggacaaaaagctcccaccgctgctctctgagatctgggatgtgcacgaatgactgttctgtccccatattttctgttttcttggccggatggctgaggcctggtggctgcctcctagaagtggaacagactgagaagggcaaacattcctgggagctgggcaaggagatcctcccgtggcattaaaagagagtcaaagggt

SEQ ID NO: 431823 - DNA, 2047 bp, Homo sapiens
ctgtggtcaccaggcaggaaggaggggtggcctgacccctcggcagtccctcccctcagcctttccccaaattgctacttctctggggctccaggtcctgcttgtgctcagctccagctcactggctggccaccgagacttctggacaggaaactgcaccatcctcttctcccagcaagggggctccagagactgcccacccaggaagtctggtggcctggggatttggacagtgccttggtaatgaccagggctccaggaagagatgtccttgtggctgggggcccctgtgcctgacattcctcctgactctgcggtggagctgtggaagccaggcgcacaggatgcaagcagccaggcccagggaggcagcagctgcatcctcagagaggaagccaggatgccccactctgctgggggtactgcaggggtggggctggaggctgcagagcccacagccctgctcaccagggcagagcccccttcagaacccacagagatccgtccacaaaagcggaaaaaggggccagcccccaaaatgctggggaacgagctatgcagcgtgtgtggggacaaggcctcgggcttccactacaatgttctgagctgcgagggctgcaagggattcttccgccgcagcgtcatcaagggagcgcactacatctgccacagtggcggccactgccccatggacacctacatgcgtcgcaagtgccaggagtgtcggcttcgcaaatgccgtcaggctggcatgcgggaggagtgtgtcctgtcagaagaacagatccgcctgaagaaactgaagcggcaagaggaggaacaggctcatgccacatccttgccccccagggcttcctcacccccccaaatcctgccccagctcagcccggaacaactgggcatgatcgagaagctcgtcgctgcccagcaacagtgtaaccggcgctccttttctgaccggcttcgagtcacggtacttgacacacctggggagaggcggctgcgcccagatcaccagtgggcttcttgatgtccgactcaaagcgctttgccttttccctcctgggtagccttggcccatggcaccagatccccatagccgggaggcccgtcagcagcgctttgcccacttcactgagctggccatcgtctctgtgcaggagatagttgactttgctaaacagctacccggcttcctgcagctcagccgggaggaccagattgccctgctgaagacctctgcgatcgaggtggctggagaagggcaagggatgaagggagaagcagagtgggattatctgtgggaggggcctccagacatcgagctgggagagccaaatctgctgggaagcagggatgaggagaatcggcctccctggaagaggccatgctccaagaccagccctcctagtccccgtttgaggtttgctgcttgtgtgcaggtgatgcttctggagacatctcggaggtacaaccctgggagtgagagtatcaccttcctcaaggatttcagttataaccgggaagactttgccaaagcagggctgcaagtggaattcatcaaccccatcttcgagttctccagggccatgaatgagctgcaactcaatgatgccgagtttgccttgctcattgctatcagcatcttctctgcagaccggcccaacgtgcaggaccagctccaggtagagaggctgcagcacacatatgtggaagccctgcatgcctacgtctccatccaccatccccatgaccgactgatgttcccacggatgctaatgaaactggtgagcctccggaccctgagcagcgtccactcagagcaagtgtttgcactgcgtctgcaggacaaaaagctcccaccgctgctctctgagatctgggatgtgcacgaatgactgttctgtccccatattttctgttttcttggccggatggctgaggcctggtggctgcctcctagaagtggaacagactgagaagggcaaacattcctgggagctgggcaaggagatcctcccgtggcattaaaagagagtcaaagggt

SEQ ID NO: 431824 - DNA, 1286 bp, Homo sapiens
catcttacttagggacctgctggggtgcggggaaaaggcgcagtctcggtgggattgcgtgcaggagggtcgtggtctggctgtggcggaggagcataagaagactctgcggtggagctgtggaagccaggcgcacaggatgcaagcagccaggcccagggaggcagcagctgcatcctcagagaggaagccaggatgccccactctgctgggggtactgcaggggtggggctggaggctgcagagcccacagccctgctcaccagggcagagcccccttcagaacccacaggtgtcctgtcagaagaacagatccgcctgaagaaactgaagcggcaagaggaggaacaggctcatgccacatccttgccccccagggcttcctcacccccccaaatcctgccccagctcagcccggaacaactgggcatgatcgagaagctcgtcgctgcccagcaacagtgtaaccggcgctccttttctgaccggcttcgagtcacgccttggcccatggcaccagatccccatagccgggaggcccgtcagcagcgctttgcccacttcactgagctggccatcgtctctgtgcaggagatagttgactttgctaaacagctacccggcttcctgcagctcagccgggaggaccagattgccctgctgaagacctctgcgatcgaggtgatgcttctggagacatctcggaggtacaaccctgggagtgagagtatcaccttcctcaaggatttcagttataaccgggaagactttgccaaagcagggctgcaagtggaattcatcaaccccatcttcgagttctccagggccatgaatgagctgcaactcaatgatgccgagtttgccttgctcattgctatcagcatcttctctgcagaccggcccaacgtgcaggaccagctccaggtagagaggctgcagcacacatatgtggaagccctgcatgcctacgtctccatccaccatccccatgaccgactgatgttcccacggatgctaatgaaactggtgagcctccggaccctgagcagcgtccactcagagcaagtgtttgcactgcgtctgcaggacaaaaagctcccaccgctgctctctgagatctgggatgtgcacgaatgactgttctgtccccatattttctgttttcttggccggatggctgaggcctggtggctgcctcctagaagtggaacagactgagaagggcaaacattcctgggagctgggcaaggagatcctcccgtggcattaaaagagagtcaaagggt

SEQ ID NO: 431825 - DNA, 1283 bp, Homo sapiens
  misc_feature (23)..(23): n is a, c, g, or t
  misc_feature (91)..(91): n is a, c, g, or t
  misc_feature (94)..(94): n is a, c, g, or t
aaatccagtcatcacagagtggngaagtgcttactattgacctcctttattgatgaagaaacaaaacttttttttttttgagacgaagtgnctnctgtcatccagcctgagcaagtgtgagactctgtttcaaaaaaaaaaaatcttcttgcctttacccagtgctgtctgcttttctggagccccaaaccaccccctttgccccatccttccctcctgtctttcccccacccccttgccccatcctttccccatctgctcccttcctcatatttggccctgtccttaggtgtcctgtcagaagaacagatccgcctgaagaaactgaagcggcaagaggaggaacaggctcatgccacatccttgccccccagggcttcctcacccccccaaatcctgccccagctcagcccggaacaactgggcatgatcgagaagctcgtcgctgcccagcaacagtgtaaccggcgctccttttctgaccggcttcgagtcacgccttggcccatggcaccagatccccatagccgggaggcccgtcagcagcgctttgcccacttcactgagctggccatcgtctctgtgcaggagatagttgactttgctaaacagctacccggcttcctgcagctcagccgggaggaccagattgccctgctgaagacctctgcgatcgaggtgatgcttctggagacatctcggaggtacaaccctgggagtgagagtatcaccttcctcaaggatttcagttataaccgggaagactttgccaaagcagggctgcaagtggaattcatcaaccccatcttcgagttctccagggccatgaatgagctgcaactcaatgatgccgagtttgccttgctcattgctatcagcatcttctctgcagaccggcccaacgtgcaggaccagctccaggtagagaggctgcagcacacatatgtggaagccctgcatgcctacgtctccatccaccatccccatgaccgactgatgttcccacggatgctaatgaaactggtgagcctccggaccctgagcagcgtccactcagagcaagtgtttgcactgcgtctgcaggacaaaaagctcccaccgctgctctctgagatctgggatgtgcacgaatgactgttctgtccccatattttctgttttcttggccggatggctgaggcctggtggctgcctcctagaagtggaacagactgagaagggcaaacattcctgggagctgggcaaggagatcctcccgtggcattaaaagagagtcaaagggt

SEQ ID NO: 431826 - DNA, 1453 bp, Homo sapiens
catcttacttagggacctgctggggtgcggggaaaaggcgcagtctcggtgggattgcgtgcaggagggtcgtggtctggctgtggcggaggagcataagaaggacagtgccttggtaatgaccagggctccaggaagagatgtccttgtggctgggggcccctgtgcctgacattcctcctgactctgcggtggagctgtggaagccaggcgcacaggatgcaagcagccaggcccagggaggcagcagctgcatcctcagagaggaagccaggatgccccactctgctgggggtactgcaggggtggggctggaggctgcagagcccacagccctgctcaccagggcagagcccccttcagaacccacagagatccgtccacaaaagcggaaaaaggggccagcccccaaaatgctggggaacgagctatgcagcgtgtgtggggacaaggcctcgggcttccactacaatgttctgagctgcgagggctgcaagggattcttccgccgcagcgtcatcaagggagcgcactacatctgccacagtggcggccactgccccatggacacctacatgcgtcgcaagtgccaggagtgtcggcttcgcaaatgccgtcaggctggcatgcgggaggagtgtgtcctgtcagaagaacagatccgcctgaagaaactgaagcggcaagaggaggaacaggctcatgccacatccttgccccccagggcttcctcacccccccaaatcctgccccagctcagcccggaacaactgggcatgatcgagaagctcgtcgctgcccagcaacagtgtaaccggcgctccttttctgaccggcttcgagtcacggtgatgcttctggagacatctcggaggtacaaccctgggagtgagagtatcaccttcctcaaggatttcagttataaccgggaagactttgccaaagcagggctgcaagtggaattcatcaaccccatcttcgagttctccagggccatgaatgagctgcaactcaatgatgccgagtttgccttgctcattgctatcagcatcttctctgcagaccggcccaacgtgcaggaccagctccaggtagagaggctgcagcacacatatgtggaagccctgcatgcctacgtctccatccaccatccccatgaccgactgatgttcccacggatgctaatgaaactggtgagcctccggaccctgagcagcgtccactcagagcaagtgtttgcactgcgtctgcaggacaaaaagctcccaccgctgctctctgagatctgggatgtgcacgaatgactgttctgtccccatattttctgttttcttggccggatggctgaggcctggtggctgcctcctagaagtggaacagactgagaagggcaaacattcctgggagctgggcaaggagatcctcccgtggcattaaaagagagtcaaagggt

SEQ ID NO: 431827 - DNA, 1178 bp, Homo sapiens
gagaccatagactggaaggtctccatggtgttcttaaggtgtctcaggttctccgggaagctccccttcagtggcgggtacaccttcagggggtcagcattctggagcaggtgcatcacatggtcctctgtcatgttgccatacttggtggcattctgcatgggcccctggggcagggcctcgggcttccactacaatgttctgagctgcgagggctgcaagggattcttccgccgcagcgtcatcaagggagcgcactacatctgccacagtggcggccactgccccatggacacctacatgcgtcgcaagtgccaggagtgtcggcttcgcaaatgccgtcaggctggcatgcgggaggagtgtgtcctgtcagaagaacagatccgcctgaagaaactgaagcggcaagaggaggaacaggctcatgccacatccttgccccccagggcttcctcacccccccaaatcctgccccagctcagcccggaacaactgggcatgatcgagaagctcgtcgctgcccagcaacagtgtaaccggcgctccttttctgaccggcttcgagtcacggtgatgcttctggagacatctcggaggtacaaccctgggagtgagagtatcaccttcctcaaggatttcagttataaccgggaagactttgccaaagcagggctgcaagtggaattcatcaaccccatcttcgagttctccagggccatgaatgagctgcaactcaatgatgccgagtttgccttgctcattgctatcagcatcttctctgcagaccggcccaacgtgcaggaccagctccaggtagagaggctgcagcacacatatgtggaagccctgcatgcctacgtctccatccaccatccccatgaccgactgatgttcccacggatgctaatgaaactggtgagcctccggaccctgagcagcgtccactcagagcaagtgtttgcactgcgtctgcaggacaaaaagctcccaccgctgctctctgagatctgggatgtgcacgaatgactgttctgtccccatattttctgttttcttggccggatggctgaggcctggtggctgcctcctagaagtggaacagactgagaagggcaaacattcctgggagctgggcaaggagatcctcccgtggcattaaaagagagtcaaagggt

SEQ ID NO: 431828 - DNA, 1386 bp, Homo sapiens
catcttacttagggacctgctggggtgcggggaaaaggcgcagtctcggtgggattgcgtgcaggagggtcgtggtctggctgtggcggaggagcataagaaggtgtcctgtcagaagaacagatccgcctgaagaaactgaagcggcaagaggaggaacaggctcatgccacatccttgccccccagggcttcctcacccccccaaatcctgccccagctcagcccggaacaactgggcatgatcgagaagctcgtcgctgcccagcaacagtgtaaccggcgctccttttctgaccggcttcgagtcacggtacttgacacacctggggagaggcggctgcgcccagatcaccagtgggcttcttgatgtccgactcaaagcgctttgccttttccctcctgggtagccttggcccatggcaccagatccccatagccgggaggcccgtcagcagcgctttgcccacttcactgagctggccatcgtctctgtgcaggagatagttgactttgctaaacagctacccggcttcctgcagctcagccgggaggaccagattgccctgctgaagacctctgcgatcgaggtggctggagaagggcaagggatgaagggagaagcagagtgggattatctgtgggaggggcctccagacatcgagctgggagagccaaatctgctgggaagcagggatgaggagaatcggcctccctggaagaggccatgctccaagaccagccctcctagtccccgtttgaggtttgctgcttgtgtgcaggtgatgcttctggagacatctcggaggtacaaccctgggagtgagagtatcaccttcctcaaggatttcagttataaccgggaagactttgccaaagcagggctgcaagtggaattcatcaaccccatcttcgagttctccagggccatgaatgagctgcaactcaatgatgccgagtttgccttgctcattgctatcagcatcttctctgcagaccggcccaacgtgcaggaccagctccaggtagagaggctgcagcacacatatgtggaagccctgcatgcctacgtctccatccaccatccccatgaccgactgatgttcccacggatgctaatgaaactggtgagcctccggaccctgagcagcgtccactcagagcaagtgtttgcactgcgtctgcaggacaaaaagctcccaccgctgctctctgagatctgggatgtgcacgaatgactgttctgtccccatattttctgttttcttggccggatggctgaggcctggtggctgcctcctagaagtggaacagactgagaagggcaaacattcctgggagctgggcaaggagatcctcccgtggcattaaaagagagtcaaagggt

SEQ ID NO: 431829 - DNA, 917 bp, Homo sapiens
catcttacttagggacctgctggggtgcggggaaaaggcgcagtctcggtgggattgcgtgcaggagggtcgtggtctggctgtggcggaggagcataagaaggtgtcctgtcagaagaacagatccgcctgaagaaactgaagcggcaagaggaggaacaggctcatgccacatccttgccccccagggcttcctcacccccccaaatcctgccccagctcagcccggaacaactgggcatgatcgagaagctcgtcgctgcccagcaacagtgtaaccggcgctccttttctgaccggcttcgagtcacggtgatgcttctggagacatctcggaggtacaaccctgggagtgagagtatcaccttcctcaaggatttcagttataaccgggaagactttgccaaagcagggctgcaagtggaattcatcaaccccatcttcgagttctccagggccatgaatgagctgcaactcaatgatgccgagtttgccttgctcattgctatcagcatcttctctgcagaccggcccaacgtgcaggaccagctccaggtagagaggctgcagcacacatatgtggaagccctgcatgcctacgtctccatccaccatccccatgaccgactgatgttcccacggatgctaatgaaactggtgagcctccggaccctgagcagcgtccactcagagcaagtgtttgcactgcgtctgcaggacaaaaagctcccaccgctgctctctgagatctgggatgtgcacgaatgactgttctgtccccatattttctgttttcttggccggatggctgaggcctggtggctgcctcctagaagtggaacagactgagaagggcaaacattcctgggagctgggcaaggagatcctcccgtggcattaaaagagagtcaaagggt

SEQ ID NO: 431830 - DNA, 1864 bp, Homo sapiens
ctgtggtcaccaggcaggaaggaggggtggcctgacccctcggcagtccctcccctcagcctttccccaaattgctacttctctggggctccaggtcctgcttgtgctcagctccagctcactggctggccaccgagacttctggacaggaaactgcaccatcctcttctcccagcaagggggctccagagactgcccacccaggaagtctggtggcctggggatttggacagtgccttggtaatgaccagggctccaggaagagatgtccttgtggctgggggcccctgtgcctgacattcctcctgactctgcggtggagctgtggaagccaggcgcacaggatgcaagcagccaggcccagggaggcagcagctgcatcctcagagaggaagccaggatgccccactctgctgggggtactgcaggggtggggctggaggctgcagagcccacagccctgctcaccagggcagagcccccttcagaacccacagagatccgtccacaaaagcggaaaaaggggccagcccccaaaatgctggggaacgagctatgcagcgtgtgtggggacaaggcctcgggcttccactacaatgttctgagctgcgagggctgcaagggattcttccgccgcagcgtcatcaagggagcgcactacatctgccacagtggcggccactgccccatggacacctacatgcgtcgcaagtgccaggagtgtcggcttcgcaaatgccgtcaggctggcatgcgggaggagtgtgtcctgtcagaagaacagatccgcctgaagaaactgaagcggcaagaggaggaacaggctcatgccacatccttgccccccagggcttcctcacccccccaaatcctgccccagctcagcccggaacaactgggcatgatcgagaagctcgtcgctgcccagcaacagtgtaaccggcgctccttttctgaccggcttcgagtcacgccttggcccatggcaccagatccccatagccgggaggcccgtcagcagcgctttgcccacttcactgagctggccatcgtctctgtgcaggagatagttgactttgctaaacagctacccggcttcctgcagctcagccgggaggaccagattgccctgctgaagacctctgcgatcgaggtgatgcttctggagacatctcggaggtacaaccctgggagtgagagtatcaccttcctcaaggatttcagttataaccgggaagactttgccaaagcagggctgcaagtggaattcatcaaccccatcttcgagttctccagggccatgaatgagctgcaactcaatgatgccgagtttgccttgctcattgctatcagcatcttctctgcaggatgagagagcttggctggagcatgtctctatattttggttgcaatttggggtatggaactggaccctggccagacctgctcctcaactctcttggtgacctatagaccggcccaacgtgcaggaccagctccaggtagagaggctgcagcacacatatgtggaagccctgcatgcctacgtctccatccaccatccccatgaccgactgatgttcccacggatgctaatgaaactggtgagcctccggaccctgagcagcgtccactcagagcaagtgtttgcactgcgtctgcaggacaaaaagctcccaccgctgctctctgagatctgggatgtgcacgaatgactgttctgtccccatattttctgttttcttggccggatggctgaggcctggtggctgcctcctagaagtggaacagactgagaagggcaaacattcctgggagctgggcaaggagatcctcccgtggcattaaaagagagtcaaagggt

SEQ ID NO: 431831 - DNA, 1992 bp, Homo sapiens
ctgtggtcaccaggcaggaaggaggggtggcctgacccctcggcagtccctcccctcagcctttccccaaattgctacttctctggggctccaggtcctgcttgtgctcagctccagctcactggctggccaccgagacttctggacaggaaactgcaccatcctcttctcccagcaagggggctccagagactgcccacccaggaagtctggtggcctggggatttggacagtgccttggtaatgaccagggctccaggaagagatgtccttgtggctgggggcccctgtgcctgacattcctcctgactctgcggtggagctgtggaagccaggcgcacaggatgcaagcagccaggcccagggaggcagcagctgcatcctcagagaggaagccaggatgccccactctgctgggggtactgcaggggtggggctggaggctgcagagcccacagccctgctcaccagggcagagcccccttcagaacccacagagatccgtccacaaaagcggaaaaaggggccagcccccaaaatgctggggaacgagctatgcagcgtgtgtggggacaaggcctcgggcttccactacaatgttctgagctgcgagggctgcaagggattcttccgccgcagcgtcatcaagggagcgcactacatctgccacagtggcggccactgccccatggacacctacatgcgtcgcaagtgccaggagtgtcggcttcgcaaatgccgtcaggctggcatgcgggaggagtgtgtcctgtcagaagaacagatccgcctgaagaaactgaagcggcaagaggaggaacaggctcatgccacatccttgccccccagggcttcctcacccccccaaatcctgccccagctcagcccggaacaactgggcatgatcgagaagctcgtcgctgcccagcaacagtgtaaccggcgctccttttctgaccggcttcgagtcacgccttggcccatggcaccagatccccatagccgggaggcccgtcagcagcgctttgcccacttcactgagctggccatcgtctctgtgcaggagatagttgactttgctaaacagctacccggcttcctgcagctcagccgggaggaccagattgccctgctgaagacctctgcgatcgaggtgatgcttctggagacatctcggaggtacaaccctgggagtgagagtatcaccttcctcaaggatttcagttataaccgggaagactttgccaaagcagggctgcaagtggaattcatcaaccccatcttcgagttctccagggccatgaatgagctgcaactcaatgatgccgagtttgccttgctcattgctatcagcatcttctctgcaggtgtggaggaggggcaatgggaaacagcaagagacttacaccaaggagggctgcaggtcccacaggaatcggtggggggaggggggtggtggcttgggagggtggaggcatttgctgtgttattttaggatgagagagcttggctggagcatgtctctatattttggttgcaatttggggtatggaactggaccctggccagacctgctcctcaactctcttggtgacctatagaccggcccaacgtgcaggaccagctccaggtagagaggctgcagcacacatatgtggaagccctgcatgcctacgtctccatccaccatccccatgaccgactgatgttcccacggatgctaatgaaactggtgagcctccggaccctgagcagcgtccactcagagcaagtgtttgcactgcgtctgcaggacaaaaagctcccaccgctgctctctgagatctgggatgtgcacgaatgactgttctgtccccatattttctgttttcttggccggatggctgaggcctggtggctgcctcctagaagtggaacagactgagaagggcaaacattcctgggagctgggcaaggagatcctcccgtggcattaaaagagagtcaaagggt

SEQ ID NO: 431832 - DNA, 1252 bp, Homo sapiens
ctgtggtcaccaggcaggaaggaggggtggcctgacccctcggcagtccctcccctcagcctttccccaaattgctacttctctggggctccaggtcctgcttgtgctcagctccagctcactggctggccaccgagacttctggacaggaaactgcaccatcctcttctcccagcaagggggctccagagactgcccacccaggaagtctggtggcctggggatttggacagtgccttggtaatgaccagggctccaggaagagatgtccttgtggctgggggcccctgtgcctgacattcctcctgactctgcggtggagctgtggaagccaggcgcacaggatgcaagcagccaggcccagggaggcagcagctgcatcctcagagaggaagccaggatgccccactctgctgggggtactgcaggggtggggctggaggctgcagagcccacagccctgctcaccagggcagagcccccttcagaacccacagagatccgtccacaaaagcggaaaaaggggccagcccccaaaatgctggggaacgagctatgcagcgtgtgtggggacaaggcctcgggcttccactacaatgttctgagctgcgagggctgcaagggattcttccgccgcagcgtcatcaagggagcgcactacatctgccacagtggcggccactgccccatggacacctacatgcgtcgcaagtgccaggagtgtcggcttcgcaaatgccgtcaggctggcatgcgggaggagtgtgtcctgtcagaagaacagatccgcctgaagaaactgaagcggcaagaggaggaacaggctcatgccacatccttgccccccagggcttcctcacccccccaaatcctacaatgctctgagctgcgagggctgcaagggattcttccgccgcagcgtcatcaagggagcgcactacatccaccatccccatgaccgactgatgttcccacggatgctaatgaaactggtgagcctccggaccctgagcagcgtccactcagagcaagtgtttgcactgcgtctgcaggacaaaaagctcccaccgctgctctctgagatctgggatgtgcacgaatgactgttctgtccccatattttctgttttcttggccggatggctgaggcctggtggctgcctcctagaagtggaacagactgagaagggcaaacattcctgggagctgggcaaggagatcctcccgtggcattaaaagagagtcaaagggt

SEQ ID NO: 431833 - DNA, 1449 bp, Homo sapiens
ctgtggtcaccaggcaggaaggaggggtggcctgacccctcggcagtccctcccctcagcctttccccaaattgctacttctctggggctccaggtcctgcttgtgctcagctccagctcactggctggccaccgagacttctggacaggaaactgcaccatcctcttctcccagcaagggggctccagagactgcccacccaggaagtctggtggcctggggatttggacagtgccttggtaatgaccagggctccaggaagagatgtccttgtggctgggggcccctgtgcctgacattcctcctgactctgcggtggagctgtggaagccaggcgcacaggatgcaagcagccaggcccagggaggcagcagctgcatcctcagagaggaagccaggatgccccactctgctgggggtactgcaggggtggggctggaggctgcagagcccacagccctgctcaccagggcagagcccccttcagaacccacagagatccgtccacaaaagcggaaaaaggggccagcccccaaaatgctggggaacgagctatgcagcgtgtgtggggacaaggcctcgggcttccactacaatgttctgagctgcgagggctgcaagggattcttccgccgcagcgtcatcaagggagcgcactacatctgccacagtggcggccactgccccatggacacctacatgcgtcgcaagtgccaggagtgtcggcttcgcaaatgccgtcaggctggcatgcgggaggagtgtgtcctgtcagaagaacagatccgcctgaagaaactgaagcggcaagaggaggaacaggctcatgccacatccttgccccccagggcttcctcacccccccaaatcctacaatgctctgagctgcgagggctgcaagggattcttccgccgcagcgtcatcaagggagcgcactacatccaccatccccatgaccgactgatgttcccacggatgctaatgaaactggtgagcctccggaccctgagcagcgtccactcagagcaagtgtttgcactgcgtctgcaggacaaaaagctcccaccgctgctctctgagatctgggatgtgcacgaatgactgttctgtccccatattttctgttttcttggccggatggctgaggcctggtggctgcctcctagaagtggaacagactgagaagggcaaacattcctgggagctgggcaaggagatcctcccgtggcattaaaagagagtcaaagggtttgcgagttttgtggctactgagcagtggagccctcgctaacactgtgctgtgtctgaagatcatgctgaccccacaaacggatgggcctgggggccactttgcacagggttctccagagccctgcccatcctgcctccaccacttcctgtttttcccacagggccccaagaaaaattctccactgtcactctgtgg

SEQ ID NO: 431834 - DNA, 1041 bp, Homo sapiens
ctgtggtcaccaggcaggaaggaggggtggcctgacccctcggcagtccctcccctcagcctttccccaaattgctacttctctggggctccaggtcctgcttgtgctcagctccagctcactggctggccaccgagacttctggacaggaaactgcaccatcctcttctcccagcaagggggctccagagactgcccacccaggaagtctggtggcctggggatttggacagtgccttggtaatgaccagggctccaggaagagatgtccttgtggctgggggcccctgtgcctgacattcctcctgactctgcggtggagctgtggaagccaggcgcacaggatgcaagcagccaggcccagggaggcagcagctgcatcctcagagaggaagccaggatgccccactctgctgggggtactgcaggggtggggctggaggctgcagagcccacagccctgctcaccagggcagagcccccttcagaacccacagagatccgtccacaaaagcggaaaaaggggccagcccccaaaatgctggggaacgagctatgcagcgtgtgtggggacaaggcctcgggcttccactacaatgttctgagctgcgagggctgcaagggattcttccgccgcagcgtcatcaagggagcgcactacatctgccacagtggcggccactgccccatggacacctacatgcgtcgcaagtgccaggagtgtcggcttcgcaaatgccgtcaggctggcatgcgggaggagtgtgtcctgtcagaagaacagatccgcctgaagaaactgaagcggcaagaggaggaacaggctcatgccacatccttgccccaggttctcacccccaatctggcctggttaccggaaatggcatgatcgagagtcctcgtgccagaacagttacgggctccttttgacgttgggtcgctggctgaaggtccatcgggagcctacagttgccttctatcgctttgtcgagcttttgaaacggactgtcacgatgaagtcatactccgtggctcgacgga

SEQ ID NO: 431835 - DNA, 846 bp, Homo sapiens
ctgtggtcaccaggcaggaaggaggggtggcctgacccctcggcagtccctcccctcagcctttccccaaattgctacttctctggggctccaggtcctgcttgtgctcagctccagctcactggctggccaccgagacttctggacaggaaactgcaccatcctcttctcccagcaagggggctccagagactgcccacccaggaagtctggtggcctggggatttggacagtgccttggtaatgaccagggctccaggaagagatgtccttgtggctgggggcccctgtgcctgacattcctcctgactctgcggtggagctgtggaagccaggcgcacaggatgcaagcagccaggcccagggaggcagcagctgcatcctcagagaggaagccaggatgccccactctgctgggggtactgcaggggtggggctggaggctgcagagcccacagccctgctcaccagggcagagcccccttcagaacccacagagatccgtccacaaaagcggaaaaaggggccagcccccaaaatgctggggaacgagctatgcagcgtgtgtggggacaaggcctcgggcttccactacaatgttctgagctgcgagggctgcaagggattcttccgccgcagcgtcatcaagggagcgcactacatctgccacagtggcggccactgccccatggacacctacatgcgtcgcaagtgccaggagtgtcggcttcgcaaatgccgtcaggctggcatgcgggaggagtgtgtcctgtcagaagaacagatccgcctgaagaaactgaagcggcgagatcctcccgtggcattaaaagagagtcaaagggt

SEQ ID NO: 431836 - DNA, 807 bp, Homo sapiens
catcttacttagggacctgctggggtgcggggaaaaggcgcagtctcggtgggattgcgtgcaggagggtcgtggtctggctgtggcggaggagcataagaaggactccagattcaattatttatatatacttcaggatttaaactttgcttccagagttgtcatggaggaggccaagaagcaaatagagacagtgccttggtaatgaccagggctccaggaagagatgtccttgtggctgggggcccctgtgcctgacattcctcctgactctgcggtggagctgtggaagccaggcgcacaggatgcaagcagccaggcccagggaggcagcagctgcatcctcagagaggaagccaggatgccccactctgctgggggtactgcaggggtggggctggaggctgcagagcccacagccctgctcaccagggcagagcccccttcagaacccacagagatccgtccacaaaagcggaaaaaggggccagcccccaaaatgctggggaacgagctatgcagcgtgtgtggggacaaggcctcgggcttccactacaatgttctgagctgcgagggctgcaagggattcttccgccgcagcgtcatcaagggagcgcactacatctgccacagtggcggccactgccccatggacacctacatgcgtcgcaagtgccaggagtgtcggcttcgcaaatgccgtcaggctggcatgcgggaggagtgtgtcctgtcagaagaacagatccgcctgaagaaactgaagcggcgagatcctcccgtggcattaaaagagagtcaaagggt

SEQ ID NO: 431837 - DNA, 193 bp, Homo sapiens
gtgagtctccccatggtgttccttttcctccttcccacacacaggcccattccctgacatacctactttcccttcaagaatttctctctgactgcatgctgtgcagacaattcacctctcccacaactcccctactcttgccccgcttccctggggacaggcaaaagctgtgtttgtctctctcctttcccca

SEQ ID NO: 431838 - DNA, 604 bp, Homo sapiens
ggagcagtagcgtgcgcccataatctcagatactcaggaagctgaaacctgattgcttcagcccagtagtttgaggcgatagtgtcctattattgcacctgtgaatagcactgagttccagcctgggcaacatagagagaccccatctcaaaaaaaaaattaatagttttgacctcagagggatattatgaggaaagcacataaagccttataacaggctgggcgcagtggcttactccaataatccccacactttgggaggcccaggtgagaggatcacttgagcccaggaattcctagactagcctgggcaaaatagggagaacctgtctctaaaaaacataatagtaatataataaagccttagtacaggctaatatatggcaagtaaatgttagctgatattgttgatattgataaaagggaggatcaggtggagaagggagctgaggccagaaaggagcccagttctagaagagtataatctgggtccttcctgcaggacagtgccttggtaatgaccagggctccaggaagagatgtccttgtggctgggggcccctgtgcctgacattcctcctggtaagcttcattccatccctct

SEQ ID NO: 431839 - DNA, 1955 bp, Homo sapiens
ctgtggtcaccaggcaggaaggaggggtggcctgacccctcggcagtccctcccctcagcctttccccaaattgctacttctctggggctccaggtcctgcttgtgctcagctccagctcactggctggccaccgagacttctggacaggaaactgcaccatcctcttctcccagcaagggggctccagagactgcccacccaggaagtctggtggcctggggatttggacagtgccttggtaatgaccagggctccaggaagagatgtccttgtggctgggggcccctgtgcctgacattcctcctgactctgcggtggagctgtggaagccaggcgcacaggatgcaagcagccaggcccagggaggcagcagctgcatcctcagagaggaagccaggatgccccactctgctgggggtactgcaggggtggggctggaggctgcagagcccacagccctgctcaccagggcagagcccccttcagaacccacagagatccgtccacaaaagcggaaaaaggggccagcccccaaaatgctggggaacgagctatgcagcgtgtgtggggacaaggcctcgggcttccactacaatgttctgagctgcgagggctgcaagggattcttccgccgcagcgtcatcaagggagcgcactacatctgccacagtggcggccactgccccatggacacctacatgcgtcgcaagtgccaggagtgtcggcttcgcaaatgccgtcaggctggcatgcgggaggagtgtgtcctgtcagaagaacagatccgcctgaagaaactgaagcggcaagaggaggaacaggctcatgccacatccttgccccccagggcttcctcacccccccaaatcctgccccagctcagcccggaacaactgggcatgatcgagaagctcgtcgctgcccagcaacagtgtaaccggcgctccttttctgaccggcttcgagtcacgccttggcccatggcaccagatccccatagccgggaggcccgtcagcagcgctttgcccacttcactgagctggccatcgtctctgtgcaggagatagttgactttgctaaacagctacccggcttcctgcagctcagccgggaggaccagattgccctgctgaagacctctgcgatcgaggtgatgcttctggagacatctcggaggtacaaccctgggagtgagagtatcaccttcctcaaggatttcagttataaccgggaagactttgccaaagcagggctgcaagtggaattcatcaaccccatcttcgagttctccagggccatgaatgagctgcaactcaatgatgccgagtttgccttgctcattgctatcagcatcttctctgcagaccggcccaacgtgcaggaccagctccaggtagagaggctgcagcacacatatgtggaagccctgcatgcctacgtctccatccaccatccccatgaccgactgatgttcccacggatgctaatgaaactggtgagcctccggaccctgagcagcgtccactcagagcaagtgtttgcactgcgtctgcaggacaaaaagctcccaccgctgctctctgagatctgggatgtgcacgaatgactgttctgtccccatattttctgttttcttggccggatggctgaggcctggtggctgcctcctagaagtggaacagactgagaagggcaaacattcctgggagctgggcaaggagatcctcccgtggcattaaaagagagtcaaagggtttgcgagttttgtggctactgagcagtggagccctcgctaacactgtgctgtgtctgaagatcatgctgaccccacaaacggatgggcctgggggccactttgcacagggttctccagagccctgcccatcctgcctccaccacttcctgtttttcccacagggccccaagaaaaattctccactgtcactctgtgg

SEQ ID NO: 431840 - DNA, 1340 bp, Homo sapiens
catcttacttagggacctgctggggtgcggggaaaaggcgcagtctcggtgggattgcgtgcaggagggtcgtggtctggctgtggcggaggagcataagaagactctgcggtggagctgtggaagccaggcgcacaggatgcaagcagccaggcccagggaggcagcagctgcatcctcagagaggaagccaggatgccccactctgctgggggtactgcaggggtggggctggaggctgcagagcccacagccctgctcaccagggcagagcccccttcagaacccacaggtgtcctgtcagaagaacagatccgcctgaagaaactgaagcggcaagaggaggaacaggctcatgccacatccttgccccccagggcttcctcacccccccaaatcctgccccagctcagcccggaacaactgggcatgatcgagaagctcgtcgctgcccagcaacagtgtaaccggcgctccttttctgaccggcttcgagtcacggtgatgcttctggagacatctcggaggtacaaccctgggagtgagagtatcaccttcctcaaggatttcagttataaccgggaagactttgccaaagcagggctgcaagtggaattcatcaaccccatcttcgagttctccagggccatgaatgagctgcaactcaatgatgccgagtttgccttgctcattgctatcagcatcttctctgcaggtgtggaggaggggcaatgggaaacagcaagagacttacaccaaggagggctgcaggtcccacaggaatcggtggggggaggggggtggtggcttgggagggtggaggcatttgctgtgttattttaggatgagagagcttggctggagcatgtctctatattttggttgcaatttggggtatggaactggaccctggccagacctgctcctcaactctcttggtgacctatagaccggcccaacgtgcaggaccagctccaggtagagaggctgcagcacacatatgtggaagccctgcatgcctacgtctccatccaccatccccatgaccgactgatgttcccacggatgctaatgaaactggtgagcctccggaccctgagcagcgtccactcagagcaagtgtttgcactgcgtctgcaggacaaaaagctcccaccgctgctctctgagatctgggatgtgcacgaatgactgttctgtccccatattttctgttttcttggccggatggctgaggcctggtggctgcctcctagaagtggaacagactgagaagggcaaacattcctgggagctgggcaaggagatcctcccgtggcattaaaagagagtcaaagggt

SEQ ID NO: 431841 - DNA, 457 bp, Homo sapiens
  misc_feature (16)..(16): n is a, c, g, or t
  misc_feature (97)..(97): n is a, c, g, or t
  misc_feature (100)..(100): n is a, c, g, or t
  misc_feature (120)..(120): n is a, c, g, or t
  misc_feature (133)..(133): n is a, c, g, or t
  misc_feature (150)..(150): n is a, c, g, or t
  misc_feature (158)..(158): n is a, c, g, or t
taccgacgcgactcgnttgccgtgcgagacgcgggcgcgcgaacggctgcaaggaccaagcgtcgcgaggtcagagaggcgtgcgagcgacgacgantantgtggaagcgcgcgtgcgantcgcgcgtacggntggccgaccgacgcgancgcgcgcnagtgaccgactgatgttcccacggatgctaatgaaactggtgagcctccggaccctgagcagcgtccactcagagcaagtgtttgcactgcgtctgcaggacaaaaagctcccaccgctgctctctgagatctgggatgtgcacgaatgactgttctgtccccatattttctgttttcttggccggatggctgaggcctggtggctgcctcctagaagtggaacagactgagaagggcaaacattcctgggagctgggcaaggagatcctcccgtggcattaaaagagagtcaaagggt

SEQ ID NO: 431842 - DNA, 983 bp, Homo sapiens
ctgtggtcaccaggcaggaaggaggggtggcctgacccctcggcagtccctcccctcagcctttccccaaattgctacttctctggggctccaggtcctgcttgtgctcagctccagctcactggctggccaccgagacttctggacaggaaactgcaccatcctcttctcccagcaagggggctccagagactgcccacccaggaagtctggtggcctggggatttgggaggatcaggtggagaagggagctgaggccagaaaggagcccagttctagaagagtataatctgggtccttcctgcaggacagtgccttggtaatgaccagggctccaggaagagatgtccttgtggctgggggcccctgtgcctgacattcctcctgactctgcggtggagctgtggaagccaggcgcacaggatgcaagcagccaggcccagggaggcagcagctgcatcctcagagaggaagccaggatgccccactctgctgggggtactgcaggggtggggctggaggctgcagagcccacagccctgctcaccagggcagagcccccttcagaacccacagcgtcatcaagggagcgcactacatctgccacagtggcggccactgccccatggacacctacatgcgtcgcaagtgccaggagtgtcggcttcgcaaatgccgtcaggctggcatgcgggaggagtgtgtcctgtcagaagaacagatccgcctgaagaaactgaagcggccgtccactcagagcaagtgtttgcactgcgtctgcaggacaaaaagctcccaccgctgctctctgagatctgggatgtgcacgaatgactgttctgtccccatattttctgttttcttggccggatggctgaggcctggtggctgcctcctagaagtggaacagactgagaagggcaaacattcctgggagctgggcaaggagatcctcccgtggcattaaaagagagtcaaagggt

SEQ ID NO: 431843 - DNA, 480 bp, Homo sapiens
tgtgatcttgagtagattagtatcattaggattctgagtatagtacctggttttcttttgctgtgtatctttttgtttttttctaggcttggtttttctatggaatttccactaaatcaactaaactttttgccatttatctaaatcattcacagcaatcagctttattagggtactctgtttcattttcctgagtaagcgtttcctggagtcttctgacccgcccctgactggactgatagccttctatgcctgatgtgtgtggctatattctgggaactcccttctctatgcctgatatgtgactgtattctgggaactcccttcactattgtccgggaattccttttcttctctcttattatatctcgttttctgttacctagtgtcttggtttactcccttgtttgatggagcctgttttctctggcagtgtcctcctgagaaaggtggcataggaggtgaatgaccttgctggtc

SEQ ID NO: 431844 - DNA, 681 bp, Homo sapiens
agcggagaaaaaacccgcgggcctggccgggtgcaggccacccttgccggcggataggaatccccgcccacaccgtggtctttccagcaccgcagacacctgccggctcctcccgagcggagctcagggctgacaaagcgcggtcagagcggccgcttactggggctcgcccgctccttagagcactggcaatgatgtgcggatcctcgctgctgctgctgggaaactgttgagtggctgaatgaccccaggggaccctgggagagctctgaagccctcagccaccaagtggctgggctggcaagggttcattcattcattcaacaaatacgaatgtgcagcggtgctggggtcatgatggctcggtgggcagcgaggggccgggccggctggaggagcacagtgcggattctgtaagtgggctgggggctgggccttctgcggctggaccggccttcacctgcaggcagggttggggcaggtgaggagcagatggacccacccagagctcttccaccttctcaggcttgcacccccttcctggagccttatccacaccctcagtcctcgctctcactgtgggggagctgcagaggatgcggtttttccacattccatctccacccacaggaggctttgagatggggggagctctcctgggcctgaatgtgtgccgtcctg

SEQ ID NO: 431845 - DNA, 4175 bp, Homo sapiens
gaaggaggaagcgcgcggggcgccataaggaggaagcgggtagtcgaccgtgtccgcgcgcctgggagacgctgcctcggcccggacgcgcccgcgcccccgcggctggagggtggtcgccactgggacactgtgaaccaggagtgagtcggagctgccgcgctgcccaggccatggactgtgaggtcaacaacggttccagcctcagggatgagtgcatcacaaacctactggtgtttggcttcctccaaagctgttctgacaacagcttccgcagagagctggacgcactgggccacgagctgccagtgctggctccccagtgggagggctacgatgagctgcagactgatggcaaccgcagcagccactcccgcttgggaagaatagaggcagattctgaaagtcaagaagacatcatccggaatattgccaggcacctcgcccaggtcggggacagcatggaccgtagcatccctccgggcctggtgaacggcctggccctgcagctcaggaacaccagccggtcggaggaggaccggaacagggacctggccactgccctggagcagctgctgcaggcctaccctagagacatggagaaggagaagaccatgctggtgctggccctgctgctggccaagaaggtggccagtcacacgccgtccttgctccgtgatgtctttcacacaacagtgaattttattaaccagaacctacgcacctacgtgaggagcttagccagaaatgggatggactgaacggacagttccagaagtgtgactggctaaagctcgatgtggtcacagctgtatagctgcttccagtgtagacggagccctggcatgtcaacagcgttcctagagaagacaggctggaagatagctgtgacttctattttaaagacaatgttaaacttataacccactttaaaatatctacattaatatacttgaatgaaaatgtccatttacacgtatttgaatggccttcatatcatccacacatgaatctgcacatctgtaaatctacacacggtgcctttatttccactgtgcaggttcccacttaaaaattaaattggaaagcaggtttcaaggaagtagaaacaaaatacaatttttttggtaaaaaaaaattactgtttattaaagtacaaccatagaggatggtcttacagcaggcagtatcctgtttgaggaaagcaagaatcagagaaggaacataccccttacaaatgaaaaattccactcaaaatagggactatctatcttaatactaaggaaccaacaatcttcctgtttaaaaaaccacatggcacagagattctgaactaaagtgctgcactcaaatgatgggaagtccggccccagtacacaggggcttgactttttcaacttcgtttcctttgttggagtcaaaaagaaccacttgtggttctaaaaggtgtgaaggtgatttaagggcccaggtcagccactgtttgtttacaaaatcaggtaactaactgcatacactttttctctttccatgacatcaagactttgctaaagacatgaagccacgggtgccagaagctactgcgatgccccgggagttagccccctggtaatagctgtaaacttccaatttctagccatacgctcagctcatccatgcctcagaagtgcatctggagagaacaggtttctaagcataaaagatgaaagagcagttggactttttaaaaattcagcaaagtggttccctctcttagggacagtcaaaaccaagtcacttaggtagtaccaaaataaataaggaaaagcttagctttagaaacagtgcaacactggtctgctgttccagtggtaagctatgtcccaggaatcagtttaaaagcacgacagtggatgctgggtccatatcacacacattgctgtgaacaggaaactcctgtgaccacaacatgaggccactggagacgcatatgagtaagggcactgacggactcatgatttcttcttaccagatgctttcctgttctttaagagtttaaaatcatcagaaaggaaaaacaaactctatattgttcagcatgcaatacataccacgctagggctggctcaattgaaagtgggcaaaagcttacaaatactaaaaagaagtgctgccgcgcagtgtggaggccactgtttggaaataaatcttcctaacactacgacttttcatgttttggagtggacttttaaaaaagttttccaaccacaatggaaacaggttgaaccacactgcgcctacacatccatccatacgtcagccattataatcagattctcactgggggaggcattttcttcccaaaggagctgtatgcagtcatcacccggaactaatgggaaagtgttcttaagcagcaagtgactctggaccacctctctcacacactgactcttccacagcatcttcacctgcttctgtttcacttgaattcatacagtaggccaccattttataacaggtcttagtgtaaattcttccagaccaagtctgagatagtcttggttgtaaagcaagaccgtcaccccttctcccaaagccaacattataaaaagattccattgtctcaaacacaaatgttccagtcttgagcacttcccagccatggtgactcgggcatatcctggcagttggtggattttgccctgtaacacaatccttgtggatatgattcaaaggtgactttaattcagagaatgtgttttcctttctgttttaaaaatatttgaattaagtgatggaaattcttttgttaaacatcaaaagctttctccttgaaaagatgcttggtgtatctgaaagtcacgtgggacatttggtgcattcagaaggtcaaatcattcctgacctctcctcttaggacccagcattaactgctgcgatactcaaggcttccttaaaggatcacagcactggcgcctagttttactgtccagcaactttattagttgtgctagctgagaattggaatatagagtcctttgaatgttacgatcttgttttcaaaacctggagtcaaaccaattaagtatggacttaacaaagacaattgatgatgtgaaatgataccacctgtcaagggcatagttaccatgtggatagaaagatgagtccactgattatcttcaaatcccatgtattctctctagcacgttgcttctgacagaaagaataactcacagatttgaagtttgttcctttcccctgatgaagagtagattggccaaaaggtagatgacaggaaggaagaggagccagaatgacccacagtgatcagttcagcagtgcagagcggcagtgcagaggctcatggaactcacacggaaaaaggaaacacatgctgtgagatgaaagcatttgagccaacactaaattgaccgtaattaaggaatgaggtaggaagaggcacttttaatctggaggaagaaataaatggaagactgtaataggaaaaatacaggtctaggaaaaaaataatttttttcctttgatgctggccaaggacccctctacataatacagttctcctgctggaaagcatcagggcaaacagagttattccaaactctgcaacagggaagactgtactttgaccttcttttcctggggaaagggaacaactagtaatctttaaatgtcaaaacttttcttctaaatagtacattcattaaccagtttcttctggtggtgcaaagaacactcaccacagtgagcaataccactattcaatttcccctttggagaggtgacagcggggtagaatcacctggagtcagctgctagtctttaactgatgacaaggccttgcaaatacccctgagaacaatttcactctgagctcacagggaagcagcagtctggtgtgggctcctgtggtgtaaccatcaaatgtggaagacctgatggtgttagtgtgtggggatgccgggctgaaattcaacagccttgcaaaaagaaagggaagatgggatgtgttaatattgtagtggcatgcactttccagctctccatggagctctctttatatatgaggtaattgaatgtcactattctgtaccatacagcaggtattatctagccaaggttataattaccatgaagtgctgtggaatgtagtaggaggcttttcactggga

SEQ ID NO: 431846 - DNA, 2199 bp, Homo sapiens
gaaggaggaagcgcgcggggcgccataaggaggaagcgggtagtcgaccgtgtccgcgcgcctgggagacgctgcctcggcccggacgcgcccgcgcccccgcggctggagggtggtcgccactgggacactgtgaaccaggagtgagtcggagctgccgcgctgcccaggccatggactgtgaggtcaacaacggttccagcctcagggatgagtgcatcacaaacctactggtgtttggcttcctccaaagctgttctgacaacagcttccgcagagagctggacgcactgggccacgagctgccagtgctggctccccagtgggagggctacgatgagctgcagactgatggcaaccgcagcagccactcccgcttgggaagaatagaggcagattctgaaagtcaagaagacatcatccggaatattgccaggcacctcgcccaggtcggggacagcatggaccgtagcatccctccgggcctggtgaacggcctggccctgcagctcaggaacaccagccggtcggaggaggaccggaacagggacctggccactgccctggagcagctgctgcaggcctaccctagagacatggagaaggagaagaccatgctggtgctggccctgctgctggccaagaaggtggccagtcacacgccgtccttgctccgtgatgtctttcacacaacagtgaattttattaaccagaacctacgcacctacgtgaggagcttagccagaaatgggatggactgaacggacagttccagaagtgtgactggctaaagctcgatgtggtcacagctgtatagctgcttccagtgtagacggagccctggcatgtcaacagcgttcctagagaagacaggctggaagatagctgtgacttctattttaaagacaatgttaaacttataacccactttaaaatatctacattaatatacttgaatgaaaatgtccatttacacgtatttgaatggccttcatatcatccacacatgaatctgcacatctgtaaatctacacacggtgcctttatttccactgtgcaggttcccacttaaaaattaaattggaaagcaggtttcaaggaagtagaaacaaaatacaatttttttggtaaaaaaaaattactgtttattaaagtacaaccatagaggatggtcttacagcaggcagtatcctgtttgaggaaagcaagaatcagagaaggaacataccccttacaaatgaaaaattccactcaaaatagggactatctatcttaatactaaggaaccaacaatcttcctgtttaaaaaaccacatggcacagagattctgaactaaagtgctgcactcaaatgatgggaagtccggccccagtacacaggggcttgactttttcaacttcgtttcctttgttggagtcaaaaagaaccacttgtggttctaaaaggtgtgaaggtgatttaagggcccaggtcagccactgtttgtttacaaaatcaggtaactaactgcatacactttttctctttccatgacatcaagactttgctaaagacatgaagccacgggtgccagaagctactgcgatgccccgggagttagccccctggtaatagctgtaaacttccaatttctagccatacgctcagctcatccatgcctcagaagtgcatctggagagaacaggtttctaagcataaaagatgaaagagcagttggactttttaaaaattcagcaaagtggttccctctcttagggacagtcaaaaccaagtcacttaggtagtaccaaaataaataaggaaaagcttagctttagaaacagtgcaacactggtctgctgttccagtggtaagctatgtcccaggaatcagtttaaaagcacgacagtggatgctgggtccatatcacacacattgctgtgaacaggaaactcctgtgaccacaacatgaggccactggagacgcatatgagtaagggcactgacggactcatgatttcttcttaccagatgctttcctgttctttaagagtttaaaatcatcagaaaggaaaaacaaactctatattgttcagcatgcaatacataccacgctagggctggctcaattgaaagtgggcaaaagcttacaaatactaaaaagaagtgctgccgcgcagtgtggaggccactgtttggaaataaatcttcctaacact

SEQ ID NO: 431847 - DNA, 4527 bp, Homo sapiens
agcggagaaaaaacccgcgggcctggccgggtgcaggccacccttgccggcggataggaatccccgcccacaccgtggtctttccagcaccgcagacacctgccggctcctcccgagcggagctcagggctgacaaagcgcggtcagagcggccgcttactggggctcgcccgctccttagagcactggcaatgatgtgcggatcctcgctgctgctgctgggaaactgttgagtggctgaatgaccccaggggaccctgggagagctctgaagccctcagccaccaagtggctgggctggcaagggttcattcattcattcaacaaatacgaatgtgcagcggtgctggggtcatgatggctcggtgggcagcgaggggccgggccggctggaggagcacagtgcggattctgtcgccactgggacactgtgaaccaggagtgagtcggagctgccgcgctgcccaggccatggactgtgaggtcaacaacggttccagcctcagggatgagtgcatcacaaacctactggtgtttggcttcctccaaagctgttctgacaacagcttccgcagagagctggacgcactgggccacgagctgccagtgctggctccccagtgggagggctacgatgagctgcagactgatggcaaccgcagcagccactcccgcttgggaagaatagaggcagattctgaaagtcaagaagacatcatccggaatattgccaggcacctcgcccaggtcggggacagcatggaccgtagcatccctccgggcctggtgaacggcctggccctgcagctcaggaacaccagccggtcggaggaggaccggaacagggacctggccactgccctggagcagctgctgcaggcctaccctagagacatggagaaggagaagaccatgctggtgctggccctgctgctggccaagaaggtggccagtcacacgccgtccttgctccgtgatgtctttcacacaacagtgaattttattaaccagaacctacgcacctacgtgaggagcttagccagaaatgggatggactgaacggacagttccagaagtgtgactggctaaagctcgatgtggtcacagctgtatagctgcttccagtgtagacggagccctggcatgtcaacagcgttcctagagaagacaggctggaagatagctgtgacttctattttaaagacaatgttaaacttataacccactttaaaatatctacattaatatacttgaatgaaaatgtccatttacacgtatttgaatggccttcatatcatccacacatgaatctgcacatctgtaaatctacacacggtgcctttatttccactgtgcaggttcccacttaaaaattaaattggaaagcaggtttcaaggaagtagaaacaaaatacaatttttttggtaaaaaaaaattactgtttattaaagtacaaccatagaggatggtcttacagcaggcagtatcctgtttgaggaaagcaagaatcagagaaggaacataccccttacaaatgaaaaattccactcaaaatagggactatctatcttaatactaaggaaccaacaatcttcctgtttaaaaaaccacatggcacagagattctgaactaaagtgctgcactcaaatgatgggaagtccggccccagtacacaggggcttgactttttcaacttcgtttcctttgttggagtcaaaaagaaccacttgtggttctaaaaggtgtgaaggtgatttaagggcccaggtcagccactgtttgtttacaaaatcaggtaactaactgcatacactttttctctttccatgacatcaagactttgctaaagacatgaagccacgggtgccagaagctactgcgatgccccgggagttagccccctggtaatagctgtaaacttccaatttctagccatacgctcagctcatccatgcctcagaagtgcatctggagagaacaggtttctaagcataaaagatgaaagagcagttggactttttaaaaattcagcaaagtggttccctctcttagggacagtcaaaaccaagtcacttaggtagtaccaaaataaataaggaaaagcttagctttagaaacagtgcaacactggtctgctgttccagtggtaagctatgtcccaggaatcagtttaaaagcacgacagtggatgctgggtccatatcacacacattgctgtgaacaggaaactcctgtgaccacaacatgaggccactggagacgcatatgagtaagggcactgacggactcatgatttcttcttaccagatgctttcctgttctttaagagtttaaaatcatcagaaaggaaaaacaaactctatattgttcagcatgcaatacataccacgctagggctggctcaattgaaagtgggcaaaagcttacaaatactaaaaagaagtgctgccgcgcagtgtggaggccactgtttggaaataaatcttcctaacactacgacttttcatgttttggagtggacttttaaaaaagttttccaaccacaatggaaacaggttgaaccacactgcgcctacacatccatccatacgtcagccattataatcagattctcactgggggaggcattttcttcccaaaggagctgtatgcagtcatcacccggaactaatgggaaagtgttcttaagcagcaagtgactctggaccacctctctcacacactgactcttccacagcatcttcacctgcttctgtttcacttgaattcatacagtaggccaccattttataacaggtcttagtgtaaattcttccagaccaagtctgagatagtcttggttgtaaagcaagaccgtcaccccttctcccaaagccaacattataaaaagattccattgtctcaaacacaaatgttccagtcttgagcacttcccagccatggtgactcgggcatatcctggcagttggtggattttgccctgtaacacaatccttgtggatatgattcaaaggtgactttaattcagagaatgtgttttcctttctgttttaaaaatatttgaattaagtgatggaaattcttttgttaaacatcaaaagctttctccttgaaaagatgcttggtgtatctgaaagtcacgtgggacatttggtgcattcagaaggtcaaatcattcctgacctctcctcttaggacccagcattaactgctgcgatactcaaggcttccttaaaggatcacagcactggcgcctagttttactgtccagcaactttattagttgtgctagctgagaattggaatatagagtcctttgaatgttacgatcttgttttcaaaacctggagtcaaaccaattaagtatggacttaacaaagacaattgatgatgtgaaatgataccacctgtcaagggcatagttaccatgtggatagaaagatgagtccactgattatcttcaaatcccatgtattctctctagcacgttgcttctgacagaaagaataactcacagatttgaagtttgttcctttcccctgatgaagagtagattggccaaaaggtagatgacaggaaggaagaggagccagaatgacccacagtgatcagttcagcagtgcagagcggcagtgcagaggctcatggaactcacacggaaaaaggaaacacatgctgcttaaaatgcacgataacttaattatccaaattaccattcaattccggtatttttgagatgaaagcatttgagccaacactaaattgaccgtaattaaggaatgaggtaggaagaggcacttttaatctggaggaagaaataaatggaagactgtaataggaaaaatacaggtctaggaaaaaaataatttttttcctttgatgctggccaaggacccctctacataatacagttctcctgctggaaagcatcagggcaaacagagttattccaaactctgcaacagggaagactgtactttgaccttcttttcctggggaaagggaacaactagtaatctttaaatgtcaaaacttttcttctaaatagtacattcattaaccagtttcttctggtggtgcaaagaacactcaccacagtgagcaataccactattcaatttcccctttggagaggtgacagcggggtagaatcacctggagtcagctgctagtctttaactgatgacaaggccttgcaaatacccctgagaacaatttcactctgagctcacagggaagcagcagtctggtgtgggctcctgtggtgtaaccatcaaatgtggaagacctgatggtgttagtgtgtggggatgccgggctgaaattcaacagccttgcaaaaagaaagggaagatgggatgtgttaatattgtagtggcatgcactttccagctctccatggagctctctttatatatgaggtaattgaatgtcactattctgtaccatacagcaggtattatctagccaaggttataattaccatgaagtgctgtggaatgtagtaggaggcttttcactggga

SEQ ID NO: 431848 - DNA, 4203 bp, Homo sapiens
gaaggaggaagcgcgcggggcgccataaggaggaagcgggtagtcgaccgtgtccgcgcgcctgggagacgctgcctcggcccggacgcgcccgcgcccccgcggctggagggtggtcgccactgggacactgtgaaccaggagtgagtcggagctgccgcgctgcccaggccatggactgtgaggtcaacaacggttccagcctcagggatgagtgcatcacaaacctactggtgtttggcttcctccaaagctgttctgacaacagcttccgcagagagctggacgcactgggccacgagctgccagtgctggctccccagtgggagggctacgatgagctgcagactgatggcaaccgcagcagccaattctgaaagtcaagaagacatcatccggaatattgccaggcacctcgcccaggtcggggacagcatggaccgtagcatccctccgggcctggtgaacggcctggccctgcagctcaggaacaccagccggtcggaggaggaccggaacagggacctggccactgccctggagcagctgctgcaggcctaccctagagacatggagaaggagaagaccatgctggtgctggccctgctgctggccaagaaggtggccagtcacacgccgtccttgctccgtgatgtctttcacacaacagtgaattttattaaccagaacctacgcacctacgtgaggagcttagccagaaatgggatggactgaacggacagttccagaagtgtgactggctaaagctcgatgtggtcacagctgtatagctgcttccagtgtagacggagccctggcatgtcaacagcgttcctagagaagacaggctggaagatagctgtgacttctattttaaagacaatgttaaacttataacccactttaaaatatctacattaatatacttgaatgaaaatgtccatttacacgtatttgaatggccttcatatcatccacacatgaatctgcacatctgtaaatctacacacggtgcctttatttccactgtgcaggttcccacttaaaaattaaattggaaagcaggtttcaaggaagtagaaacaaaatacaatttttttggtaaaaaaaaattactgtttattaaagtacaaccatagaggatggtcttacagcaggcagtatcctgtttgaggaaagcaagaatcagagaaggaacataccccttacaaatgaaaaattccactcaaaatagggactatctatcttaatactaaggaaccaacaatcttcctgtttaaaaaaccacatggcacagagattctgaactaaagtgctgcactcaaatgatgggaagtccggccccagtacacaggggcttgactttttcaacttcgtttcctttgttggagtcaaaaagaaccacttgtggttctaaaaggtgtgaaggtgatttaagggcccaggtcagccactgtttgtttacaaaatcaggtaactaactgcatacactttttctctttccatgacatcaagactttgctaaagacatgaagccacgggtgccagaagctactgcgatgccccgggagttagccccctggtaatagctgtaaacttccaatttctagccatacgctcagctcatccatgcctcagaagtgcatctggagagaacaggtttctaagcataaaagatgaaagagcagttggactttttaaaaattcagcaaagtggttccctctcttagggacagtcaaaaccaagtcacttaggtagtaccaaaataaataaggaaaagcttagctttagaaacagtgcaacactggtctgctgttccagtggtaagctatgtcccaggaatcagtttaaaagcacgacagtggatgctgggtccatatcacacacattgctgtgaacaggaaactcctgtgaccacaacatgaggccactggagacgcatatgagtaagggcactgacggactcatgatttcttcttaccagatgctttcctgttctttaagagtttaaaatcatcagaaaggaaaaacaaactctatattgttcagcatgcaatacataccacgctagggctggctcaattgaaagtgggcaaaagcttacaaatactaaaaagaagtgctgccgcgcagtgtggaggccactgtttggaaataaatcttcctaacactacgacttttcatgttttggagtggacttttaaaaaagttttccaaccacaatggaaacaggttgaaccacactgcgcctacacatccatccatacgtcagccattataatcagattctcactgggggaggcattttcttcccaaaggagctgtatgcagtcatcacccggaactaatgggaaagtgttcttaagcagcaagtgactctggaccacctctctcacacactgactcttccacagcatcttcacctgcttctgtttcacttgaattcatacagtaggccaccattttataacaggtcttagtgtaaattcttccagaccaagtctgagatagtcttggttgtaaagcaagaccgtcaccccttctcccaaagccaacattataaaaagattccattgtctcaaacacaaatgttccagtcttgagcacttcccagccatggtgactcgggcatatcctggcagttggtggattttgccctgtaacacaatccttgtggatatgattcaaaggtgactttaattcagagaatgtgttttcctttctgttttaaaaatatttgaattaagtgatggaaattcttttgttaaacatcaaaagctttctccttgaaaagatgcttggtgtatctgaaagtcacgtgggacatttggtgcattcagaaggtcaaatcattcctgacctctcctcttaggacccagcattaactgctgcgatactcaaggcttccttaaaggatcacagcactggcgcctagttttactgtccagcaactttattagttgtgctagctgagaattggaatatagagtcctttgaatgttacgatcttgttttcaaaacctggagtcaaaccaattaagtatggacttaacaaagacaattgatgatgtgaaatgataccacctgtcaagggcatagttaccatgtggatagaaagatgagtccactgattatcttcaaatcccatgtattctctctagcacgttgcttctgacagaaagaataactcacagatttgaagtttgttcctttcccctgatgaagagtagattggccaaaaggtagatgacaggaaggaagaggagccagaatgacccacagtgatcagttcagcagtgcagagcggcagtgcagaggctcatggaactcacacggaaaaaggaaacacatgctgcttaaaatgcacgataacttaattatccaaattaccattcaattccggtatttttgagatgaaagcatttgagccaacactaaattgaccgtaattaaggaatgaggtaggaagaggcacttttaatctggaggaagaaataaatggaagactgtaataggaaaaatacaggtctaggaaaaaaataatttttttcctttgatgctggccaaggacccctctacataatacagttctcctgctggaaagcatcagggcaaacagagttattccaaactctgcaacagggaagactgtactttgaccttcttttcctggggaaagggaacaactagtaatctttaaatgtcaaaacttttcttctaaatagtacattcattaaccagtttcttctggtggtgcaaagaacactcaccacagtgagcaataccactattcaatttcccctttggagaggtgacagcggggtagaatcacctggagtcagctgctagtctttaactgatgacaaggccttgcaaatacccctgagaacaatttcactctgagctcacagggaagcagcagtctggtgtgggctcctgtggtgtaaccatcaaatgtggaagacctgatggtgttagtgtgtggggatgccgggctgaaattcaacagccttgcaaaaagaaagggaagatgggatgtgttaatattgtagtggcatgcactttccagctctccatggagctctctttatatatgaggtaattgaatgtcactattctgtaccatacagcaggtattatctagccaaggttataattaccatgaagtgctgtggaatgtagtaggaggcttttcactggga

SEQ ID NO: 431849 - DNA, 4023 bp, Homo sapiens
gaaggaggaagcgcgcggggcgccataaggaggaagcgggtagtcgaccgtgtccgcgcgcctgggagacgctgcctcggcccggacgcgcccgcgcccccgcggctggagggtggtcgccactgggacactgtgaaccaggagtgagtcggagctgccgcgctgcccaggccatggactgtgaggtcaacaacggttccagcctcagggatgagtgcatcacaaacctactggtgtttggcttcctccaaagctgttctgacaacagcttccgcagagagctggaacggcctggccctgcagctcaggaacaccagccggtcggaggaggaccggaacagggacctggccactgccctggagcagctgctgcaggcctaccctagagacatggagaaggagaagaccatgctggtgctggccctgctgctggccaagaaggtggccagtcacacgccgtccttgctccgtgatgtctttcacacaacagtgaattttattaaccagaacctacgcacctacgtgaggagcttagccagaaatgggatggactgaacggacagttccagaagtgtgactggctaaagctcgatgtggtcacagctgtatagctgcttccagtgtagacggagccctggcatgtcaacagcgttcctagagaagacaggctggaagatagctgtgacttctattttaaagacaatgttaaacttataacccactttaaaatatctacattaatatacttgaatgaaaatgtccatttacacgtatttgaatggccttcatatcatccacacatgaatctgcacatctgtaaatctacacacggtgcctttatttccactgtgcaggttcccacttaaaaattaaattggaaagcaggtttcaaggaagtagaaacaaaatacaatttttttggtaaaaaaaaattactgtttattaaagtacaaccatagaggatggtcttacagcaggcagtatcctgtttgaggaaagcaagaatcagagaaggaacataccccttacaaatgaaaaattccactcaaaatagggactatctatcttaatactaaggaaccaacaatcttcctgtttaaaaaaccacatggcacagagattctgaactaaagtgctgcactcaaatgatgggaagtccggccccagtacacaggggcttgactttttcaacttcgtttcctttgttggagtcaaaaagaaccacttgtggttctaaaaggtgtgaaggtgatttaagggcccaggtcagccactgtttgtttacaaaatcaggtaactaactgcatacactttttctctttccatgacatcaagactttgctaaagacatgaagccacgggtgccagaagctactgcgatgccccgggagttagccccctggtaatagctgtaaacttccaatttctagccatacgctcagctcatccatgcctcagaagtgcatctggagagaacaggtttctaagcataaaagatgaaagagcagttggactttttaaaaattcagcaaagtggttccctctcttagggacagtcaaaaccaagtcacttaggtagtaccaaaataaataaggaaaagcttagctttagaaacagtgcaacactggtctgctgttccagtggtaagctatgtcccaggaatcagtttaaaagcacgacagtggatgctgggtccatatcacacacattgctgtgaacaggaaactcctgtgaccacaacatgaggccactggagacgcatatgagtaagggcactgacggactcatgatttcttcttaccagatgctttcctgttctttaagagtttaaaatcatcagaaaggaaaaacaaactctatattgttcagcatgcaatacataccacgctagggctggctcaattgaaagtgggcaaaagcttacaaatactaaaaagaagtgctgccgcgcagtgtggaggccactgtttggaaataaatcttcctaacactacgacttttcatgttttggagtggacttttaaaaaagttttccaaccacaatggaaacaggttgaaccacactgcgcctacacatccatccatacgtcagccattataatcagattctcactgggggaggcattttcttcccaaaggagctgtatgcagtcatcacccggaactaatgggaaagtgttcttaagcagcaagtgactctggaccacctctctcacacactgactcttccacagcatcttcacctgcttctgtttcacttgaattcatacagtaggccaccattttataacaggtcttagtgtaaattcttccagaccaagtctgagatagtcttggttgtaaagcaagaccgtcaccccttctcccaaagccaacattataaaaagattccattgtctcaaacacaaatgttccagtcttgagcacttcccagccatggtgactcgggcatatcctggcagttggtggattttgccctgtaacacaatccttgtggatatgattcaaaggtgactttaattcagagaatgtgttttcctttctgttttaaaaatatttgaattaagtgatggaaattcttttgttaaacatcaaaagctttctccttgaaaagatgcttggtgtatctgaaagtcacgtgggacatttggtgcattcagaaggtcaaatcattcctgacctctcctcttaggacccagcattaactgctgcgatactcaaggcttccttaaaggatcacagcactggcgcctagttttactgtccagcaactttattagttgtgctagctgagaattggaatatagagtcctttgaatgttacgatcttgttttcaaaacctggagtcaaaccaattaagtatggacttaacaaagacaattgatgatgtgaaatgataccacctgtcaagggcatagttaccatgtggatagaaagatgagtccactgattatcttcaaatcccatgtattctctctagcacgttgcttctgacagaaagaataactcacagatttgaagtttgttcctttcccctgatgaagagtagattggccaaaaggtagatgacaggaaggaagaggagccagaatgacccacagtgatcagttcagcagtgcagagcggcagtgcagaggctcatggaactcacacggaaaaaggaaacacatgctgcttaaaatgcacgataacttaattatccaaattaccattcaattccggtatttttgagatgaaagcatttgagccaacactaaattgaccgtaattaaggaatgaggtaggaagaggcacttttaatctggaggaagaaataaatggaagactgtaataggaaaaatacaggtctaggaaaaaaataatttttttcctttgatgctggccaaggacccctctacataatacagttctcctgctggaaagcatcagggcaaacagagttattccaaactctgcaacagggaagactgtactttgaccttcttttcctggggaaagggaacaactagtaatctttaaatgtcaaaacttttcttctaaatagtacattcattaaccagtttcttctggtggtgcaaagaacactcaccacagtgagcaataccactattcaatttcccctttggagaggtgacagcggggtagaatcacctggagtcagctgctagtctttaactgatgacaaggccttgcaaatacccctgagaacaatttcactctgagctcacagggaagcagcagtctggtgtgggctcctgtggtgtaaccatcaaatgtggaagacctgatggtgttagtgtgtggggatgccgggctgaaattcaacagccttgcaaaaagaaagggaagatgggatgtgttaatattgtagtggcatgcactttccagctctccatggagctctctttatatatgaggtaattgaatgtcactattctgtaccatacagcaggtattatctagccaaggttataattaccatgaagtgctgtggaatgtagtaggaggcttttcactggga

SEQ ID NO: 431850 - DNA, 4222 bp, Homo sapiens
agcggagaaaaaacccgcgggcctggccgggtgcaggccacccttgccggcggataggaatccccgcccacaccgtggtctttccagcaccgcagacacctgccggctcctcccgagcggagctcagggctgacaaagcgcggtcagagcggccgcttactggggctcgcccgctccttagagcactggcaatgatgtgcggatcctcgctgctgctgctgggaaactgttgagtggctgaatgaccccaggggaccctgggagagctctgaagccctcagccaccaagtggctgggctggcaagggttcattcattcattcaacaaatacgaatgtgcagcggtgctggggtcatgatggctcggtgggcagcgaggggccgggccggctggaggagcacagtgcggattctgtcgccactgggacactgtgaaccaggagtgagtcggagctgccgcgctgcccaggccatggactgtgaggtcaacaacggttccagcctcagggatgagtgcatcacaaacctactggtgtttggcttcctccaaagctgttctgacaacactgctgcaggcctaccctagagacatggagaaggagaagaccatgctggtgctggccctgctgctggccaagaaggtggccagtcacacgccgtccttgctccgtgatgtctttcacacaacagtgaattttattaaccagaacctacgcacctacgtgaggagcttagccagaaatgggatggactgaacggacagttccagaagtgtgactggctaaagctcgatgtggtcacagctgtatagctgcttccagtgtagacggagccctggcatgtcaacagcgttcctagagaagacaggctggaagatagctgtgacttctattttaaagacaatgttaaacttataacccactttaaaatatctacattaatatacttgaatgaaaatgtccatttacacgtatttgaatggccttcatatcatccacacatgaatctgcacatctgtaaatctacacacggtgcctttatttccactgtgcaggttcccacttaaaaattaaattggaaagcaggtttcaaggaagtagaaacaaaatacaatttttttggtaaaaaaaaattactgtttattaaagtacaaccatagaggatggtcttacagcaggcagtatcctgtttgaggaaagcaagaatcagagaaggaacataccccttacaaatgaaaaattccactcaaaatagggactatctatcttaatactaaggaaccaacaatcttcctgtttaaaaaaccacatggcacagagattctgaactaaagtgctgcactcaaatgatgggaagtccggccccagtacacaggggcttgactttttcaacttcgtttcctttgttggagtcaaaaagaaccacttgtggttctaaaaggtgtgaaggtgatttaagggcccaggtcagccactgtttgtttacaaaatcaggtaactaactgcatacactttttctctttccatgacatcaagactttgctaaagacatgaagccacgggtgccagaagctactgcgatgccccgggagttagccccctggtaatagctgtaaacttccaatttctagccatacgctcagctcatccatgcctcagaagtgcatctggagagaacaggtttctaagcataaaagatgaaagagcagttggactttttaaaaattcagcaaagtggttccctctcttagggacagtcaaaaccaagtcacttaggtagtaccaaaataaataaggaaaagcttagctttagaaacagtgcaacactggtctgctgttccagtggtaagctatgtcccaggaatcagtttaaaagcacgacagtggatgctgggtccatatcacacacattgctgtgaacaggaaactcctgtgaccacaacatgaggccactggagacgcatatgagtaagggcactgacggactcatgatttcttcttaccagatgctttcctgttctttaagagtttaaaatcatcagaaaggaaaaacaaactctatattgttcagcatgcaatacataccacgctagggctggctcaattgaaagtgggcaaaagcttacaaatactaaaaagaagtgctgccgcgcagtgtggaggccactgtttggaaataaatcttcctaacactacgacttttcatgttttggagtggacttttaaaaaagttttccaaccacaatggaaacaggttgaaccacactgcgcctacacatccatccatacgtcagccattataatcagattctcactgggggaggcattttcttcccaaaggagctgtatgcagtcatcacccggaactaatgggaaagtgttcttaagcagcaagtgactctggaccacctctctcacacactgactcttccacagcatcttcacctgcttctgtttcacttgaattcatacagtaggccaccattttataacaggtcttagtgtaaattcttccagaccaagtctgagatagtcttggttgtaaagcaagaccgtcaccccttctcccaaagccaacattataaaaagattccattgtctcaaacacaaatgttccagtcttgagcacttcccagccatggtgactcgggcatatcctggcagttggtggattttgccctgtaacacaatccttgtggatatgattcaaaggtgactttaattcagagaatgtgttttcctttctgttttaaaaatatttgaattaagtgatggaaattcttttgttaaacatcaaaagctttctccttgaaaagatgcttggtgtatctgaaagtcacgtgggacatttggtgcattcagaaggtcaaatcattcctgacctctcctcttaggacccagcattaactgctgcgatactcaaggcttccttaaaggatcacagcactggcgcctagttttactgtccagcaactttattagttgtgctagctgagaattggaatatagagtcctttgaatgttacgatcttgttttcaaaacctggagtcaaaccaattaagtatggacttaacaaagacaattgatgatgtgaaatgataccacctgtcaagggcatagttaccatgtggatagaaagatgagtccactgattatcttcaaatcccatgtattctctctagcacgttgcttctgacagaaagaataactcacagatttgaagtttgttcctttcccctgatgaagagtagattggccaaaaggtagatgacaggaaggaagaggagccagaatgacccacagtgatcagttcagcagtgcagagcggcagtgcagaggctcatggaactcacacggaaaaaggaaacacatgctgcttaaaatgcacgataacttaattatccaaattaccattcaattccggtatttttgagatgaaagcatttgagccaacactaaattgaccgtaattaaggaatgaggtaggaagaggcacttttaatctggaggaagaaataaatggaagactgtaataggaaaaatacaggtctaggaaaaaaataatttttttcctttgatgctggccaaggacccctctacataatacagttctcctgctggaaagcatcagggcaaacagagttattccaaactctgcaacagggaagactgtactttgaccttcttttcctggggaaagggaacaactagtaatctttaaatgtcaaaacttttcttctaaatagtacattcattaaccagtttcttctggtggtgcaaagaacactcaccacagtgagcaataccactattcaatttcccctttggagaggtgacagcggggtagaatcacctggagtcagctgctagtctttaactgatgacaaggccttgcaaatacccctgagaacaatttcactctgagctcacagggaagcagcagtctggtgtgggctcctgtggtgtaaccatcaaatgtggaagacctgatggtgttagtgtgtggggatgccgggctgaaattcaacagccttgcaaaaagaaagggaagatgggatgtgttaatattgtagtggcatgcactttccagctctccatggagctctctttatatatgaggtaattgaatgtcactattctgtaccatacagcaggtattatctagccaaggttataattaccatgaagtgctgtggaatgtagtaggaggcttttcactggga

SEQ ID NO: 431851 - DNA, 3652 bp, Homo sapiens
gactgtgatcccaccactggggagactgatgacgaaggctatgaggagatcttccaggagcagttggcagcagtgccagagttccgcggtcttgggcccctcttcaagtcctcgcctgagcccgtggccctcaccgagtcagagacggagtatgtcatccgctgcaccaaacacaccttcaccaaccacatggtttttcagtttgactgcacaaacacactcaatgaccagaccttggagaatgtcacagtgtagacggagccctggcatgtcaacagcgttcctagagaagacaggctggaagatagctgtgacttctattttaaagacaatgttaaacttataacccactttaaaatatctacattaatatacttgaatgaaaatgtccatttacacgtatttgaatggccttcatatcatccacacatgaatctgcacatctgtaaatctacacacggtgcctttatttccactgtgcaggttcccacttaaaaattaaattggaaagcaggtttcaaggaagtagaaacaaaatacaatttttttggtaaaaaaaaattactgtttattaaagtacaaccatagaggatggtcttacagcaggcagtatcctgtttgaggaaagcaagaatcagagaaggaacataccccttacaaatgaaaaattccactcaaaatagggactatctatcttaatactaaggaaccaacaatcttcctgtttaaaaaaccacatggcacagagattctgaactaaagtgctgcactcaaatgatgggaagtccggccccagtacacaggggcttgactttttcaacttcgtttcctttgttggagtcaaaaagaaccacttgtggttctaaaaggtgtgaaggtgatttaagggcccaggtcagccactgtttgtttacaaaatcaggtaactaactgcatacactttttctctttccatgacatcaagactttgctaaagacatgaagccacgggtgccagaagctactgcgatgccccgggagttagccccctggtaatagctgtaaacttccaatttctagccatacgctcagctcatccatgcctcagaagtgcatctggagagaacaggtttctaagcataaaagatgaaagagcagttggactttttaaaaattcagcaaagtggttccctctcttagggacagtcaaaaccaagtcacttaggtagtaccaaaataaataaggaaaagcttagctttagaaacagtgcaacactggtctgctgttccagtggtaagctatgtcccaggaatcagtttaaaagcacgacagtggatgctgggtccatatcacacacattgctgtgaacaggaaactcctgtgaccacaacatgaggccactggagacgcatatgagtaagggcactgacggactcatgatttcttcttaccagatgctttcctgttctttaagagtttaaaatcatcagaaaggaaaaacaaactctatattgttcagcatgcaatacataccacgctagggctggctcaattgaaagtgggcaaaagcttacaaatactaaaaagaagtgctgccgcgcagtgtggaggccactgtttggaaataaatcttcctaacactacgacttttcatgttttggagtggacttttaaaaaagttttccaaccacaatggaaacaggttgaaccacactgcgcctacacatccatccatacgtcagccattataatcagattctcactgggggaggcattttcttcccaaaggagctgtatgcagtcatcacccggaactaatgggaaagtgttcttaagcagcaagtgactctggaccacctctctcacacactgactcttccacagcatcttcacctgcttctgtttcacttgaattcatacagtaggccaccattttataacaggtcttagtgtaaattcttccagaccaagtctgagatagtcttggttgtaaagcaagaccgtcaccccttctcccaaagccaacattataaaaagattccattgtctcaaacacaaatgttccagtcttgagcacttcccagccatggtgactcgggcatatcctggcagttggtggattttgccctgtaacacaatccttgtggatatgattcaaaggtgactttaattcagagaatgtgttttcctttctgttttaaaaatatttgaattaagtgatggaaattcttttgttaaacatcaaaagctttctccttgaaaagatgcttggtgtatctgaaagtcacgtgggacatttggtgcattcagaaggtcaaatcattcctgacctctcctcttaggacccagcattaactgctgcgatactcaaggcttccttaaaggatcacagcactggcgcctagttttactgtccagcaactttattagttgtgctagctgagaattggaatatagagtcctttgaatgttacgatcttgttttcaaaacctggagtcaaaccaattaagtatggacttaacaaagacaattgatgatgtgaaatgataccacctgtcaagggcatagttaccatgtggatagaaagatgagtccactgattatcttcaaatcccatgtattctctctagcacgttgcttctgacagaaagaataactcacagatttgaagtttgttcctttcccctgatgaagagtagattggccaaaaggtagatgacaggaaggaagaggagccagaatgacccacagtgatcagttcagcagtgcagagcggcagtgcagaggctcatggaactcacacggaaaaaggaaacacatgctgcttaaaatgcacgataacttaattatccaaattaccattcaattccggtatttttgagatgaaagcatttgagccaacactaaattgaccgtaattaaggaatgaggtaggaagaggcacttttaatctggaggaagaaataaatggaagactgtaataggaaaaatacaggtctaggaaaaaaataatttttttcctttgatgctggccaaggacccctctacataatacagttctcctgctggaaagcatcagggcaaacagagttattccaaactctgcaacagggaagactgtactttgaccttcttttcctggggaaagggaacaactagtaatctttaaatgtcaaaacttttcttctaaatagtacattcattaaccagtttcttctggtggtgcaaagaacactcaccacagtgagcaataccactattcaatttcccctttggagaggtgacagcggggtagaatcacctggagtcagctgctagtctttaactgatgacaaggccttgcaaatacccctgagaacaatttcactctgagctcacagggaagcagcagtctggtgtgggctcctgtggtgtaaccatcaaatgtggaagacctgatggtgttagtgtgtggggatgccgggctgaaattcaacagccttgcaaaaagaaagggaagatgggatgtgttaatattgtagtggcatgcactttccagctctccatggagctctctttatatatgaggtaattgaatgtcactattctgtaccatacagcaggtattatctagccaaggttataattaccatgaagtgctgtggaatgtagtaggaggcttttcactggga

SEQ ID NO: 431852 - DNA, 3532 bp, Homo sapiens
  misc_feature (73)..(73): n is a, c, g, or t
  misc_feature (123)..(123): n is a, c, g, or t
aatgtttcttgatgactgttcttgtatggtcgacgtcggtggtcaacagtatgtatagtgatgccattggctnattatacaaggtgttacccctcagtggagcatcgctctggactcagaacntgacctcagtattgcaagtagagactttcgtcctcgcaagtaatagacatgcgtccacgtgtcgtataaccgagcagtactgttaacacattcctaacactcactttctgagtatctatcattggtatttcatgaactggagttgtccatttacacgtatttgaatggccttcatatcatccacacatgaatctgcacatctgtaaatctacacacggtgcctttatttccactgtgcaggttcccacttaaaaattaaattggaaagcaggtttcaaggaagtagaaacaaaatacaatttttttggtaaaaaaaaattactgtttattaaagtacaaccatagaggatggtcttacagcaggcagtatcctgtttgaggaaagcaagaatcagagaaggaacataccccttacaaatgaaaaattccactcaaaatagggactatctatcttaatactaaggaaccaacaatcttcctgtttaaaaaaccacatggcacagagattctgaactaaagtgctgcactcaaatgatgggaagtccggccccagtacacaggggcttgactttttcaacttcgtttcctttgttggagtcaaaaagaaccacttgtggttctaaaaggtgtgaaggtgatttaagggcccaggtcagccactgtttgtttacaaaatcaggtaactaactgcatacactttttctctttccatgacatcaagactttgctaaagacatgaagccacgggtgccagaagctactgcgatgccccgggagttagccccctggtaatagctgtaaacttccaatttctagccatacgctcagctcatccatgcctcagaagtgcatctggagagaacaggtttctaagcataaaagatgaaagagcagttggactttttaaaaattcagcaaagtggttccctctcttagggacagtcaaaaccaagtcacttaggtagtaccaaaataaataaggaaaagcttagctttagaaacagtgcaacactggtctgctgttccagtggtaagctatgtcccaggaatcagtttaaaagcacgacagtggatgctgggtccatatcacacacattgctgtgaacaggaaactcctgtgaccacaacatgaggccactggagacgcatatgagtaagggcactgacggactcatgatttcttcttaccagatgctttcctgttctttaagagtttaaaatcatcagaaaggaaaaacaaactctatattgttcagcatgcaatacataccacgctagggctggctcaattgaaagtgggcaaaagcttacaaatactaaaaagaagtgctgccgcgcagtgtggaggccactgtttggaaataaatcttcctaacactacgacttttcatgttttggagtggacttttaaaaaagttttccaaccacaatggaaacaggttgaaccacactgcgcctacacatccatccatacgtcagccattataatcagattctcactgggggaggcattttcttcccaaaggagctgtatgcagtcatcacccggaactaatgggaaagtgttcttaagcagcaagtgactctggaccacctctctcacacactgactcttccacagcatcttcacctgcttctgtttcacttgaattcatacagtaggccaccattttataacaggtcttagtgtaaattcttccagaccaagtctgagatagtcttggttgtaaagcaagaccgtcaccccttctcccaaagccaacattataaaaagattccattgtctcaaacacaaatgttccagtcttgagcacttcccagccatggtgactcgggcatatcctggcagttggtggattttgccctgtaacacaatccttgtggatatgattcaaaggtgactttaattcagagaatgtgttttcctttctgttttaaaaatatttgaattaagtgatggaaattcttttgttaaacatcaaaagctttctccttgaaaagatgcttggtgtatctgaaagtcacgtgggacatttggtgcattcagaaggtcaaatcattcctgacctctcctcttaggacccagcattaactgctgcgatactcaaggcttccttaaaggatcacagcactggcgcctagttttactgtccagcaactttattagttgtgctagctgagaattggaatatagagtcctttgaatgttacgatcttgttttcaaaacctggagtcaaaccaattaagtatggacttaacaaagacaattgatgatgtgaaatgataccacctgtcaagggcatagttaccatgtggatagaaagatgagtccactgattatcttcaaatcccatgtattctctctagcacgttgcttctgacagaaagaataactcacagatttgaagtttgttcctttcccctgatgaagagtagattggccaaaaggtagatgacaggaaggaagaggagccagaatgacccacagtgatcagttcagcagtgcagagcggcagtgcagaggctcatggaactcacacggaaaaaggaaacacatgctgcttaaaatgcacgataacttaattatccaaattaccattcaattccggtatttttgagatgaaagcatttgagccaacactaaattgaccgtaattaaggaatgaggtaggaagaggcacttttaatctggaggaagaaataaatggaagactgtaataggaaaaatacaggtctaggaaaaaaataatttttttcctttgatgctggccaaggacccctctacataatacagttctcctgctggaaagcatcagggcaaacagagttattccaaactctgcaacagggaagactgtactttgaccttcttttcctggggaaagggaacaactagtaatctttaaatgtcaaaacttttcttctaaatagtacattcattaaccagtttcttctggtggtgcaaagaacactcaccacagtgagcaataccactattcaatttcccctttggagaggtgacagcggggtagaatcacctggagtcagctgctagtctttaactgatgacaaggccttgcaaatacccctgagaacaatttcactctgagctcacagggaagcagcagtctggtgtgggctcctgtggtgtaaccatcaaatgtggaagacctgatggtgttagtgtgtggggatgccgggctgaaattcaacagccttgcaaaaagaaagggaagatgggatgtgttaatattgtagtggcatgcactttccagctctccatggagctctctttatatatgaggtaattgaatgtcactattctgtaccatacagcaggtattatctagccaaggttataattaccatgaagtgctgtggaatgtagtaggaggcttttcactggga

SEQ ID NO: 431853 - DNA, 3322 bp, Homo sapiens
  misc_feature (62)..(62): n is a, c, g, or t
ttgtgcgatctcggttacgtgcgttttctcggaattttatttccgctcccttatttgggggnccccgcgcgatttccccaccgtggggaccaaaaaaacttgggtccaaggagaaccaccttatgacccaatggcgcaattccaaacgcccgttttgtccgcgcgcgccccgcgcgattagatagcgcctcgggatttttttttttttttaatttttttggtaaaaaaaaattactgtttattaaagtacaaccatagaggatggtcttacagcaggcagtatcctgtttgaggaaagcaagaatcagagaaggaacataccccttacaaatgaaaaattccactcaaaatagggactatctatcttaatactaaggaaccaacaatcttcctgtttaaaaaaccacatggcacagagattctgaactaaagtgctgcactcaaatgatgggaagtccggccccagtacacaggggcttgactttttcaacttcgtttcctttgttggagtcaaaaagaaccacttgtggttctaaaaggtgtgaaggtgatttaagggcccaggtcagccactgtttgtttacaaaatcaggtaactaactgcatacactttttctctttccatgacatcaagactttgctaaagacatgaagccacgggtgccagaagctactgcgatgccccgggagttagccccctggtaatagctgtaaacttccaatttctagccatacgctcagctcatccatgcctcagaagtgcatctggagagaacaggtttctaagcataaaagatgaaagagcagttggactttttaaaaattcagcaaagtggttccctctcttagggacagtcaaaaccaagtcacttaggtagtaccaaaataaataaggaaaagcttagctttagaaacagtgcaacactggtctgctgttccagtggtaagctatgtcccaggaatcagtttaaaagcacgacagtggatgctgggtccatatcacacacattgctgtgaacaggaaactcctgtgaccacaacatgaggccactggagacgcatatgagtaagggcactgacggactcatgatttcttcttaccagatgctttcctgttctttaagagtttaaaatcatcagaaaggaaaaacaaactctatattgttcagcatgcaatacataccacgctagggctggctcaattgaaagtgggcaaaagcttacaaatactaaaaagaagtgctgccgcgcagtgtggaggccactgtttggaaataaatcttcctaacactacgacttttcatgttttggagtggacttttaaaaaagttttccaaccacaatggaaacaggttgaaccacactgcgcctacacatccatccatacgtcagccattataatcagattctcactgggggaggcattttcttcccaaaggagctgtatgcagtcatcacccggaactaatgggaaagtgttcttaagcagcaagtgactctggaccacctctctcacacactgactcttccacagcatcttcacctgcttctgtttcacttgaattcatacagtaggccaccattttataacaggtcttagtgtaaattcttccagaccaagtctgagatagtcttggttgtaaagcaagaccgtcaccccttctcccaaagccaacattataaaaagattccattgtctcaaacacaaatgttccagtcttgagcacttcccagccatggtgactcgggcatatcctggcagttggtggattttgccctgtaacacaatccttgtggatatgattcaaaggtgactttaattcagagaatgtgttttcctttctgttttaaaaatatttgaattaagtgatggaaattcttttgttaaacatcaaaagctttctccttgaaaagatgcttggtgtatctgaaagtcacgtgggacatttggtgcattcagaaggtcaaatcattcctgacctctcctcttaggacccagcattaactgctgcgatactcaaggcttccttaaaggatcacagcactggcgcctagttttactgtccagcaactttattagttgtgctagctgagaattggaatatagagtcctttgaatgttacgatcttgttttcaaaacctggagtcaaaccaattaagtatggacttaacaaagacaattgatgatgtgaaatgataccacctgtcaagggcatagttaccatgtggatagaaagatgagtccactgattatcttcaaatcccatgtattctctctagcacgttgcttctgacagaaagaataactcacagatttgaagtttgttcctttcccctgatgaagagtagattggccaaaaggtagatgacaggaaggaagaggagccagaatgacccacagtgatcagttcagcagtgcagagcggcagtgcagaggctcatggaactcacacggaaaaaggaaacacatgctgcttaaaatgcacgataacttaattatccaaattaccattcaattccggtatttttgagatgaaagcatttgagccaacactaaattgaccgtaattaaggaatgaggtaggaagaggcacttttaatctggaggaagaaataaatggaagactgtaataggaaaaatacaggtctaggaaaaaaataatttttttcctttgatgctggccaaggacccctctacataatacagttctcctgctggaaagcatcagggcaaacagagttattccaaactctgcaacagggaagactgtactttgaccttcttttcctggggaaagggaacaactagtaatctttaaatgtcaaaacttttcttctaaatagtacattcattaaccagtttcttctggtggtgcaaagaacactcaccacagtgagcaataccactattcaatttcccctttggagaggtgacagcggggtagaatcacctggagtcagctgctagtctttaactgatgacaaggccttgcaaatacccctgagaacaatttcactctgagctcacagggaagcagcagtctggtgtgggctcctgtggtgtaaccatcaaatgtggaagacctgatggtgttagtgtgtggggatgccgggctgaaattcaacagccttgcaaaaagaaagggaagatgggatgtgttaatattgtagtggcatgcactttccagctctccatggagctctctttatatatgaggtaattgaatgtcactattctgtaccatacagcaggtattatctagccaaggttataattaccatgaagtgctgtggaatgtagtaggaggcttttcactggga

SEQ ID NO: 431854 - DNA, 4229 bp, Homo sapiens
gaaggaggaagcgcgcggggcgccataaggaggaagcgggtagtcgaccgtgtccgcgcgcctgggagacgctgcctcggcccggacgcgcccgcgcccccgcggctggagggtggtcgccactgggacactgtgaaccaggagtgagtcggagctgccgcgctgcccaggccatggactgtgaggtcaacaacggttccagcctcagggatgagtgcatcacaaacctactggtgtttggcttcctccaaagctgttctgacaacagcttccgcagagagctggacgcactgggccacgagctgccagtgctggctccccagtgggagggctacgatgagctgcagactgatggcaaccgcagcagccactcccgcttgggaagaatagaggcagattctgaaagtcaagaagacatcatccggaatattgccaggcacctcgcccaggtcggggacagcatggaccgtagcatccctccgggcctggtgaacggcctggccctgcagctcaggaacaccagccggtcggaggaggaccggaacagggacctggccactgccctggagcagctgctgcaggcctaccctagagacatggagaaggagaagaccatgctggtgctggccctgctgctggccaagaaggtggccagtcacacgccgtccttgctccgtgatgtctttcacacaacagtgaattttattaaccagaacctacgcacctacgtgaggagcttagccagaaatgggatggactgaacggacagttccagaagtgtgactggctaaagctcgatgtggtcacagctgtatagctgcttccagtgtagacggagccctggcatgtcaacagcgttcctagagaagacaggctggaagatagctgtgacttctattttaaagacaatgttaaacttataacccactttaaaatatctacattaatatacttgaatgaaaatgtccatttacacgtatttgaatggccttcatatcatccacacatgaatctgcacatctgtaaatctacacacggtgcctttatttccactgtgcaggttcccacttaaaaattaaattggaaagcaggtttcaaggaagtagaaacaaaatacaatttttttggtaaaaaaaaattactgtttattaaagtacaaccatagaggatggtcttacagcaggcagtatcctgtttgaggaaagcaagaatcagagaaggaacataccccttacaaatgaaaaattccactcaaaatagggactatctatcttaatactaaggaaccaacaatcttcctgtttaaaaaaccacatggcacagagattctgaactaaagtgctgcactcaaatgatgggaagtccggccccagtacacaggggcttgactttttcaacttcgtttcctttgttggagtcaaaaagaaccacttgtggttctaaaaggtgtgaaggtgatttaagggcccaggtcagccactgtttgtttacaaaatcaggtaactaactgcatacactttttctctttccatgacatcaagactttgctaaagacatgaagccacgggtgccagaagctactgcgatgccccgggagttagccccctggtaatagctgtaaacttccaatttctagccatacgctcagctcatccatgcctcagaagtgcatctggagagaacaggtttctaagcataaaagatgaaagagcagttggactttttaaaaattcagcaaagtggttccctctcttagggacagtcaaaaccaagtcacttaggtagtaccaaaataaataaggaaaagcttagctttagaaacagtgcaacactggtctgctgttccagtggtaagctatgtcccaggaatcagtttaaaagcacgacagtggatgctgggtccatatcacacacattgctgtgaacaggaaactcctgtgaccacaacatgaggccactggagacgcatatgagtaagggcactgacggactcatgatttcttcttaccagatgctttcctgttctttaagagtttaaaatcatcagaaaggaaaaacaaactctatattgttcagcatgcaatacataccacgctagggctggctcaattgaaagtgggcaaaagcttacaaatactaaaaagaagtgctgccgcgcagtgtggaggccactgtttggaaataaatcttcctaacactacgacttttcatgttttggagtggacttttaaaaaagttttccaaccacaatggaaacaggttgaaccacactgcgcctacacatccatccatacgtcagccattataatcagattctcactgggggaggcattttcttcccaaaggagctgtatgcagtcatcacccggaactaatgggaaagtgttcttaagcagcaagtgactctggaccacctctctcacacactgactcttccacagcatcttcacctgcttctgtttcacttgaattcatacagtaggccaccattttataacaggtcttagtgtaaattcttccagaccaagtctgagatagtcttggttgtaaagcaagaccgtcaccccttctcccaaagccaacattataaaaagattccattgtctcaaacacaaatgttccagtcttgagcacttcccagccatggtgactcgggcatatcctggcagttggtggattttgccctgtaacacaatccttgtggatatgattcaaaggtgactttaattcagagaatgtgttttcctttctgttttaaaaatatttgaattaagtgatggaaattcttttgttaaacatcaaaagctttctccttgaaaagatgcttggtgtatctgaaagtcacgtgggacatttggtgcattcagaaggtcaaatcattcctgacctctcctcttaggacccagcattaactgctgcgatactcaaggcttccttaaaggatcacagcactggcgcctagttttactgtccagcaactttattagttgtgctagctgagaattggaatatagagtcctttgaatgttacgatcttgttttcaaaacctggagtcaaaccaattaagtatggacttaacaaagacaattgatgatgtgaaatgataccacctgtcaagggcatagttaccatgtggatagaaagatgagtccactgattatcttcaaatcccatgtattctctctagcacgttgcttctgacagaaagaataactcacagatttgaagtttgttcctttcccctgatgaagagtagattggccaaaaggtagatgacaggaaggaagaggagccagaatgacccacagtgatcagttcagcagtgcagagcggcagtgcagaggctcatggaactcacacggaaaaaggaaacacatgctgcttaaaatgcacgataacttaattatccaaattaccattcaattccggtatttttgagatgaaagcatttgagccaacactaaattgaccgtaattaaggaatgaggtaggaagaggcacttttaatctggaggaagaaataaatggaagactgtaataggaaaaatacaggtctaggaaaaaaataatttttttcctttgatgctggccaaggacccctctacataatacagttctcctgctggaaagcatcagggcaaacagagttattccaaactctgcaacagggaagactgtactttgaccttcttttcctggggaaagggaacaactagtaatctttaaatgtcaaaacttttcttctaaatagtacattcattaaccagtttcttctggtggtgcaaagaacactcaccacagtgagcaataccactattcaatttcccctttggagaggtgacagcggggtagaatcacctggagtcagctgctagtctttaactgatgacaaggccttgcaaatacccctgagaacaatttcactctgagctcacagggaagcagcagtctggtgtgggctcctgtggtgtaaccatcaaatgtggaagacctgatggtgttagtgtgtggggatgccgggctgaaattcaacagccttgcaaaaagaaagggaagatgggatgtgttaatattgtagtggcatgcactttccagctctccatggagctctctttatatatgaggtaattgaatgtcactattctgtaccatacagcaggtattatctagccaaggttataattaccatgaagtgctgtggaatgtagtaggaggcttttcactggga

SEQ ID NO: 431855 - DNA, 4159 bp, Homo sapiens
gaaggaggaagcgcgcggggcgccataaggaggaagcgggtagtcgaccgtgtccgcgcgcctgggagacgctgcctcggcccggacgcgcccgcgcccccgcggctggagggtggtcaacaacggttccagcctcagggatgagtgcatcacaaacctactggtgtttggcttcctccaaagctgttctgacaacagcttccgcagagagctggacgcactgggccacgagctgccagtgctggctccccagtgggagggctacgatgagctgcagactgatggcaaccgcagcagccactcccgcttgggaagaatagaggcagattctgaaagtcaagaagacatcatccggaatattgccaggcacctcgcccaggtcggggacagcatggaccgtagcatccctccgggcctggtgaacggcctggccctgcagctcaggaacaccagccggtcggaggaggaccggaacagggacctggccactgccctggagcagctgctgcaggcctaccctagagacatggagaaggagaagaccatgctggtgctggccctgctgctggccaagaaggtggccagtcacacgccgtccttgctccgtgatgtctttcacacaacagtgaattttattaaccagaacctacgcacctacgtgaggagcttagccagaaatgggatggactgaacggacagttccagaagtgtgactggctaaagctcgatgtggtcacagctgtatagctgcttccagtgtagacggagccctggcatgtcaacagcgttcctagagaagacaggctggaagatagctgtgacttctattttaaagacaatgttaaacttataacccactttaaaatatctacattaatatacttgaatgaaaatgtccatttacacgtatttgaatggccttcatatcatccacacatgaatctgcacatctgtaaatctacacacggtgcctttatttccactgtgcaggttcccacttaaaaattaaattggaaagcaggtttcaaggaagtagaaacaaaatacaatttttttggtaaaaaaaaattactgtttattaaagtacaaccatagaggatggtcttacagcaggcagtatcctgtttgaggaaagcaagaatcagagaaggaacataccccttacaaatgaaaaattccactcaaaatagggactatctatcttaatactaaggaaccaacaatcttcctgtttaaaaaaccacatggcacagagattctgaactaaagtgctgcactcaaatgatgggaagtccggccccagtacacaggggcttgactttttcaacttcgtttcctttgttggagtcaaaaagaaccacttgtggttctaaaaggtgtgaaggtgatttaagggcccaggtcagccactgtttgtttacaaaatcaggtaactaactgcatacactttttctctttccatgacatcaagactttgctaaagacatgaagccacgggtgccagaagctactgcgatgccccgggagttagccccctggtaatagctgtaaacttccaatttctagccatacgctcagctcatccatgcctcagaagtgcatctggagagaacaggtttctaagcataaaagatgaaagagcagttggactttttaaaaattcagcaaagtggttccctctcttagggacagtcaaaaccaagtcacttaggtagtaccaaaataaataaggaaaagcttagctttagaaacagtgcaacactggtctgctgttccagtggtaagctatgtcccaggaatcagtttaaaagcacgacagtggatgctgggtccatatcacacacattgctgtgaacaggaaactcctgtgaccacaacatgaggccactggagacgcatatgagtaagggcactgacggactcatgatttcttcttaccagatgctttcctgttctttaagagtttaaaatcatcagaaaggaaaaacaaactctatattgttcagcatgcaatacataccacgctagggctggctcaattgaaagtgggcaaaagcttacaaatactaaaaagaagtgctgccgcgcagtgtggaggccactgtttggaaataaatcttcctaacactacgacttttcatgttttggagtggacttttaaaaaagttttccaaccacaatggaaacaggttgaaccacactgcgcctacacatccatccatacgtcagccattataatcagattctcactgggggaggcattttcttcccaaaggagctgtatgcagtcatcacccggaactaatgggaaagtgttcttaagcagcaagtgactctggaccacctctctcacacactgactcttccacagcatcttcacctgcttctgtttcacttgaattcatacagtaggccaccattttataacaggtcttagtgtaaattcttccagaccaagtctgagatagtcttggttgtaaagcaagaccgtcaccccttctcccaaagccaacattataaaaagattccattgtctcaaacacaaatgttccagtcttgagcacttcccagccatggtgactcgggcatatcctggcagttggtggattttgccctgtaacacaatccttgtggatatgattcaaaggtgactttaattcagagaatgtgttttcctttctgttttaaaaatatttgaattaagtgatggaaattcttttgttaaacatcaaaagctttctccttgaaaagatgcttggtgtatctgaaagtcacgtgggacatttggtgcattcagaaggtcaaatcattcctgacctctcctcttaggacccagcattaactgctgcgatactcaaggcttccttaaaggatcacagcactggcgcctagttttactgtccagcaactttattagttgtgctagctgagaattggaatatagagtcctttgaatgttacgatcttgttttcaaaacctggagtcaaaccaattaagtatggacttaacaaagacaattgatgatgtgaaatgataccacctgtcaagggcatagttaccatgtggatagaaagatgagtccactgattatcttcaaatcccatgtattctctctagcacgttgcttctgacagaaagaataactcacagatttgaagtttgttcctttcccctgatgaagagtagattggccaaaaggtagatgacaggaaggaagaggagccagaatgacccacagtgatcagttcagcagtgcagagcggcagtgcagaggctcatggaactcacacggaaaaaggaaacacatgctgcttaaaatgcacgataacttaattatccaaattaccattcaattccggtatttttgagatgaaagcatttgagccaacactaaattgaccgtaattaaggaatgaggtaggaagaggcacttttaatctggaggaagaaataaatggaagactgtaataggaaaaatacaggtctaggaaaaaaataatttttttcctttgatgctggccaaggacccctctacataatacagttctcctgctggaaagcatcagggcaaacagagttattccaaactctgcaacagggaagactgtactttgaccttcttttcctggggaaagggaacaactagtaatctttaaatgtcaaaacttttcttctaaatagtacattcattaaccagtttcttctggtggtgcaaagaacactcaccacagtgagcaataccactattcaatttcccctttggagaggtgacagcggggtagaatcacctggagtcagctgctagtctttaactgatgacaaggccttgcaaatacccctgagaacaatttcactctgagctcacagggaagcagcagtctggtgtgggctcctgtggtgtaaccatcaaatgtggaagacctgatggtgttagtgtgtggggatgccgggctgaaattcaacagccttgcaaaaagaaagggaagatgggatgtgttaatattgtagtggcatgcactttccagctctccatggagctctctttatatatgaggtaattgaatgtcactattctgtaccatacagcaggtattatctagccaaggttataattaccatgaagtgctgtggaatgtagtaggaggcttttcactggga

SEQ ID NO: 431856 - DNA, 4122 bp, Homo sapiens
ccagactgttccagaaacagcctggggattctgaatgtttcccagagaatcattaggaattatcccagcggcgctggagtcaacaacggttccagcctcagggatgagtgcatcacaaacctactggtgtttggcttcctccaaagctgttctgacaacagcttccgcagagagctggacgcactgggccacgagctgccagtgctggctccccagtgggagggctacgatgagctgcagactgatggcaaccgcagcagccactcccgcttgggaagaatagaggcagattctgaaagtcaagaagacatcatccggaatattgccaggcacctcgcccaggtcggggacagcatggaccgtagcatccctccgggcctggtgaacggcctggccctgcagctcaggaacaccagccggtcggaggaggaccggaacagggacctggccactgccctggagcagctgctgcaggcctaccctagagacatggagaaggagaagaccatgctggtgctggccctgctgctggccaagaaggtggccagtcacacgccgtccttgctccgtgatgtctttcacacaacagtgaattttattaaccagaacctacgcacctacgtgaggagcttagccagaaatgggatggactgaacggacagttccagaagtgtgactggctaaagctcgatgtggtcacagctgtatagctgcttccagtgtagacggagccctggcatgtcaacagcgttcctagagaagacaggctggaagatagctgtgacttctattttaaagacaatgttaaacttataacccactttaaaatatctacattaatatacttgaatgaaaatgtccatttacacgtatttgaatggccttcatatcatccacacatgaatctgcacatctgtaaatctacacacggtgcctttatttccactgtgcaggttcccacttaaaaattaaattggaaagcaggtttcaaggaagtagaaacaaaatacaatttttttggtaaaaaaaaattactgtttattaaagtacaaccatagaggatggtcttacagcaggcagtatcctgtttgaggaaagcaagaatcagagaaggaacataccccttacaaatgaaaaattccactcaaaatagggactatctatcttaatactaaggaaccaacaatcttcctgtttaaaaaaccacatggcacagagattctgaactaaagtgctgcactcaaatgatgggaagtccggccccagtacacaggggcttgactttttcaacttcgtttcctttgttggagtcaaaaagaaccacttgtggttctaaaaggtgtgaaggtgatttaagggcccaggtcagccactgtttgtttacaaaatcaggtaactaactgcatacactttttctctttccatgacatcaagactttgctaaagacatgaagccacgggtgccagaagctactgcgatgccccgggagttagccccctggtaatagctgtaaacttccaatttctagccatacgctcagctcatccatgcctcagaagtgcatctggagagaacaggtttctaagcataaaagatgaaagagcagttggactttttaaaaattcagcaaagtggttccctctcttagggacagtcaaaaccaagtcacttaggtagtaccaaaataaataaggaaaagcttagctttagaaacagtgcaacactggtctgctgttccagtggtaagctatgtcccaggaatcagtttaaaagcacgacagtggatgctgggtccatatcacacacattgctgtgaacaggaaactcctgtgaccacaacatgaggccactggagacgcatatgagtaagggcactgacggactcatgatttcttcttaccagatgctttcctgttctttaagagtttaaaatcatcagaaaggaaaaacaaactctatattgttcagcatgcaatacataccacgctagggctggctcaattgaaagtgggcaaaagcttacaaatactaaaaagaagtgctgccgcgcagtgtggaggccactgtttggaaataaatcttcctaacactacgacttttcatgttttggagtggacttttaaaaaagttttccaaccacaatggaaacaggttgaaccacactgcgcctacacatccatccatacgtcagccattataatcagattctcactgggggaggcattttcttcccaaaggagctgtatgcagtcatcacccggaactaatgggaaagtgttcttaagcagcaagtgactctggaccacctctctcacacactgactcttccacagcatcttcacctgcttctgtttcacttgaattcatacagtaggccaccattttataacaggtcttagtgtaaattcttccagaccaagtctgagatagtcttggttgtaaagcaagaccgtcaccccttctcccaaagccaacattataaaaagattccattgtctcaaacacaaatgttccagtcttgagcacttcccagccatggtgactcgggcatatcctggcagttggtggattttgccctgtaacacaatccttgtggatatgattcaaaggtgactttaattcagagaatgtgttttcctttctgttttaaaaatatttgaattaagtgatggaaattcttttgttaaacatcaaaagctttctccttgaaaagatgcttggtgtatctgaaagtcacgtgggacatttggtgcattcagaaggtcaaatcattcctgacctctcctcttaggacccagcattaactgctgcgatactcaaggcttccttaaaggatcacagcactggcgcctagttttactgtccagcaactttattagttgtgctagctgagaattggaatatagagtcctttgaatgttacgatcttgttttcaaaacctggagtcaaaccaattaagtatggacttaacaaagacaattgatgatgtgaaatgataccacctgtcaagggcatagttaccatgtggatagaaagatgagtccactgattatcttcaaatcccatgtattctctctagcacgttgcttctgacagaaagaataactcacagatttgaagtttgttcctttcccctgatgaagagtagattggccaaaaggtagatgacaggaaggaagaggagccagaatgacccacagtgatcagttcagcagtgcagagcggcagtgcagaggctcatggaactcacacggaaaaaggaaacacatgctgcttaaaatgcacgataacttaattatccaaattaccattcaattccggtatttttgagatgaaagcatttgagccaacactaaattgaccgtaattaaggaatgaggtaggaagaggcacttttaatctggaggaagaaataaatggaagactgtaataggaaaaatacaggtctaggaaaaaaataatttttttcctttgatgctggccaaggacccctctacataatacagttctcctgctggaaagcatcagggcaaacagagttattccaaactctgcaacagggaagactgtactttgaccttcttttcctggggaaagggaacaactagtaatctttaaatgtcaaaacttttcttctaaatagtacattcattaaccagtttcttctggtggtgcaaagaacactcaccacagtgagcaataccactattcaatttcccctttggagaggtgacagcggggtagaatcacctggagtcagctgctagtctttaactgatgacaaggccttgcaaatacccctgagaacaatttcactctgagctcacagggaagcagcagtctggtgtgggctcctgtggtgtaaccatcaaatgtggaagacctgatggtgttagtgtgtggggatgccgggctgaaattcaacagccttgcaaaaagaaagggaagatgggatgtgttaatattgtagtggcatgcactttccagctctccatggagctctctttatatatgaggtaattgaatgtcactattctgtaccatacagcaggtattatctagccaaggttataattaccatgaagtgctgtggaatgtagtaggaggcttttcactggga

SEQ ID NO: 431857 - DNA, 3948 bp, Homo sapiens
gaaggaggaagcgcgcggggcgccataaggaggaagcgggtagtcgaccgtgtccgcgcgcctgggagacgctgcctcggcccggacgcgcccgcgcccccgcggctggagggtgattctgaaagtcaagaagacatcatccggaatattgccaggcacctcgcccaggtcggggacagcatggaccgtagcatccctccgggcctggtgaacggcctggccctgcagctcaggaacaccagccggtcggaggaggaccggaacagggacctggccactgccctggagcagctgctgcaggcctaccctagagacatggagaaggagaagaccatgctggtgctggccctgctgctggccaagaaggtggccagtcacacgccgtccttgctccgtgatgtctttcacacaacagtgaattttattaaccagaacctacgcacctacgtgaggagcttagccagaaatgggatggactgaacggacagttccagaagtgtgactggctaaagctcgatgtggtcacagctgtatagctgcttccagtgtagacggagccctggcatgtcaacagcgttcctagagaagacaggctggaagatagctgtgacttctattttaaagacaatgttaaacttataacccactttaaaatatctacattaatatacttgaatgaaaatgtccatttacacgtatttgaatggccttcatatcatccacacatgaatctgcacatctgtaaatctacacacggtgcctttatttccactgtgcaggttcccacttaaaaattaaattggaaagcaggtttcaaggaagtagaaacaaaatacaatttttttggtaaaaaaaaattactgtttattaaagtacaaccatagaggatggtcttacagcaggcagtatcctgtttgaggaaagcaagaatcagagaaggaacataccccttacaaatgaaaaattccactcaaaatagggactatctatcttaatactaaggaaccaacaatcttcctgtttaaaaaaccacatggcacagagattctgaactaaagtgctgcactcaaatgatgggaagtccggccccagtacacaggggcttgactttttcaacttcgtttcctttgttggagtcaaaaagaaccacttgtggttctaaaaggtgtgaaggtgatttaagggcccaggtcagccactgtttgtttacaaaatcaggtaactaactgcatacactttttctctttccatgacatcaagactttgctaaagacatgaagccacgggtgccagaagctactgcgatgccccgggagttagccccctggtaatagctgtaaacttccaatttctagccatacgctcagctcatccatgcctcagaagtgcatctggagagaacaggtttctaagcataaaagatgaaagagcagttggactttttaaaaattcagcaaagtggttccctctcttagggacagtcaaaaccaagtcacttaggtagtaccaaaataaataaggaaaagcttagctttagaaacagtgcaacactggtctgctgttccagtggtaagctatgtcccaggaatcagtttaaaagcacgacagtggatgctgggtccatatcacacacattgctgtgaacaggaaactcctgtgaccacaacatgaggccactggagacgcatatgagtaagggcactgacggactcatgatttcttcttaccagatgctttcctgttctttaagagtttaaaatcatcagaaaggaaaaacaaactctatattgttcagcatgcaatacataccacgctagggctggctcaattgaaagtgggcaaaagcttacaaatactaaaaagaagtgctgccgcgcagtgtggaggccactgtttggaaataaatcttcctaacactacgacttttcatgttttggagtggacttttaaaaaagttttccaaccacaatggaaacaggttgaaccacactgcgcctacacatccatccatacgtcagccattataatcagattctcactgggggaggcattttcttcccaaaggagctgtatgcagtcatcacccggaactaatgggaaagtgttcttaagcagcaagtgactctggaccacctctctcacacactgactcttccacagcatcttcacctgcttctgtttcacttgaattcatacagtaggccaccattttataacaggtcttagtgtaaattcttccagaccaagtctgagatagtcttggttgtaaagcaagaccgtcaccccttctcccaaagccaacattataaaaagattccattgtctcaaacacaaatgttccagtcttgagcacttcccagccatggtgactcgggcatatcctggcagttggtggattttgccctgtaacacaatccttgtggatatgattcaaaggtgactttaattcagagaatgtgttttcctttctgttttaaaaatatttgaattaagtgatggaaattcttttgttaaacatcaaaagctttctccttgaaaagatgcttggtgtatctgaaagtcacgtgggacatttggtgcattcagaaggtcaaatcattcctgacctctcctcttaggacccagcattaactgctgcgatactcaaggcttccttaaaggatcacagcactggcgcctagttttactgtccagcaactttattagttgtgctagctgagaattggaatatagagtcctttgaatgttacgatcttgttttcaaaacctggagtcaaaccaattaagtatggacttaacaaagacaattgatgatgtgaaatgataccacctgtcaagggcatagttaccatgtggatagaaagatgagtccactgattatcttcaaatcccatgtattctctctagcacgttgcttctgacagaaagaataactcacagatttgaagtttgttcctttcccctgatgaagagtagattggccaaaaggtagatgacaggaaggaagaggagccagaatgacccacagtgatcagttcagcagtgcagagcggcagtgcagaggctcatggaactcacacggaaaaaggaaacacatgctgcttaaaatgcacgataacttaattatccaaattaccattcaattccggtatttttgagatgaaagcatttgagccaacactaaattgaccgtaattaaggaatgaggtaggaagaggcacttttaatctggaggaagaaataaatggaagactgtaataggaaaaatacaggtctaggaaaaaaataatttttttcctttgatgctggccaaggacccctctacataatacagttctcctgctggaaagcatcagggcaaacagagttattccaaactctgcaacagggaagactgtactttgaccttcttttcctggggaaagggaacaactagtaatctttaaatgtcaaaacttttcttctaaatagtacattcattaaccagtttcttctggtggtgcaaagaacactcaccacagtgagcaataccactattcaatttcccctttggagaggtgacagcggggtagaatcacctggagtcagctgctagtctttaactgatgacaaggccttgcaaatacccctgagaacaatttcactctgagctcacagggaagcagcagtctggtgtgggctcctgtggtgtaaccatcaaatgtggaagacctgatggtgttagtgtgtggggatgccgggctgaaattcaacagccttgcaaaaagaaagggaagatgggatgtgttaatattgtagtggcatgcactttccagctctccatggagctctctttatatatgaggtaattgaatgtcactattctgtaccatacagcaggtattatctagccaaggttataattaccatgaagtgctgtggaatgtagtaggaggcttttcactggga

SEQ ID NO: 431858 - DNA, 3962 bp, Homo sapiens
gaaggaggaagcgcgcggggcgccataaggaggaagcgggtagtcgaccgtgtccgcgcgcctgggagacgctgcctcggcccggacgcgcccgcgcccccgcggctggagggtggtcgccactgggacactgtgaaccaggagtgagtcggagctgccgcgctgcccaggccatggactgtgaggtcaacaacggttccagcctcagggatgagtgcatcacaaacctactggtgtttggcttcctccaaagctgttctgacaacagcttccgcagagagctggacgcactgggccacgagctgccagtgctggctccccagtgggagggctacgatgagctgcagactgatggcaaccgcagcagccactcccgcttgggaagaatagaggcagcgtccttgctccgtgatgtctttcacacaacagtgaattttattaaccagaacctacgcacctacgtgaggagcttagccagaaatgggatggactgaacggacagttccagaagtgtgactggctaaagctcgatgtggtcacagctgtatagctgcttccagtgtagacggagccctggcatgtcaacagcgttcctagagaagacaggctggaagatagctgtgacttctattttaaagacaatgttaaacttataacccactttaaaatatctacattaatatacttgaatgaaaatgtccatttacacgtatttgaatggccttcatatcatccacacatgaatctgcacatctgtaaatctacacacggtgcctttatttccactgtgcaggttcccacttaaaaattaaattggaaagcaggtttcaaggaagtagaaacaaaatacaatttttttggtaaaaaaaaattactgtttattaaagtacaaccatagaggatggtcttacagcaggcagtatcctgtttgaggaaagcaagaatcagagaaggaacataccccttacaaatgaaaaattccactcaaaatagggactatctatcttaatactaaggaaccaacaatcttcctgtttaaaaaaccacatggcacagagattctgaactaaagtgctgcactcaaatgatgggaagtccggccccagtacacaggggcttgactttttcaacttcgtttcctttgttggagtcaaaaagaaccacttgtggttctaaaaggtgtgaaggtgatttaagggcccaggtcagccactgtttgtttacaaaatcaggtaactaactgcatacactttttctctttccatgacatcaagactttgctaaagacatgaagccacgggtgccagaagctactgcgatgccccgggagttagccccctggtaatagctgtaaacttccaatttctagccatacgctcagctcatccatgcctcagaagtgcatctggagagaacaggtttctaagcataaaagatgaaagagcagttggactttttaaaaattcagcaaagtggttccctctcttagggacagtcaaaaccaagtcacttaggtagtaccaaaataaataaggaaaagcttagctttagaaacagtgcaacactggtctgctgttccagtggtaagctatgtcccaggaatcagtttaaaagcacgacagtggatgctgggtccatatcacacacattgctgtgaacaggaaactcctgtgaccacaacatgaggccactggagacgcatatgagtaagggcactgacggactcatgatttcttcttaccagatgctttcctgttctttaagagtttaaaatcatcagaaaggaaaaacaaactctatattgttcagcatgcaatacataccacgctagggctggctcaattgaaagtgggcaaaagcttacaaatactaaaaagaagtgctgccgcgcagtgtggaggccactgtttggaaataaatcttcctaacactacgacttttcatgttttggagtggacttttaaaaaagttttccaaccacaatggaaacaggttgaaccacactgcgcctacacatccatccatacgtcagccattataatcagattctcactgggggaggcattttcttcccaaaggagctgtatgcagtcatcacccggaactaatgggaaagtgttcttaagcagcaagtgactctggaccacctctctcacacactgactcttccacagcatcttcacctgcttctgtttcacttgaattcatacagtaggccaccattttataacaggtcttagtgtaaattcttccagaccaagtctgagatagtcttggttgtaaagcaagaccgtcaccccttctcccaaagccaacattataaaaagattccattgtctcaaacacaaatgttccagtcttgagcacttcccagccatggtgactcgggcatatcctggcagttggtggattttgccctgtaacacaatccttgtggatatgattcaaaggtgactttaattcagagaatgtgttttcctttctgttttaaaaatatttgaattaagtgatggaaattcttttgttaaacatcaaaagctttctccttgaaaagatgcttggtgtatctgaaagtcacgtgggacatttggtgcattcagaaggtcaaatcattcctgacctctcctcttaggacccagcattaactgctgcgatactcaaggcttccttaaaggatcacagcactggcgcctagttttactgtccagcaactttattagttgtgctagctgagaattggaatatagagtcctttgaatgttacgatcttgttttcaaaacctggagtcaaaccaattaagtatggacttaacaaagacaattgatgatgtgaaatgataccacctgtcaagggcatagttaccatgtggatagaaagatgagtccactgattatcttcaaatcccatgtattctctctagcacgttgcttctgacagaaagaataactcacagatttgaagtttgttcctttcccctgatgaagagtagattggccaaaaggtagatgacaggaaggaagaggagccagaatgacccacagtgatcagttcagcagtgcagagcggcagtgcagaggctcatggaactcacacggaaaaaggaaacacatgctgcttaaaatgcacgataacttaattatccaaattaccattcaattccggtatttttgagatgaaagcatttgagccaacactaaattgaccgtaattaaggaatgaggtaggaagaggcacttttaatctggaggaagaaataaatggaagactgtaataggaaaaatacaggtctaggaaaaaaataatttttttcctttgatgctggccaaggacccctctacataatacagttctcctgctggaaagcatcagggcaaacagagttattccaaactctgcaacagggaagactgtactttgaccttcttttcctggggaaagggaacaactagtaatctttaaatgtcaaaacttttcttctaaatagtacattcattaaccagtttcttctggtggtgcaaagaacactcaccacagtgagcaataccactattcaatttcccctttggagaggtgacagcggggtagaatcacctggagtcagctgctagtctttaactgatgacaaggccttgcaaatacccctgagaacaatttcactctgagctcacagggaagcagcagtctggtgtgggctcctgtggtgtaaccatcaaatgtggaagacctgatggtgttagtgtgtggggatgccgggctgaaattcaacagccttgcaaaaagaaagggaagatgggatgtgttaatattgtagtggcatgcactttccagctctccatggagctctctttatatatgaggtaattgaatgtcactattctgtaccatacagcaggtattatctagccaaggttataattaccatgaagtgctgtggaatgtagtaggaggcttttcactggga

SEQ ID NO: 431859 - DNA, 1264 bp, Homo sapiens
gaaggaggaagcgcgcggggcgccataaggaggaagcgggtagtcgaccgtgtccgcgcgcctgggagacgctgcctcggcccggacgcgcccgcgcccccgcggctggagggtggtcgccactgggacactgtgaaccaggagtgagtcggagctgccgcgctgcccaggccatggactgtgaggtcaacaacggttccagcctcagggatgagtgcatcacaaacctactggtgtttggcttcctccaaagctgttctgacaacagcttccgcagagagctggacgcactgggccacgagctgccagtgctggctccccagtgggagggctacgatgagctgcagactgatggcaaccgcagcagccactcccgcttgggaagaatagaggcagattctgaaagtcaagaagacatcatccggaatattgccaggcacctcgcccaggtcggggacagcatggaccgtagcatccctccgggcctggtgaacggcctggccctgcagctcaggaacaccagccggtcggaggaggaccggaacagggacctggccactgccctggagcagctgctgcaggcctaccctagagacatggagaaggagaagaccatgctggtgctggccctgctgctggccaagaaggtggccagtcacacgccgtccttgctccgtgatgtctttcacacaacagtgaattttattaaccagaacctacgcacctacgtgaggagcttagccagaaatgggatggactgaacggacagttccagaagtgtgactggctaaagctcgatgtggtcacagctgtatagctgcttccagtgtagacggagccctggcatgtcaacagcgttcctagagaagacaggctggaagatagctgtgacttctattttaaagacaatgttaaacttataacccactttaaaatatctacattaatatacttgaatgaaaatgtccatatcacacacattgctgtgaacaggaaactcctgtgaccacaacatgaggccactggagacgcatatgagtaagggcactgacggactcatgatttcttcttaccagatgctttcctgttctttaagagtttaaaatcatcagaaaggaaaaacaaactctatattgttcagcatgcaatacataccacgctagggctggctcaattgaaagtgggcaaaagcttacaaatactaaaaagaagtgctgccgcgcagtgtggaggccactgtttggaaataaatcttcctaacact

SEQ ID NO: 431860 - DNA, 3294 bp, Homo sapiens
gaaggaggaagcgcgcggggcgccataaggaggaagcgggtagtcgaccgtgtccgcgcgcctgggagacgctgcctcggcccggacgcgcccgcgcccccgcggctggagggtggtcgccactgggacactgtgaaccaggagtgagtcggagctgccgcgctgcccaggccatggactgtgaggtcaacaacggttccagcctcagggatgagtgcatcacaaacctactggtgtttggcttcctccaaagctgttctgacaacagcttccgcagagagctggacgcactgggccacgagctgccagtgctggctccccagtgggagggctacgatgagctgcagactgatggcaaccgcagcagccactcccgcttgggaagaatagaggcagattctgaaagtcaagaagacatcatccggaatattgccaggcacctcgcccaggtcggggacagcatggaccgtagcatccctccgggcctggtgaacggcctggccctgcagctcaggaacaccagccggtcggaggaggaccggaacagggacctggccactgccctggagcagctgctgcaggcctaccctagagacatggagaaggagaagaccatgctggtgctggccctgctgctggccaagaaggtggccagtcacacgccgtccttgctccgtgatgtctttcacacaacagtgaattttattaaccagaacctacgcacctacgtgaggagcttagccagaaatgggatggactgaacggacagttccagaagtgtgactggctaaagctcgatgtggtcacagctgtatagctgcttccagtgtagacggagccctggcatgtcaacagcgttcctagagaagacaggctggaagatagctgtgacttctattttaaagacaatgttaaacttataacccactttaaaatatctacattaatatacttgaatgaaaatgtccatatcacacacattgctgtgaacaggaaactcctgtgaccacaacatgaggccactggagacgcatatgagtaagggcactgacggactcatgatttcttcttaccagatgctttcctgttctttaagagtttaaaatcatcagaaaggaaaaacaaactctatattgttcagcatgcaatacataccacgctagggctggctcaattgaaagtgggcaaaagcttacaaatactaaaaagaagtgctgccgcgcagtgtggaggccactgtttggaaataaatcttcctaacactacgacttttcatgttttggagtggacttttaaaaaagttttccaaccacaatggaaacaggttgaaccacactgcgcctacacatccatccatacgtcagccattataatcagattctcactgggggaggcattttcttcccaaaggagctgtatgcagtcatcacccggaactaatgggaaagtgttcttaagcagcaagtgactctggaccacctctctcacacactgactcttccacagcatcttcacctgcttctgtttcacttgaattcatacagtaggccaccattttataacaggtcttagtgtaaattcttccagaccaagtctgagatagtcttggttgtaaagcaagaccgtcaccccttctcccaaagccaacattataaaaagattccattgtctcaaacacaaatgttccagtcttgagcacttcccagccatggtgactcgggcatatcctggcagttggtggattttgccctgtaacacaatccttgtggatatgattcaaaggtgactttaattcagagaatgtgttttcctttctgttttaaaaatatttgaattaagtgatggaaattcttttgttaaacatcaaaagctttctccttgaaaagatgcttggtgtatctgaaagtcacgtgggacatttggtgcattcagaaggtcaaatcattcctgacctctcctcttaggacccagcattaactgctgcgatactcaaggcttccttaaaggatcacagcactggcgcctagttttactgtccagcaactttattagttgtgctagctgagaattggaatatagagtcctttgaatgttacgatcttgttttcaaaacctggagtcaaaccaattaagtatggacttaacaaagacaattgatgatgtgaaatgataccacctgtcaagggcatagttaccatgtggatagaaagatgagtccactgattatcttcaaatcccatgtattctctctagcacgttgcttctgacagaaagaataactcacagatttgaagtttgttcctttcccctgatgaagagtagattggccaaaaggtagatgacaggaaggaagaggagccagaatgacccacagtgatcagttcagcagtgcagagcggcagtgcagaggctcatggaactcacacggaaaaaggaaacacatgctgcttaaaatgcacgataacttaattatccaaattaccattcaattccggtatttttgagatgaaagcatttgagccaacactaaattgaccgtaattaaggaatgaggtaggaagaggcacttttaatctggaggaagaaataaatggaagactgtaataggaaaaatacaggtctaggaaaaaaataatttttttcctttgatgctggccaaggacccctctacataatacagttctcctgctggaaagcatcagggcaaacagagttattccaaactctgcaacagggaagactgtactttgaccttcttttcctggggaaagggaacaactagtaatctttaaatgtcaaaacttttcttctaaatagtacattcattaaccagtttcttctggtggtgcaaagaacactcaccacagtgagcaataccactattcaatttcccctttggagaggtgacagcggggtagaatcacctggagtcagctgctagtctttaactgatgacaaggccttgcaaatacccctgagaacaatttcactctgagctcacagggaagcagcagtctggtgtgggctcctgtggtgtaaccatcaaatgtggaagacctgatggtgttagtgtgtggggatgccgggctgaaattcaacagccttgcaaaaagaaagggaagatgggatgtgttaatattgtagtggcatgcactttccagctctccatggagctctctttatatatgaggtaattgaatgtcactattctgtaccatacagcaggtattatctagccaaggttataattaccatgaagtgctgtggaatgtagtaggaggcttttcactggga

SEQ ID NO: 431861 - DNA, 2632 bp, Homo sapiens
agcgggtcgagtgtttctcagcaagagcccgtgtcccgctaggctccgcgccctcgcgcccatagccccggcggcggcacgaccagaggcggccaggggagcgcgccgccccgctcggccctccagtcccgctccgccgcctccctcccgcacagcagccgccagcgcggcctcctgcaccatgtcggtggccggcctcaagaagcagttccataaagccactcagaaagtgagtgagaaggttggaggagctgaaggaaccaagctagatgatgacttcaaagagatggaaaggaaagtggatgtcaccagcagggctgtgatggaaataatgactaaaacaattgaataccttcaacccaatccagcttccagagctaagctcagcatgatcaacaccatgtcaaaaatccgtggccaggagaaggggccaggctatcctcaggcagaggcgctgctggcagaggccatgctcaaatttggaagagagcttggagatgattgcaactttggcccagcacttggtgaggtcggggaggccatgcgggaactgtcggaggtcaaagactctttggacatagaagtgaagcagaacttcattgaccctcttcagaatcttcatgacaaagatcttagggaaattcaacatcatctaaagaagttggagggtcgacgcctggattttgattataagaagaaacgacaaggcaagattccggatgaagagcttcgtcaagctctagagaaatttgatgagtctaaggaaattgctgagtcaagcatgttcaatctcttggagatggatattgaacaagtgagccagctctctgcacttgtgcaagctcagctggagtaccacaagcaggcagtccagatcctgcagcaagtcacggtcagactggaagaaagaataagacaggcttcatctcagcctagaagggaatatcaacctaaaccacgaatgagcctggagtttccaactggagacagtactcagcccaatgggggtctctcccacacaggcactcccaaaccttcaggtgtccaaatggatcagccctgctgccgagctctgtacgactttgaacctgaaaatgaaggggagttgggatttaaagagggcgatatcatcacactcactaaccaaattgatgagaactggtatgaggggatgctgcatggccattcaggcttcttccccatcaattatgtggaaattctggttgccctgccccattaggatgttatgctggctggctcgcctcctcttgacccagatagttacggttaaccactgctttggcaatgctgcttataacacatcccaagtgcaggccgcagtggtccacgtcatccagccccaccaagtgactttggttgacttgtgggctcccacaggagtcatggtgatggatgatatcctcttagcctggtgggcgtggcatgtgctttttaaaacatcatctgagaccagccagtagtcacagaactgctgtttacacagttctcaggaggctgtggtttcttagaatatgaccatgagccatttcacagaaaaaccatcccaccgaagatattgtctatcaccccaggggccatctgaaggtctctttgcatttctccatgcaaagaggagaaagcttttgctttcacactgtcccttcccaaatatgtgagtcatggaattgtcaaagtaagccttccctcaccagcaaattgtctcctgatctgaatgaatttgtctcttaatgcatccatagaaaagtgttaattgtgggttcaaagcattctctgcaaataggcatctcagctcctcacacttatggctatttctgacgtatagccagttttcttccctccttgctattaaagccagagcggtaattccaaattatttttcagtaagacagttaatcagcattattgtgagagggactgaaaagaaattctccattatgaggaattgggaagaaatctggtatccaagcttaaatttcttgctatacagaaactatgtatgtatttaggctatttctgaagggcacagggaagggggaacaaatatcttcacttcagttttatttgtgaattacatgtttcatgaatccatttggcacagagacacaaggaagaaaacactagtaaccatctttccactagttcatatactgagaaacagtaaatacctttcctttccacttttaccctgtgttctttgaacatcatttgtgcagattctgccctcaatgaggaccaaataaagatgatttttgtgcttagcagtttaaggtatatggctgcatatgcaaaactctttcccaattcagtcgctacttttacttctgccctttctatccatcgtcttcattttgtgtgtacagtgctgtgtgtaagcttatcagtgtgtttttttatttgtatcagtcatgaaagtcctgttaggtatccagagttctatttatctagctgtacagactctttcagaggtttaacgtgctgcttccgatgtgccacctgcagtagtggatcatgtggagtgaaaggcaaatcttactgcttaatgtataaactctcaccacaggaagcatcgctgtttccaataaatattgctgaagacagaaaaaaaaaaact

SEQ ID NO: 431862 - DNA, 2579 bp, Homo sapiens
agcgggtcgagtgtttctcagcaagagcccgtgtcccgctaggctccgcgccctcgcgcccatagccccggcggcggcacgaccagaggcggccaggggagcgcgccgccccgctcggccctccagtcccgctccgccgcctccctcccgcacagcagccgccagcgcggcctcctgcaccatgtcggtggccggcctcaagaagcagttccataaagccactcagaaagtgagtgagaaggttggaggagctgaaggaaccaagctagatgatgacttcaaagagatggaaaggaaagtggatgtcaccagcagggctgtgatggaaataatgactaaaacaattgaataccttcaacccaatccagcttccagagctaagctcagcatgatcaacaccatgtcaaaaatccgtggccaggagaaggggccaggctatcctcaggcagaggcgctgctggcagaggccatgctcaaatttggaagagagcttggagatgattgcaactttggcccagcacttggtgaggtcggggaggccatgcgggaactgtcggaggtcaaagactctttggacatagaagtgaagcagaacttcattgaccctcttcagaatcttcatgacaaagatcttagggaaattcaacatcatctaaagaagttggagggtcgacgcctggattttgattataagaagaaacgacaaggcaagattccggatgaagagcttcgtcaagctctagagaaatttgatgagtctaaggaaattgctgagtcaagcatgttcaatctcttggagatggatattgaacaagtgagccagctctctgcacttgtgcaagctcagctggagtaccacaagcaggcagtccagatcctgcagcaagtcacggtcagactggaagaaagaataagacaggcttcatctcagcctagaagggaatatcaacctaaaccacgaatgagcctggagtttccaactggagacagtactcagcccaatgggggtctctcccacacaggcactcccaaaccttcaggtgtccaaatggatcagccctgctgccgagctctgtacgactttgaacctgaaaatgaaggggagttgggatttaaagagggcgatatcatcacactcactaaccaaattgatgagaactggtatgaggggatgctgcatggccattcaggcttcttccccatcaattatgtggaaattctggttgccctgccccattaggatgttatgctggctggctcgcctcctcttgacccagatagttacggttaaccactgctttggcaatgctgcttataacacatcccaagtgcaggccgcagtggtccacgtcatccagccccaccaagtgactttggttgacttgtgggctcccacaggagtcatggtgatggatgatatcctcttagcctggtgggcgtggcatgtgctttttaaaacatcatctgagaccagccagtagtcacagaactgctgtttacacagttctcaggaggctgtggtttcttagaatatgaccatgagccatttcacagaaaaaccatcccaccgaagatattgtctatcaccccaggggccatctgaaggtctctttgcatttctccatgcaaagaggagaaagcttttgctttcacactgtcccttcccaaatatgtgagtcatggaattgtcaaagtaagccttccctcaccagcaaattgtctcctgatctgaatgaatttgtctcttaatgcatccatagaaaagtgttaattgtgggttcaaagcattctctgcaaataggcatctcagctcctcacacttatggctatttctgacgtatagccagttttcttccctccttgctattaaagccagagcggtaattccaaattatttttcagtaagacagttaatcagcattattgtgagagggattaaatttcttgctatacagaaactatgtatgtatttaggctatttctgaagggcacagggaagggggaacaaatatcttcacttcagttttatttgtgaattacatgtttcatgaatccatttggcacagagacacaaggaagaaaacactagtaaccatctttccactagttcatatactgagaaacagtaaatacctttcctttccacttttaccctgtgttctttgaacatcatttgtgcagattctgccctcaatgaggaccaaataaagatgatttttgtgcttagcagtttaaggtatatggctgcatatgcaaaactctttcccaattcagtcgctacttttacttctgccctttctatccatcgtcttcattttgtgtgtacagtgctgtgtgtaagcttatcagtgtgtttttttatttgtatcagtcatgaaagtcctgttaggtatccagagttctatttatctagctgtacagactctttcagaggtttaacgtgctgcttccgatgtgccacctgcagtagtggatcatgtggagtgaaaggcaaatcttactgcttaatgtataaactctcaccacaggaagcatcgctgtttccaataaatattgctgaagacagaaaaaaaaaaact

SEQ ID NO: 431863 - DNA, 2578 bp, Homo sapiens
agcgggtcgagtgtttctcagcaagagcccgtgtcccgctaggctccgcgccctcgcgcccatagccccggcggcggcacgaccagaggcggccaggggagcgcgccgccccgctcggccctccagtcccgctccgccgcctccctcccgcacagcagccgccagcgcggcctcctgcaccatgtcggtggccggcctcaagaagcagttccataaagccactcagaaagtgagtgagaaggttggaggagctgaaggaaccaagctagatgatgacttcaaagagatggaaaggaaagtggatgtcaccagcagggctgtgatggaaataatgactaaaacaattgaataccttcaacccaatccagcttccagagctaagctcagcatgatcaacaccatgtcaaaaatccgtggccaggagaaggggccaggctatcctcaggcagaggcgctgctggcagaggccatgctcaaatttggaagagagcttggagatgattgcaactttggcccagcacttggtgaggtcggggaggccatgcgggaactgtcggaggtcaaagactctttggacatagaagtgaagcagaacttcattgaccctcttcagaatcttcatgacaaagatcttagggaaattcaacatcatctaaagaagttggagggtcgacgcctggattttgattataagaagaaacgacaaggcaagattccggatgaagagcttcgtcaagctctagagaaatttgatgagtctaaggaaattgctgagtcaagcatgttcaatctcttggagatggatattgaacaagtgagccagctctctgcacttgtgcaagctcagctggagtaccacaagcaggcagtccagatcctgcagcaagtcacggtcagactggaagaaagaataagacaggcttcatctcagcctagaagggaatatcaacctaaaccacgaatgagcctggagtttccaactggagacagtactcagcccaatgggggtctctcccacacaggcactcccaaaccttcaggtgtccaaatggatcagccctgctgccgagctctgtacgactttgaacctgaaaatgaaggggagttgggatttaaagagggcgatatcatcacactcactaaccaaattgatgagaactggtatgaggggatgctgcatggccattcaggcttcttccccatcaattatgtggaaattctggttgccctgccccattaggatgttatgctggctggctcgcctcctcttgacccagatagttacggttaaccactgctttggcaatgctgcttataacacatcccaagtgcaggccgcagtggtccacgtcatccagccccaccaagtgactttggttgacttgtgggctcccacaggagtcatggtgatggatgatatcctcttagcctggtgggcgtggcatgtgctttttaaaacatcatctgagaccagccagtagtcacagaactgctgtttacacagttctcaggaggctgtggtttcttagaatatgaccatgagccatttcacagaaaaaccatcccaccgaagatattgtctatcaccccaggggccatctgaaggtctctttgcatttctccatgcaaagaggagaaagcttttgctttcacactgtcccttcccaaatatgtgagtcatggaattgtcaaagtaagccttccctcaccagcaaattgtctcctgatctgaatgaatttgtctcttaatgcatccatagtcacacttatggctatttctgacgtatagccagttttcttccctccttgctattaaagccagagcggtaattccaaattatttttcagtaagacagttaatcagcattattgtgagagggactgaaaagaaattctccattatgaggaattgggaagaaatctggtatccaagcttaaatttcttgctatacagaaactatgtatgtatttaggctatttctgaagggcacagggaagggggaacaaatatcttcacttcagttttatttgtgaattacatgtttcatgaatccatttggcacagagacacaaggaagaaaacactagtaaccatctttccactagttcatatactgagaaacagtaaatacctttcctttccacttttaccctgtgttctttgaacatcatttgtgcagattctgccctcaatgaggaccaaataaagatgatttttgtgcttagcagtttaaggtatatggctgcatatgcaaaactctttcccaattcagtcgctacttttacttctgccctttctatccatcgtcttcattttgtgtgtacagtgctgtgtgtaagcttatcagtgtgtttttttatttgtatcagtcatgaaagtcctgttaggtatccagagttctatttatctagctgtacagactctttcagaggtttaacgtgctgcttccgatgtgccacctgcagtagtggatcatgtggagtgaaaggcaaatcttactgcttaatgtataaactctcaccacaggaagcatcgctgtttccaataaatattgctgaagacagaaaaaaaaaaact

SEQ ID NO: 431864 - DNA, 2732 bp, Homo sapiens
agcgggtcgagtgtttctcagcaagagcccgtgtcccgctaggctccgcgccctcgcgcccatagccccggcggcggcacgaccagaggcggccaggggagcgcgccgccccgctcggccctccagtcccgctccgccgcctccctcccgcacagcagccgccagcgcggcctcctgcaccatgtcggtggccggcctcaagaagcagttccataaagccactcagaaagtgagtgagaaggttggaggagctgaaggaaccaagctagatgatgacttcaaagagatggaaaggaaagtggatgtcaccagcagggctgtgatggaaataatgactaaaacaattgaataccttcaacccaatccagcttccagagctaagctcagcatgatcaacaccatgtcaaaaatccgtggccaggagaaggggccaggctatcctcaggcagaggcgctgctggcagaggccatgctcaaatttggaagagagcttggagatgattgcaactttggcccagcacttggtgaggtcggggaggccatgcgggaactgtcggaggtcaaagactctttggacatagaagtgaagcagaacttcattgaccctcttcagaatcttcatgacaaagatcttagggaaattcaacatcatctaaagaagttggagggtcgacgcctggattttgattataagaagaaacgacaaggcaagattccggatgaagagcttcgtcaagctctagagaaatttgatgagtctaaggaaattgctgagtcaagcatgttcaatctcttggagatggatattgaacaagtgagccagctctctgcacttgtgcaagctcagctggagtaccacaagcaggcagtccagatcctgcagcaagtcacggtcagactggaagaaagaataagacaggcttcatctcagcctagaagggaatatcaacctaaaccacgaatgagcctggagtttccaactggagacagtactcagcccaatgggggtctctcccacacaggcactcccaaaccttcaggtgtccaaatggatcagccctgctgccgagctctgtacgactttgaacctgaaaatgaaggggagttgggatttaaagagggcgatatcatcacactcactaaccaaattgatgagaactggtatgaggggatgctgcatggccattcaggcttcttccccatcaattatgtggaaattctggttgccctgccccattaggatgttatgctggctggctcgcctcctcttgacccagatagttacggttaaccactgctttggcaatgctgcttataacacatcccaagtgcaggccgcagtggtccacgtcatccagccccaccaagtgactttggttgacttgtgggctcccacaggagtcatggtgatggatgatatcctcttagcctggtgggcgtggcatgtgctttttaaaacatcatctgagaccagccagtagtcacagaactgctgtttacacagttctcaggaggctgtggtttcttagaatatgaccatgagccatttcacagaaaaaccatcccaccgaagatattgtctatcaccccaggggccatctgaaggtctctttgcatttctccatgcaaagaggagaaagcttttgctttcacactgtcccttcccaaatatgtgagtcatggaattgtcaaagtaagccttccctcaccagcaaattgtctcctgatctgaatgaatttgtctcttaatgcatccatagaaaagtgttaattgtgggttcaaagcattctctgcaaataggcatctcagctcctcacacttatggctatttctgacgtatagccagttttcttccctccttgctattaaagccagagcggtaattccaaattatttttcagtaagacagttaatcagcattattgtgagagggactgaaaagaaattctccattatgaggaattgggaagaaatctggtatccaagcttaaatttcttgctatacagaaactatgtatgtatttaggctatttctgaagggcacagggaagggggaacaaatatcttcacttcagttttatttgtgaattacatgtttcatgaatccatttggcacagagacacaaggaagaaaacactagtaaccatctttccactagttcatatactgagaaacagtaaatacctttcctttccacttttaccctgtgttctttgaacatcatttgtgcagattctgccctcaatgaggaccaaataaagatgatttttgtgcttagcagtttaaggtatatggctgcatatgcaaaactctttcccaattcagtcgctacttttacttctgccctttctatccatcgtcttcattttgtgtgtacagtgctgtgtgtaagcttatcagtgtgtttttttatttgtatcagtcatgaaagtcctgttaggtatccagagttctatttatctagctgtacagactctttcagaggtttaacgtgctgcttccgatgtgccacctgcagtagtggatcatgtggagtgaaaggcaaatcttactgcttaatgtataaaggcttggcctgtacagcacccgccagtcagagctgtgtggcctcaccctctggcagctgagcccagcactgtccttcttggtgccatcttcccctgccgcaccggctgtctccgcccagcccccacctttgggttgtatggttgggctccctagctacacaga

SEQ ID NO: 431865 - DNA, 2405 bp, Homo sapiens
agcgggtcgagtgtttctcagcaagagcccgtgtcccgctaggctccgcgccctcgcgcccatagccccggcggcggcacgaccagaggcggccaggggagcgcgccgccccgctcggccctccagtcccgctccgccgcctccctcccgcacagcagccgccagcgcggcctcctgcaccatgtcggtggccggcctcaagaagcagttccataaagccactcagaaagtgagtgagaaggttggaggagctgaaggaaccaagctagatgatgacttcaaagagatggaaaggaaagtggatgtcaccagcagggctgtgatggaaataatgactaaaacaattgaataccttcaacccaatccagcttccagagctaagctcagcatgatcaacaccatgtcaaaaatccgtggccaggagaaggggccaggctatcctcaggcagaggcgctgctggcagaggccatgctcaaatttggaagagagcttggagatgattgcaactttggcccagcacttggtgaggtcggggaggccatgcgggaactgtcggaggtcaaagactctttggacatagaagtgaagcagaacttcattgaccctcttcagaatcttcatgacaaagatcttagggaaattcaacatcatctaaagaagttggagggtcgacgcctggattttgattataagaagaaacgacaaggcaagattccggatgaagagcttcgtcaagctctagagaaatttgatgagtctaaggaaattgctgagtcaagcatgttcaatctcttggagatggatattgaacaagtgagccagctctctgcacttgtgcaagctcagctggagtaccacaagcaggcagtccagatcctgcagcaagtcacggtcagactggaagaaagaataagacaggcttcatctcagcctagaagggaatatcaacctaaaccacgaatgagcctggagtttccaactggagacagtactcagcccaatgggggtctctcccacacaggcactcccaaaccttcaggtgtccaaatggatcagccctgctgccgagctctgtacgactttgaacctgaaaatgaaggggagttgggatttaaagagggcgatatcatcacactcactaaccaaattgatgagaactggtatgaggggatgctgcatggccattcaggcttcttccccatcaattatgtggaaattctggttgccctgccccattaggatgttatgctggctggctcgcctcctcttgacccagatagttacggttaaccactgctttggcaatgctgcttataacacatcccaagtgcaggccgcagtggtccacgtcatccagccccaccaagtgactttggttgacttgtgggctcccacaggagtcatggtgatggatgatatcctcttagcctggtgggcgtggcatgtgctttttaaaacatcatctgagaccagccagtagtcacagaactgctgtttacacagttctcaggaggctgtggtttcttagaatatgaccatgagccatttcacagaaaaaccatcccaccgaagatattgtctatcaccccaggggccatctgaaggtctctttgcatttctccatgcaaagaggagaaagcttttgctttcacactgtcccttcccaaatatgtgagtcatggaattgtcaaagtaagccttccctcaccagcaaattgtctcctgatctgaatgaatttgtctcttaatgcatccatagaaaagtgttaattgtgggttcaaagcattctctgcaaataggcatctcagctcctcacacttatggctatttctgacgtatagccagttttcttccctccttgctattaaagccagagcggtaattccaaattatttttcagtaagacagttaatcagcattattgtgagagggactgaaaagaaattctccattatgaggaattgggaagaaatctggtatccaagcttaaatttcttgctatacagaaactatgtatgtatttaggctatttctgaagggcacagggaagggggaacaaatatcttcacttcagttttatttgtgaattacatgtttcatgaatccatttggcacagagacacaaggaagaaaacactagtaaccatctttccactagttcatatactgagaaacagtaaatacctttcctttccacttttaccctgtgttctttgaacatcatttgtgcagattctgccctcaatgaggaccaaataaagatgatttttgtgcttagcagtttaaggtatatggctgcatatgcaaaactctttcccaattcagtcgctacttttacttctgccctttctatccattttaataattccttttggtgtgctgctgaaaattttctattcagaa

SEQ ID NO: 431866 - DNA, 1376 bp, Homo sapiens
agcgggtcgagtgtttctcagcaagagcccgtgtcccgctaggctccgcgccctcgcgcccatagccccggcggcggcacgaccagaggcggccaggggagcgcgccgccccgctcggccctccagtcccgctccgccgcctccctcccgcacagcagccgccagcgcggcctcctgcaccatgtcggtggccggcctcaagaagcagttccataaagccactcagaaagtgagtgagaaggttggaggagctgaaggaaccaagctagatgatgacttcaaagagatggaaagggtgtccaaatggatcagccctgctgccgagctctgtacgactttgaacctgaaggtctctttgcatttctccatgcaaagaggagaaagcttttgctttcacactgtcccttcccaaatatgtgagtcatggaattgtcaaagtaagccttccctcaccagcaaattgtctcctgatctgaatgaatttgtctcttaatgcatccatagaaaagtgttaattgtgggttcaaagcattctctgcaaataggcatctcagctcctcacacttatggctatttctgacgtatagccagttttcttccctccttgctattaaagccagagcggtaattccaaattatttttcagtaagacagttaatcagcattattgtgagagggactgaaaagaaattctccattatgaggaattgggaagaaatctggtatccaagcttaaatttcttgctatacagaaactatgtatgtatttaggctatttctgaagggcacagggaagggggaacaaatatcttcacttcagttttatttgtgaattacatgtttcatgaatccatttggcacagagacacaaggaagaaaacactagtaaccatctttccactagttcatatactgagaaacagtaaatacctttcctttccacttttaccctgtgttctttgaacatcatttgtgcagattctgccctcaatgaggaccaaataaagatgatttttgtgcttagcagtttaaggtatatggctgcatatgcaaaactctttcccaattcagtcgctacttttacttctgccctttctatccatcgtcttcattttgtgtgtacagtgctgtgtgtaagcttatcagtgtgtttttttatttgtatcagtcatgaaagtcctgttaggtatccagagttctatttatctagctgtacagactctttcagaggtttaacgtgctgcttccgatgtgccacctgcagtagtggatcatgtggagtgaaaggcaaatcttactgcttaatgtataaactctcaccacaggaagcatcgctgtttccaataaatattgctgaagacagaaaaaaaaaaact

SEQ ID NO: 431867 - DNA, 768 bp, Homo sapiens
tcagaaatagccataagtgtgttgagctgagatgcctatttgcagagaatgctttgaacccacaattaacacttttctatggatgcattaagagacaaattcattcagatcaggagacaatttgctggtgagggaaggcttactttgacaattccatgactcacatatttctgaagggcacagggaagggggaacaaatatcttcacttcagttttatttgtgaattacatgtttcatgaatccatttggcacagagacacaaggaagaaaacactagtaaccatctttccactagttcatatactgagaaacagtaaatacctttcctttccacttttaccctgtgttctttgaacatcatttgtgcagattctgccctcaatgaggaccaaataaagatgatttttgtgcttagcagtttaaggtatatggctgcatatgcaaaactctttcccaattcagtcgctacttttacttctgccctttctatccatcgtcttcattttgtgtgtacagtgctgtgtgtaagcttatcagtgtgtttttttatttgtatcagtcatgaaagtcctgttaggtatccagagttctatttatctagctgtacagactctttcagaggtttaacgtgctgcttccgatgtgccacctgcagtagtggatcatgtggagtgaaaggcaaatcttactgcttaatgtataaactctcaccacaggaagcatcgctgtttccaataaatattgctgaagacagaaaaaaaaaaact

SEQ ID NO: 431868 - DNA, 1877 bp, Homo sapiens
agcgggtcgagtgtttctcagcaagagcccgtgtcccgctaggctccgcgccctcgcgcccatagccccggcggcggcacgaccagaggcggccaggggagcgcgccgccccgctcggccctccagtcccgctccgccgcctccctcccgcacagcagccgccagcgcggcctcctgcaccatgtcggtggccggcctcaagaagcagttccataaagccactcagaaagtgagtgagaaggttggaggagctgaaggaaccaagctagatgatgacttcaaagagatggaaaggaaagtggatgtcaccagcagggctgtgatggaaataatgactaaaacaattgaataccttcaacccaatccagcttccagagctaagctcagcatgatcaacaccatgtcaaaaatccgtggccaggagaaggggccaggctatcctcaggcagaggcgctgctggcagaggccatgctcaaatttggaagagagcttggagatgattgcaactttggcccagcacttggtgaggtcggggaggccatgcgggaactgtcggaggtcaaagactctttggacatagaagtgaagcagaacttcattgaccctcttcagaatcttcatgacaaagatcttagggaaattcaacatcatctaaagaagttggagggtcgacgcctggattttgattataagaagaaacgacaaggcaagattccggatgaagagcttcgtcaagctctagagaaatttgatgagtctaaggaaattgctgagtcaagcatgttcaatctcttggagatggatattgaacaagtgagccagctctctgcacttgtgcaagctcagctggagtaccacaagcaggcagtccagatcctgcagcaagtcacggtcagactggaagaaagaataagacaggcttcatctcagcctagaagggaatatcaacctaaaccacgaatgagcctggagtttccaactggagacagtactcagcccaatgggggtctctcccacacaggcactcccaaaccttcaggtgtccaaatggatcagccctgctgccgagctctgtacgactttgaacctgaaaatgaaggggagttgggatttaaagagggcgatatcatcacactcactaaccaaattgatgagaactggtatgaggggatgctgcatggccattcaggcttcttccccatcaattatgtggaaattctggttgccctgccccattaggatgttatgctggctggctcgcctcctcttgacccagatagttacggttaaccactgctttggcaatgctgcttataacacatcccaagtgcaggccgcagtggtccacgtcatccagccccaccaagtgactttggttgacttgtgggctcccacaggagtcatggtgatggatgatatcctcttagcctggtgggcgtggcatgtgctttttaaaacatcatctgagaccagccagtagtcacagaactgctgtttacacagttctcaggaggctgtggtttcttagaatatgaccatgagccatttcacagaaaaaccatcccaccgaagatattgtctatcaccccaggggccatctgaaggtctctttgcatttctccatgcaaagaggagaaacttatcagtgtgtttttttatttgtatcagtcatgaaagtcctgttaggtatccagagttctatttatctagctgtacagactctttcagaggtttaacgtgctgcttccgatgtgccacctgcagtagtggatcatgtggagtgaaaggcaaatcttactgcttaatgtataaactctcaccacaggaagcatcgctgtttccaataaatattgctgaagacagaaaaaaaaaaact

SEQ ID NO: 431869 - DNA, 1439 bp, Homo sapiens
tttttttttttaacagaaacagctaatttccaatgtattgttgggaaaaagcacaaactgtgtttttaactcaaatattgtcttcgactgctatgtgtataggaaagcagtctctgtatcaatgtttacatgttactactttttaaatttcaatacttttataactgttcttaaaaataagagttttaaatactgaatcctttgtcttctaaattgcaatagctataatcacaagagcaatatctctttgaatgactgtctggacaaacacaattgcaaataagggaagggaaaaatgcttttctatttttcagtaactggattgtcttaagaaactacatctgcttaataaacaatttctcagcaatgtttgctgggtatgggagtttaagcccggcagatgtgtctcctggttgaacatgcatttttcatggagtttgggttctaaatttagactgcagttggtttgtattttgtaacactaagtagaaattataaaaagtcaaacattgtgatctataaatgcacagaaaatactttgtaaaaagtagcatccttatataataatgctatttagaaagactgaaaccaagactatttaactgtgaactatgtagcagatgttttaaactttttattccattatatcttgtctagatattttaattcaaagggatactggctctcttgatcggaatttcttgttatcaccattccacgttgccacacaaggtgcacaggctggaagtcttttgtgaaattcccagttaaatatatacaactatgtgacttagtgcacaacacatttgtgaaataacctactcctatatactgacctgcctgtccacgaataattgtaaagggtttttgcatgtacagtttttacaagaattacagttttgtgaagttgtgtctaaattaaagcatttctttagaacaaatggccttaaattctcacggaattcctggaaatgattgtgaattgccttcaaataatagaaaagtgtatttatttgtgtgtgtgtgtgtgtcaaaaatgtaactgctttataatattttttccttacctatatattctatttaatacttggtttatttctactgtacattgttttctttgtcccaagttgacctagggtgacttttataagcatgaaactattttactggaaagaaaaatatatacatccacatatctaacagtatcaatgttatataactatgtaataattgttgatttttaattatgtattaaaatctttaaatcataactatttgctttgtacgtttcatgtatgaatgacaatagtttgatgatttcctttactgatcttaaatatttatgccactacagtgtattacctacggatttttaaatttagctttatttatcaacccaaaaaacaaataaataagatcaatattctttacttgtcaaa

SEQ ID NO: 431870 - DNA, 1383 bp, Homo sapiens
tttttttttttaacagaaacagctaatttccaatgtattgttgggaaaaagcacaaactgtgtttttaactcaaatattgtcttcgactgctatgtgtataggaaagcagtctctgtatcaatgtttacatgttactactttttaaatttcaatacttttataactgttcttaaaaataagagttttaaatactgaatcctttgtcttctaaattgcaatagctataatcacaagagcaatatctctttgaatgactgtctggacaaacacaattgcaaataagggaagggaaaaatgcttttctatttttcagtaactggattgtcttaagaaactacatctgcttaataaacaatttctcagcaatgtttgctgggtatgggagtttaagcccggcagatgtgtctcctggttgaacatgcatttttcatggagtttgggttctaaatttagactgatctataaatgcacagaaaatactttgtaaaaagtagcatccttatataataatgctatttagaaagactgaaaccaagactatttaactgtgaactatgtagcagatgttttaaactttttattccattatatcttgtctagatattttaattcaaagggatactggctctcttgatcggaatttcttgttatcaccattccacgttgccacacaaggtgcacaggctggaagtcttttgtgaaattcccagttaaatatatacaactatgtgacttagtgcacaacacatttgtgaaataacctactcctatatactgacctgcctgtccacgaataattgtaaagggtttttgcatgtacagtttttacaagaattacagttttgtgaagttgtgtctaaattaaagcatttctttagaacaaatggccttaaattctcacggaattcctggaaatgattgtgaattgccttcaaataatagaaaagtgtatttatttgtgtgtgtgtgtgtgtcaaaaatgtaactgctttataatattttttccttacctatatattctatttaatacttggtttatttctactgtacattgttttctttgtcccaagttgacctagggtgacttttataagcatgaaactattttactggaaagaaaaatatatacatccacatatctaacagtatcaatgttatataactatgtaataattgttgatttttaattatgtattaaaatctttaaatcataactatttgctttgtacgtttcatgtatgaatgacaatagtttgatgatttcctttactgatcttaaatatttatgccactacagtgtattacctacggatttttaaatttagctttatttatcaacccaaaaaacaaataaataagatcaatattctttacttgtcaaa

SEQ ID NO: 431871 - DNA, 1475 bp, Homo sapiens
tttttttttttaacagaaacagctaatttccaatgtattgttgggaaaaagcacaaactgtgtttttaactcaaatattgtcttcgactgctatgtgtataggaaagcagtctctgtatcaatgtttacatgttactactttttaaatttcaatacttttataactgttcttaaaaataagagttttaaatactgaatcctttgtcttctaaattgcaatagctataatcacaagagcaatatctctttgaatgactgtctggacaaacacaattgcaaataagggaagggaaaaatgcttttctatttttcagtaactggattgtcttaagaaactacatctgcttaataaacaatttctcagcaatgtttgctgggtatgggagtttaagcccggcagatgtgtctcctggttgaacatgcatttttcatggagtttgggttctaaatttagactgcagttggtttgtattttgtaacactaagtagaaattataaaaagtcaaacattgtgatctataaatgcacagaaaatactttgtaaaaagtagcatccttatataataatgctatttagaaagactgaaaccaagactatttaactgtgaactatgtagcagatgttttaaactttttattccattatatcttgtctagatattttaattcaaagggatactggctctcttgatcggaatttcttgttatcaccattccacgttgccacacaaggtgcacaggctggaagtcttttgtgaaattcccagttaaatatatacaactatgtgacttagtgcacaacacatttgtgaaataacctactcctatatactgacctgcctgtccacgaataattgtaaagggtttttgcatgtacagtttttacaagaattacagttttgtgaagttgtgtctaaattaaagcatttctttagaacaaatggccttaaattctcacggaattcctggaaatgattgtgaattgccttcaaataatagaaaagtgtatttatttgtgtgtgtgtgtgtgtcaaaaatgtaactgctttataatattttttccttacctatatattctatttaatacttggtttatttctactgtacattgttttctttgtcccaagttgacctagggtgacttttataagcatgaaactattttactggaaagaaaaatatatacatccacatatctaacagtatcacatagttatataacattgatactgttagatatgtggatgttatataactatgtaataattgttgatttttaattatgtattaaaatctttaaatcataactatttgctttgtacgtttcatgtatgaatgacaatagtttgatgatttcctttactgatcttaaatatttatgccactacagtgtattacctacggatttttaaatttagctttatttatcaacccaaaaaacaaataaataagatcaatattctttacttgtcaaa

SEQ ID NO: 431872 - DNA, 1038 bp, Homo sapiens
agagtcatcagagggatcagcagctccagggaaggcctggctgccccgcttctaaatgccactccccctcccatcagcgttcgtgctgtcagccttgcagccttctcctactcattccagctccaatacccagcggctgccagaccgagtgaccggcgtggacacagaccctcacttcatcatccacgtgccccagaaagaggacaccctgtgcttcaacatcaatgaggagcctggtgttatcctgagcctggtacaggaccccaacacaggcttctcagtgaatggacagctcattggcaacaaggccaggagccctgggcagcatgacggcacgtacttcgggcggctgggaatcgcaaaccctgccacggactttcagttggaagtgactcctcagaacattacgctgaaccccggctttggtgggcctgtgttttcctggagggaccaagctgtgctgcggcaggacggggtggtggtgaccatcaacaagaagaggaacctggtggtgtctgtggacgacggtggcacctttgaggttgttttgcaccgagtgtggaaggggagctcggtccaccaggacttcctgggcttctatgtgctggacagtcatcggatgtcagcccggacgcacgggctgctggggcaatttttccaccccatcggttttgaagtgtctgacatccacccaggctctgacccccacaaagccagatgccacgatggtggtgaggaaccgccggctcacggtcaccaggggtttgcaaaaagactacagcaaggacccgtggcatggggccgaggtgtcctgctggttcattcacaacaatggggctggactcatcgatggtgcctacactgattatatcgtccccgacatcttctgagccctctggccagcacgcctgtcctcccccggggccaaggcagaggaggaggacgacatcctgacctgctgctgaggctgtacctccttgactaagctggttccttgtgtcaaagcacctcatgccttccattaaagagaggccgtgt

SEQ ID NO: 431873 - DNA, 1043 bp, Homo sapiens
agagtcatcagagggatcagcagctccagggaaggcctggctgccccgcttctaaatgccactccccctcccatcagcgttcgtgctgtcagccttgcagccttctcctactcattccagctccaatacccagcggctgccagaccgagtgaccggcgtggacacagaccctcacttcatcatccacgtgccccagaaagaggacaccctgtgcttcaacatcaatgaggagcctggtgttatcctgagcctggtacaggaccccaacacaggcttctcagtgaatggacagctcattggcaacaaggccaggagccctgggcagcatgacggcacgtacttcgggcggctgggaatcgcaaaccctgccacggactttcagttggaagtgactcctcagaacattacgctgaaccccggctttggtgggcctgtgttttcctggagggaccaagctgtgctgcggcaggacgggtaacctgccagggcctgggcaagatgcagggggaggtgtggcctgggccccaggactctgctgagtctgcagggccctcgtccctgagccatgtctgtgggtgacacccatgtggcctgtgcagacatgtcagactccatggcccacccagccctccatttcccttggttactggatatgtcctctgggcccagctgcatggcaactgtgctcccaccgcaccttagctctgaatgccacccctgtctctaccaaacaaagccagctcatcctcccaggcccagcaaagaggccacctcttcccctcagccctcctgctctcttcctctgctgaactccagatttctctgggcttctcatttggcatgtcttagtctgcattgtctcatgacttttccttcctttactaattcgttcattcattcattcattcattcaacaaactgtgccaagcaccagagcaatgctgggcagcagagctataggaagaggtggggagagtctgctgtggaggtcacaggtgatgagtgggagtcacagaacacggactctgatattagacagcctg

SEQ ID NO: 431874 - DNA, 684 bp, Homo sapiens
ggatgaaggccatggggtgggggcgtggtcataagggttgggtcccagatgacaagggcagctgaatggagagggatgcagtgcagccgcacctgccctctcggccacctggctctgcagggtggtggtgaccatcaacaagaagaggaacctggtggtgtctgtggacgacggtggcacctttgaggttgttttgcaccgagtgtggaaggggagctcggtccaccaggacttcctgggcttctatgtgctggacagtcatcggatgtcagcccggacgcacgggctgctggggcaatttttccaccccatcggttttgaagtgtctgacatccacccaggctctgacccccacaaagccagatgccacgatggtggtgaggaaccgccggctcacggtcaccaggggtttgcaaaaagactacagcaaggacccgtggcatggggccgaggtgtcctgctggttcattcacaacaatggggctggactcatcgatggtgcctacactgattatatcgtccccgacatcttctgagccctctggccagcacgcctgtcctcccccggggccaaggcagaggaggaggacgacatcctgacctgctgctgaggctgtacctccttgactaagctggttccttgtgtcaaagcacctcatgccttccattaaagagaggccgtgt

SEQ ID NO: 431875 - DNA, 929 bp, Homo sapiens
agagtcatcagagggatcagcagctccagggaaggcctggctgccccgcttctaaatgccactccccctcccatcagcgttcgtgctgtcagccttgcagccttctcctactcattccagctccaatacccagcggctgccagaccgagtgaccggcggcttctcagtgaatggacagctcattggcaacaaggccaggagccctgggcagcatgacggcacgtacttcgggcggctgggaatcgcaaaccctgccacggactttcagttggaagtgactcctcagaacattacgctgaaccccggctttggtgggcctgtgttttcctggagggaccaagctgtgctgcggcaggacgggtaacctgccagggcctgggcaagatgcagggggaggtgtggcctgggccccaggactctgctgagtctgcagggccctcgtccctgagccatgtctgtgggtgacacccatgtggcctgtgcagacatgtcagactccatggcccacccagccctccatttcccttggttactggatatgtcctctgggcccagctgcatggcaactgtgctcccaccgcaccttagctctgaatgccacccctgtctctaccaaacaaagccagctcatcctcccaggcccagcaaagaggccacctcttcccctcagccctcctgctctcttcctctgctgaactccagatttctctgggcttctcatttggcatgtcttagtctgcattgtctcatgacttttccttcctttactaattcgttcattcattcattcattcattcaacaaactgtgccaagcaccagagcaatgctgggcagcagagctataggaagaggtggggagagtctgctgtggaggtcacaggtgatgagtgggagtcacagaacacggactctgatattagacagcctg

SEQ ID NO: 431876 - DNA, 629 bp, Homo sapiens
  misc_feature (10)..(11): n is a, c, g, or t
  misc_feature (13)..(13): n is a, c, g, or t
tgcgtatctnngnggatgaaggtggacagggaggtgagggccaacctgtcatcccaggccctgcggatgtcgctggactatgggtttgtgaccccactgacctccatgagcatcaggggcatggcggaccaggacggcctgaagcccaccatcgacaagccctcagaggattctccgcctttggagatgctgggacccagaaggacgttcgtgctgtcagccttgcagccttctcctactcattccagctccaatacccagcggctgccagaccgagtgaccggcggctctgacccccacaaagccagatgccacgatggtggtgaggaaccgccggctcacggtcaccaggggtttgcaaaaagactacagcaaggacccgtggcatggggccgaggtgtcctgctggttcattcacaacaatggggctggactcatcgatggtgcctacactgattatatcgtccccgacatcttctgagccctctggccagcacgcctgtcctcccccggggccaaggcagaggaggaggacgacatcctgacctgctgctgaggctgtacctccttgactaagctggttccttgtgtcaaagcacctcatgccttccattaaagagaggccgtgt

SEQ ID NO: 431877 - DNA, 1166 bp, Homo sapiens
  misc_feature (10)..(11): n is a, c, g, or t
  misc_feature (13)..(13): n is a, c, g, or t
tgcgtatctnngnggatgaaggtggacagggaggtgagggccaacctgtcatcccaggccctgcggatgtcgctggactatgggtttgtgaccccactgacctccatgagcatcaggggcatggcggaccaggacggcctgaagcccaccatcgacaagccctcagaggattctccgcctttggagatgctgggacccagaaggacgttcgtgctgtcagccttgcagccttctcctactcattccagctccaatacccagcggctgccagaccgagtgaccggcgtggacacagaccctcacttcatcatccacgtgccccagaaagaggacaccctgtgcttcaacatcaatgaggagcctggtgttatcctgagcctggtacaggaccccaacacaggcttctcagtgaatggacagctcattggcaacaaggccaggagccctgggcagcatgacggcacgtacttcgggcggctgggaatcgcaaaccctgccacggactttcagttggaagtgactcctcagaacattacgctgaaccccggctttggtgggcctgtgttttcctggagggaccaagctgtgctgcggcaggacggggtggtggtgaccatcaacaagaagaggaacctggtggtgtctgtggacgacggtggcacctttgaggttgttttgcaccgagtgtggaaggggagctcggtccaccaggacttcctgggcttctatgtgctggacagtcatcggatgtcagcccggacgcacgggctgctggggcaatttttccaccccatcggttttgaagtgtctgacatccacccaggctctgacccccacaaagccagatgccacgatggtggtgaggaaccgccggctcacggtcaccaggggtttgcaaaaagactacagcaaggacccgtggcatggggccgaggtgtcctgctggttcattcacaacaatggggctggactcatcgatggtgcctacactgattatatcgtccccgacatcttctgagccctctggccagcacgcctgtcctcccccggggccaaggcagaggaggaggacgacatcctgacctgctgctgaggctgtacctccttgactaagctggttccttgtgtcaaagcacctcatgccttccattaaagagaggccgtgt

SEQ ID NO: 431878 - DNA, 1294 bp, Homo sapiens
  misc_feature (10)..(11): n is a, c, g, or t
  misc_feature (13)..(13): n is a, c, g, or t
  misc_feature (1176)..(1176): n is a, c, g, or t
  misc_feature (1178)..(1178): n is a, c, g, or t
  misc_feature (1274)..(1274): n is a, c, g, or t
tgcgtatctnngnggatgaaggtggacagggaggtgagggccaacctgtcatcccaggccctgcggatgtcgctggactatgggtttgtgaccccactgacctccatgagcatcaggggcatggcggaccaggacggcctgaagcccaccatcgacaagccctcagaggattctccgcctttggagatgctgggacccagaaggacgttcgtgctgtcagccttgcagccttctcctactcattccagctccaatacccagcggctgccagaccgagtgaccggcgtggacacagaccctcacttcatcatccacgtgccccagaaagaggacaccctgtgcttcaacatcaatgaggagcctggtgttatcctgagcctggtacaggaccccaacacaggcttctcagtgaatggacagctcattggcaacaaggccaggagccctgggcagcatgacggcacgtacttcgggcggctgggaatcgcaaaccctgccacggactttcagttggaagtgactcctcagaacattacgctgaaccccggctttggtgggcctgtgttttcctggagggaccaagctgtgctgcggcaggacggggtggtggtgaccatcaacaagaagaggaacctggtggtgtctgtggacgacggtggcacctttgaggttgttttgcaccgagtgtggaaggggagctcggtccaccaggacttcctgggcttctatgtgctggacagtcatcggatgtcagcccggacgcacgggctgctggggcaatttttccaccccatcggttttgaagtgtctgacatccacccaggctctgacccccacaaagccagatgccacgatggtggtgaggaaccgccggctcacggtcaccaggggtttgcaaaaagactacagcaaggacccgtggcatggggccgaggtgtcctgctggttcattcacaacaatggggctggactcatcgatggtgcctacactgattatatcgtccccgacatcttctgagccctctggccagcacgcctgtcctcccccggggccaaggcagaggaggaggacgacatcctgacctgctgctgaggctgtacctccttgactaagctggttccttgtgtcaaagcacctcatgccttccattaaagagaggccgtgttctcataaantngcttaagtcgtgtgtagcttgaaaaaaaaactcgagggggggcccgggacccaattgggcctatagtgagtaggtttacaattcactggcccgccntttacaacgtccggactggg

SEQ ID NO: 431879 - DNA, 1111 bp, Homo sapiens
  misc_feature (993)..(993): n is a, c, g, or t
  misc_feature (995)..(995): n is a, c, g, or t
  misc_feature (1091)..(1091): n is a, c, g, or t
agagtcatcagagggatcagcagctccagggaaggcctggctgccccgcttctaaatgccactccccctcccatcagcgttcgtgctgtcagccttgcagccttctcctactcattccagctccaatacccagcggctgccagaccgagtgaccggcgtggacacagaccctcacttcatcatccacgtgccccagaaagaggacaccctgtgcttcaacatcaatgaggagcctggtgttatcctgagcctggtacaggaccccaacacaggcttctcagtgaatggacagctcattggcaacaaggccaggagccctgggcagcatgacggcacgtacttcgggcggctgggaatcgcaaaccctgccacggactttcagttggaagtgactcctcagaacattacgctgaaccccggctttggtgggcctgtgttttcctggagggaccaagctgtgctgcggcaggacggggtggtggtgaccatcaacaagaagaggaacctggtggtgtctgtggacgacggtggcacctttgaggttgttttgcaccgagtgtggaaggggagctcggtccaccaggacttcctgggcttctatgtgctggacagtcatcggatgtcagcccggacgcacgggctgctggggcaatttttccaccccatcggttttgaagtgtctgacatccacccaggctctgacccccacaaagccagatgccacgatggtggtgaggaaccgccggctcacggtcaccagtggttcattcacaacaatggggctggactcatcgatggtgcctacactgattatatcgtccccgacatcttctgagccctctggccagcacgcctgtcctcccccggggccaaggcagaggaggaggacgacatcctgacctgctgctgaggctgtacctccttgactaagctggttccttgtgtcaaagcacctcatgccttccattaaagagaggccgtgttctcataaantngcttaagtcgtgtgtagcttgaaaaaaaaactcgagggggggcccgggacccaattgggcctatagtgagtaggtttacaattcactggcccgccntttacaacgtccggactggg

SEQ ID NO: 431880 - DNA, 1137 bp, Homo sapiens
  misc_feature (10)..(11): n is a, c, g, or t
  misc_feature (13)..(13): n is a, c, g, or t
tgcgtatctnngnggatgaaggtggacagggaggtgagggccaacctgtcatcccaggccctgcggatgtcgctggactatgggtttgtgaccccactgacctccatgagcatcaggggcatggcggaccaggacggcctgaagcccaccatcgacaagccctcagaggattctccgcctttggagatgctgggacccagaaggacgttcgtgctgtcagccttgcagccttctcctactcattccagctccaatacccagcggctgccagaccgagtgaccggcgtggacacagaccctcacttcatcatccacgtgccccagaaagaggacaccctgtgcttcaacatcaatgaggagcctggtgttatcctgagcctggtacaggaccccaacacaggcttctcagtgaatggacagctcattggcaacaaggccaggagccctgggcagcatgacggcacgtacttcgggcggctgggaatcgcaaaccctgccacggactttcagttggaagtgactcctcagaacattacgctgaaccccggctttggtgggcctgtgttttcctggagggaccaagctgtgctgcggcaggacggggtggtggtgaccatcaacaagaagaggaacctggtggtgtctgtggacgacggtggcacctttgaggttgttttgcaccgagtgtggaaggggagctcggtccaccaggacttcctgggcttctatgtgctggacagtcatcggatgtcagcccggacgcacgggctgctggggcaatttttccaccccatcggttttgaagtgtctgacatccacccaggctctgacccccacaaagccagatgccacgatggtggggtttgcaaaaagactacagcaaggacccgtggcatggggccgaggtgtcctgctggttcattcacaacaatggggctggactcatcgatggtgcctacactgattatatcgtccccgacatcttctgagccctctggccagcacgcctgtcctcccccggggccaaggcagaggaggaggacgacatcctgacctgctgctgaggctgtacctccttgactaagctggttccttgtgtcaaagcacctcatgccttccattaaagagaggccgtgt

SEQ ID NO: 431881 - DNA, 427 bp, Homo sapiens
gcatctcttggcagtttacctgagtcaggttatgaggacctgtcagcagctaagtgtctctgacaagcagttgactgacatattattgatggagaagaaacaagaagcataaaaggtacagattgagcatcattctttcaaaatagaatcctgtcaagaaatgcattgaaagcgtcatgattcacatggaaaagaggtgaaatggatcttcagacacttcatgttactgtcccttttccctccaggactgcaggaggtgctgtgggttggagccgtgggctgtggagggtttgtgtatgatgagaagccctgtacagtcttctcaagaaataccctgagccagtctctgagacgcttcggtaaaaaatgtccctggatggaatcaagattttaaattcaaataaagcctaatatcatgttgtgtcca

SEQ ID NO: 431882 - DNA, 921 bp, Homo sapiens
ttgcagtgaggccgttatcggacagggggccgctgtggggacagcatgagcggcggttggatggcgcaggttggagcgtggcgaacaggggctctgggcctggcgctgctgctgctgctcggcctcggactaggcctggaggccgccgcgagcccgctttccaccccgacctctgcccaggccgcaggccccagctcaggctcgtgcccacccaccaagttccagtgccgcaccagtggcttatgcgtgcccctcacctggcgctgcgacagggacttggactgcagcgatggcagcgatgaggaggagtgcaggattgagccatgtacccagaaagggcaatgcccaccgccccctggcctcccctgcccctgcaccggcgtcagtgactgctctgggggaactgacaagaaactgcgcaactgcagccgcctggcctgcctagcaggcgagctccgttgcacgctgagcgatgactgcattccactcacgtggcgctgcgacggccacccagactgtcccgactccagcgacgagctcggctgtggaaccaatgagatcctcccggaaggggatgccacaaccatggggccccctgtgaccctggagagtgtcacctctctcaggaatgccacaaccatggggccccctgtgaccctggagagtgtcccctctgtcgggaatgccacatcctcctctgccggagaccagtctggaagcccaactgcctatggggttattgcagctgctgcggtgctcagtgcagcctgtcaccgcacctctccttttgtctggtcgacccagagcgctcgcgcactgggtactggtgcatgatgagtcctcttgtgtcagaccgagactcgtcctagacagacttcccaccgatcaacattggtacgacagacgagaatatggatgacc

SEQ ID NO: 431883 - DNA, 1348 bp, Homo sapiens
gcccaactccgctaccagctcttttttttttcttttttgtggtgacggagtctcgttctgtcgcccaggctggagtgcagcagtatgatttcggttcattgcaacctccatctcccaggtttaagcgattctcatgcttcagcctcccgagtagctggcattacaggcgtgcactaccacgcccggctaatttttgtatttttaacagagacggggtttccatgtaggccaggctggtctcgaactcgtgacctcaagtgatccacctgcctcggcctgccaaagtgctgagattacaggcgtgagccactgcacccagcctctgccaccagctgtatggcctcctcttggttcctttctctgtaacctggggagtgcagtagcacctgcccagtggggctcttgagcccaggaactgctacactctgaaccccactcgtactaggggctcagtaacaagcagccgccagtgtggttcctatatcccgggacttcgcctgtctcctgcggatcacagccagtgactactgtgctcttggagaaaggtccagcctccagcttcccaggcttcatttgcatccatctcgcaggccccagctcaggctcgtgcccacccaccaagttccagtgccgcaccagtggcttatgcgtgcccctcacctggcgctgcgacagggacttggactgcagcgatggcagcgatgaggaggagtgcagtgagtggccacgccccttggcggggcttacagggggcggggcctgagggtggtttgtcaggggccaggcacgcggaggtggagcttgtgggaaaggcagggccgcagggatgggtgcgacttgggtctgtgggtcataagaagcggggtctaagatgggcttgggctgggtgcagtggctcacgcctgcaatcccagcactttgggaggctagggtgggaggatcgatcacttgatcctgggaggttgccgctgcagtgagctaggattgtgccagtgcactccagcctgggcaacagagtaagactgtctcaggaaaaaaaaagaaaaagaaaaaaaaaagaaaaatgaaagaaaggaaagaaaggaaggaaagagagagggagggagccaggtacggtggctcacacatgtaatcccagcactttgggaggccaaggcaggcggatcacttgaggtcaggcgttcgagaccagcctggccaacacagtgaaaccccatctctactaaaaatacaaaagttagctggatgtggcggcaggcccctgtaatcccagctagtcaggaggctaaggcaggagaatcacttgaccctgggaggcagaggtttcagtgagtcgagattgcgccac

SEQ ID NO: 431884 - DNA, 1696 bp, Homo sapiens
  misc_feature (1696)..(1696): n is a, c, g, or t
cggctggtcggccggaatttcgggattagagagcggtctggacagcgcgtggccggcgccgctgtggggacagcatgagcggcggttggatggcgcaggttggagcgtggcgaacaggggctctgggcctggcgctgctgctgctgctcggcctcggactaggcctggaggccgccgcgagcccgctttccaccccgacctctgcccaggccgcaggccccagctcaggctcgtgcccacccaccaagttccagtgccgcaccagtggcttatgcgtgcccctcacctggcgctgcgacagggacttggactgcagcgatggcagcgatgaggaggagtgcaggattgagccatgtacccagaaagggcaatgcccaccgccccctggcctcccctgcccctgcaccggcgtcagtgactgctctgggggaactgacaagaaactgcgcaactgcagccgcctggcctgcctagcaggcgagctccgttgcacgctgagcgatgactgcattccactcacgtggcgctgcgacggccacccagactgtcccgactccagcgacgagctcggctgtggaaccaatgagatcctcccggaaggggatgccacaaccatggggccccctgtgaccctggagagtgtcacctctctcaggaatgccacaaccatggggccccctgtgaccctggagagtgtcccctctgtcgggaatgccacatcctcctctgccggagaccagtctggaagcccaactgcctatggggttattgcagctgctgcggtgctcagtgcaagcctggtcaccgccaccctcctccttttgtcctggctccgagcccaggagcgcctccgcccactggggttactggtggccatgaaggagtccctgctgctgtcagaacagaagacctcgctgccctgaggacaagcacttgccaccaccgtcactcagccctgggcgtagccggacaggaggagagcagtgatgcggatgggtacccgggcacaccagccctcagagacctgagctcttctggccacgtggaacctcgaacccgagctcctgcagaagtggccctggagattgagggtccctggacactccctatggagatccggggagctaggatggggaacctgccacagccagaactgaggggctggccccaggcagctcccagggggtagaacggccctgtgcttaagacactcctgctgccccgtctgagggtggcgattaaagttgcttcacatcctcaaaaaaaaaaaaaaaaaaaaacaaaaaaaaaaaaaaaaaaaaaaaaaaggggggggggcaaaaatttactcccccgggggggcccaatttcgccccttttttggggaaaagggggccccataggggggagtcgctcattaaaaagaccggggagggggcggccgtaaaaaaccagcgcgcgcgcgacacaggcccaacgggcatcttggggaaagcagccccctctgcgtgcgtgcaactctgtggaccacaccaggagtaaaggcgggacaatccattcgggttcgggtgaccccaggctgtgggcgaattgctcggtttttgaatagcccgccaccaaatcaggagataacaagaacggacggagagagcaacagcagacacagcatgaaaacaacatagtagcgacgacagcaacaccaccgacgcgccaccan

SEQ ID NO: 431885 - DNA, 1207 bp, Homo sapiens
cggctggtcggccggaatttcgggattagagagcggtctggacagcgcgtggccggcgccgctgtggggacagcatgagcggcggttggatggcgcaggttggagcgtggcgaacaggggctctgggcctggcgctgctgctgctgctcggcctcggactaggcctggaggccgccgcgagcccgctttccaccccgacctctgcccaggccgcaggccccagctcaggctcgtgcccacccaccaaagggacttggactgcagcgatggcagcgatgaggaggagtgcaggattgagccatgtacccagaaagggcaatgcccaccgccccctggcctcccctgcccctgcaccggcgtcagtgactgctctgggggaactgacaagaaactgcgcaactgcagccgcctggcctgcctagcaggcgagctccgttgcacgctgagcgatgactgcattccactcacgtggcgctgcgacggccacccagactgtcccgactccagcgacgagctcggctgtggaaccaatgagatcctcccggaaggggatgccacaaccatggggccccctgtgaccctggagagtgtcacctctctcaggaatgccacaaccatggggccccctgtgaccctggagagtgtcccctctgtcgggaatgccacatcctcctctgccggagaccagtctggaagcccaactgcctatggggttattgcagctgctgcggtgctcagtgcaagcctggtcaccgccaccctcctccttttgtcctggctccgagcccaggagcgcctccgcccactggggttactggtggccatgaaggagtccctgctgctgtcagaacagaagacctcgctgccctgaggacaagcacttgccaccaccgtcactcagccctgggcgtagccggacaggaggagagcagtgatgcggatgggtacccgggcacaccagccctcagagacctgagctcttctggccacgtggaacctcgaacccgagctcctgcagaagtggccctggagattgagggtccctggacactccctatggagatccggggagctaggatggggaacctgccacagccagaactgaggggctggccccaggcagctcccagggggtagaacggccctgtgcttaagacactcctgctgccccgtctgagggtggcgattaaagttgcttcacatcctc

SEQ ID NO: 431886 - DNA, 899 bp, Homo sapiens
cggctggtcggccggaatttcgggattagagagcggtctggacagcgcgtggccggcgccgctgtggggacagcatgagcggcggttggatggcgcaggttggagcgtggcgaacaggggctctgggcctggcgctgctgctgctgctcggcctcggactaggcctggaggccgccgcgagcccgctttccaccccgacctctgcccaggccgcaggaaccaatgagatcctcccggaaggggatgccacaaccatggggccccctgtgaccctggagagtgtcacctctctcaggaatgccacaaccatggggccccctgtgaccctggagagtgtcccctctgtcgggaatgccacatcctcctctgccggagaccagtctggaagcccaactgcctatggggttattgcagctgctgcggtgctcagtgcaagcctggtcaccgccaccctcctccttttgtcctggctccgagcccaggagcgcctccgcccactggggttactggtggccatgaaggagtccctgctgctgtcagaacagaagacctcgctgccctgaggacaagcacttgccaccaccgtcactcagccctgggcgtagccggacaggaggagagcagtgatgcggatgggtacccgggcacaccagccctcagagacctgagctcttctggccacgtggaacctcgaacccgagctcctgcagaagtggccctggagattgagggtccctggacactccctatggagatccggggagctaggatggggaacctgccacagccagaactgaggggctggccccaggcagctcccagggggtagaacggccctgtgcttaagacactcctgctgccccgtctgagggtggcgattaaagttgcttcacatcctc

SEQ ID NO: 431887 - DNA, 1259 bp, Homo sapiens
cggctggtcggccggaatttcgggattagagagcggtctggacagcgcgtggccggcgccgctgtggggacagcatgagcggcggttggatggcgcaggttggagcgtggcgaacaggggctctgggcctggcgctgctgctgctgctcggcctcggactaggcctggaggccgccgcgagcccgctttccaccccgacctctgcccaggccgcaggccccagctcaggctcgtgcccacccaccaagttccagtgccgcaccagtggcttatgcgtgcccctcacctggcgctgcgacagggacttggactgcagcgatggcagcgatgaggaggagtgcaggattgagccatgtacccagaaagggcaatgcccaccgccccctggcctcccctgcccctgcaccggcgtcagtgactgctctgggggaactgacaagaaactgcgcaactgcagccgcctggcctgcctagcaggcgagctccgttgcacgctgagcgatgactgcattccactcacgtggcgctgcgacggccacccagactgtcccgactccagcgacgagctcggctgtggaaccaatgagatcctcccggaaggggatgccacaaccatggggccccctgtgaccctggagagtgtcacctctctcaggaatgccacaaccatggggccccctgtgaccctggagagtgtcccctctgtcgggaatgccacatcctcctctgccggagaccagtctggaagcccaactgcctatggggttattgcagctgctgcggtgctcagtgcaagcctggtcaccgccaccctcctccttttgtcctggctccgagcccaggagcgcctccgcccactggggttactggtggccatgaaggagtccctgctgctgtcagaacagaagacctcgctgccctgaggacaagcacttgccaccaccgtcactcagccctgggcgtagccggacaggaggagagcagtgatgcggatgggtacccgggcacaccagccctcagagacctgagctcttctggccacgtggaacctcgaacccgagctcctgcagaagtggccctggagattgagggtccctggacactccctatggagatccggggagctaggatggggaacctgccacagccagaactgaggggctggccccaggcagctcccagggggtagaacggccctgtgcttaagacactcctgctgccccgtctgagggtggcgattaaagttgcttcacatcctc

SEQ ID NO: 431888 - DNA, 1036 bp, Homo sapiens
ggagcatttttttgggctcagctgttcttagagggtggggcttgcaggggatggggtttcagggagtacctgggccttcttgggtgggcatttgggacctgaccaaccctgtgccccagggattgagccatgtacccagaaagggcaatgcccaccgccccctggcctcccctgcccctgcaccggcgtcagtgactgctctgggggaactgacaagaaactgcgcaactgcagccgcctggcctgcctagcaggcgagctccgttgcacgctgagcgatgactgcattccactcacgtggcgctgcgacggccacccagactgtcccgactccagcgacgagctcggctgtggaaccaatgagatcctcccggaaggggatgccacaaccatggggccccctgtgaccctggagagtgtcacctctctcaggaatgccacaaccatggggccccctgtgaccctggagagtgtcccctctgtcgggaatgccacatcctcctctgccggagaccagtctggaagcccaactgcctatggggttattgcagctgctgcggtgctcagtgcaagcctggtcaccgccaccctcctccttttgtcctggctccgagcccaggagcgcctccgcccactggggttactggtggccatgaaggagtccctgctgctgtcagaacagaagacctcgctgccctgaggacaagcacttgccaccaccgtcactcagccctgggcgtagccggacaggaggagagcagtgatgcggatgggtacccgggcacaccagccctcagagacctgagctcttctggccacgtggaacctcgaacccgagctcctgcagaagtggccctggagattgagggtccctggacactccctatggagatccggggagctaggatggggaacctgccacagccagaactgaggggctggccccaggcagctcccagggggtagaacggccctgtgcttaagacactcctgctgccccgtctgagggtggcgattaaagttgcttcacatcctc

SEQ ID NO: 431889 - DNA, 3084 bp, Homo sapiens
agttggcgggaatggctgctcgcggaggggcagtgtacgcggggccgctgtaggctgtccagcgatggatcccaccgcgggaagcaagaaggagcctggaggaggcgcggcgactgaggagggcgtgaataggatcgcagtgccaaaaccgccctccattgaggaattcagcatagtgaagcccattagccggggcgccttcgggaaagtgtatctggggcagaaaggcggcaaattgtatgcagtaaaggttgttaaaaaagcagacatgatcaacaaaaatatgactcatcaggtccaagctgagagagatgcactggcactaagcaaaagcccattcattgtccatttgtattattcactgcagtctgcaaacaatgtctacttggtaatggaatatcttattgggggagatgtcaagtctctcctacatatatatggttattttgatgaagagatggctgtgaaatatatttctgaagtagcactggctctagactaccttcacagacatggaatcatccacagggacttgaaaccggacaatatgcttatttctaatgagggtcatattaaactgacggattttggcctttcaaaagttactttgaatagagatattaatatgatggatatccttacaacaccatcaatggcaaaacctagacaagattattcaagaaccccaggacaagtgttatcgcttatcagctcgttgggatttaacacaccaattgcagaaaaaaatcaagaccctgcaaacatcctttcagcctgtctgtctgaaacatcacagctttctcaaggactcgtatgccctatgtctgtagatcaaaaggacactacgccttattctagcaaattactaaaatcatgtcttgaaacagttgcctccaacccaggaatgcctgtgaagtgtctaacttctaatttactccagtctaggaaaaggctggccacatccagtgccagtagtcaatcccacaccttcatatccagtgtggaatcagaatgccacagcagtcccaaatgggaaaaagattgccaggaaagtgatgaagcattgggcccaacaatgatgagttggaatgcagttgaaaagttatgcgcaaaatctgcaaatgccattgagacgaaaggtttcaataaaaaggatctggagttagctctttctcccattcataacagcagtgcccttcccaccactggacgctcttgtgtaaaccttgctaaaaaatgcttctctggggaagtttcttgggaagcagtagaactggatgtaaataatataaatatggacactgacacaagtcagttaggtttccatcagtcaaatcagtgggctgtggattctggtgggatatctgaagagcaccttgggaaaagaagtttaaaaagaaattttgagttggttgactccagtccttgtaaaaaaattatacagaataaaaaaacttgtgtagagtataagcataacgaaatgacaaattgttatacaaatcaaaatacaggcttaacagttgaagtgcaggaccttaagctatcagtgcacaaaagtcaacaaaatgactgtgctaataaggagaacattgtcaattcttttactgataaacaacaaacaccagaaaaattacctataccaatgatagcaaaaaaccttatgtgtgaactcgatgaagactgtgaaaagaatagtaagagggactacttaagttctagttttctatgttctgatgatgatagagcttctaaaaatatttctatgaactctgattcatcttttcctggaatttctataatggaaagtccattagaaagtcagcccttagattcagatagaagcatcaaagaatcctcttttgaagaatcaaatattgaagatccacttattgtaacaccagattgccaagaaaagacctcaccaaaaggtgtcgagaaccctgctgtacaagagagtaaccaaaaaatgttaggtcctcctttggaggtgctgaaaacgttagcctctaaaagaaatgctgttgcttttcgaagttttaacagtcatattaatgcatccaataactcagaaccatccagaatgaacatgacttctttagatgcaatggatatttcgtgtgcctacagtggttcatatcccatggctataacccctactcaaaaaagaagatcctgtatgccacatcagaccccaaatcagatcaagtcgggaactccataccgaactccgaagagtgtgagaagaggggtggcccccgttgatgatgggcgaattctaggaaccccagactaccttgcacctgagctgttactaggcagggcccatggtcctgcggtagactggtgggcacttggagtttgcttgtttgaatttctaacaggaattccccctttcaatgatgaaacaccacaacaagtattccagaatattctgaaaagagatatcccttggccagaaggtgaagaaaagttatctgataatgctcaaagtgcagtagaaatacttttaaccattgatgatacaaagagagctggaatgaaagagctaaaacgtcatcctctcttcagtgatgtggactgggaaaatctgcagcatcagactatgcctttcatcccccagccagatgatgaaacagatacctcctattttgaagccaggaatactgctcagcacctgaccgtatctggatttagtctgtagcacaaaaattttccttttagtctagcctcgtgttatagaatgaacttgcataattatatactccttaatactagattgatctaagggggaaagatcattatttaacctagttcaatgtgcttttaatgtacgttacagctttcacagagttaaaaggctgaaaggaatatagtcagtaatttatcttaacctcaaaactgtatataaatcttcaaagcttttttcatctatttattttgtttattgcactttatgaaaactgaagcatcaataaaattagaggacactattgagagtgagccactagcttgattttctttctcctctgatttcagttcactgttcagtttagcattaaaataataaaataatcatacagttcc

SEQ ID NO: 431890 - DNA, 2989 bp, Homo sapiens
agttggcgggaatggctgctcgcggaggggcagtgtacgcggggccgctgtaggctgtccagcgatggatcccaccgcgggaagcaagaaggagcctggaggaggcgcggcgactgaggagggcgtgaataggatcgcagtgccaaaaccgccctccattgaggaattcagcatagtgaagcccattagccggggcgccttcgggaaagtgtatctggggcagaaaggcggcaaattgtatgcagtaaaggttgttaaaaaagcagacatgatcaacaaaaatatgactcatcaggtccaagctgagagagatgcactggcactaagcaaaagcccattcattgtccatttgtattattcactgcagtctgcaaacaatgtctacttggtaatggaatatcttattgggggagatgtcaagtctctcctacatatatatggttattttgatgaagagatggctgtgaaatatatttctgaagtagcactggctctagactaccttcacagacatggaatcatccacagggacttgaaaccggacaatatgcttatttctaatgagggtcatattaaactgacggattttggcctttcaaaagttactttgaatagagatattaatatgatggatatccttacaacaccatcaatggcaaaacctagacaagattattcaagaaccccaggacaagtgttatcgcttatcagctcgttgggatttaacacaccaattgcagaaaaaaatcaagaccctgcaaacatcctttcagcctgtctgtctgaaacatcacagctttctcaaggactcgtatgccctatgtctgtagatcaaaaggacactacgccttattctagcaaattactaaaatcatgtcttgaaacagttgcctccaacccaggaatgcctgtgaagtgtctaacttctaatttactccagtctaggaaaaggctggccacatccagtgccagtagtcaatcccacaccttcatatccagtgtggaatcagaatgccacagcagtcccaaatgggaaaaagattgccaggaaagtgatgaagcattgggcccaacaatgatgagttggaatgcagttgaaaagttatgcgcaaaatctgcaaatgccattgagacgaaaggtttcaataaaaaggatctggagttagctctttctcccattcataacagcagtgcccttcccaccactggacgctcttgtgtaaaccttgctaaaaaatgcttctctggggaagtttcttgggaagcagtagaactggatgtaaataatataaatatggacactgacacaagtcagttaggtttccatcagtcaaatcagtgggctgtggattctggtgggatatctgaagagcaccttgggaaaagaagtttaaaaagaaattttgagttggttgactccagtccttgtaaaaaaattatacagaataaaaaaacttgtgtagagtataagcataacgaaatgacaaattgttatacaaatcaaaatacaggcttaacagttgaagtgcaggaccttaagctatcagtgcacaaaagtcaacaaaatgactgtgctaataaggagaacattgtcaattcttttactgataaacaacaaacaccagaaaaattacctataccaatgatagcaaaaaaccttatgtgtgaactcgatgaagactgtgaaaagaatagtaagagggactacttaagttctagttttctatgttctgatgatgatagagcttctaaaaatatttctatgaactctgattcatcttttcctggaatttctataatggaaagtccattagaaagtcagcccttagattcagatagaagcatcaaagaatcctcttttgaagaatcaaatattgaagatccacttattgtaacaccagattgccaagaaaagacctcaccaaaaggtgtcgagaaccctgctgtacaagagagtaaccaaaaaatgttaggtcctcctttggaggtgctgaaaacgttagcctctaaaagaaatgctgttgcttttcgaagttttaacagtcatattaatgcatccaataactcagaaccatccagaatgaacatgacttctttagatgcaatggatatttcgtgtgcctacagtggttcatatcccatggctataacccctactcaaaaaagaagatcctgtatgccacatcagaccccaaatcagatcaagtcgggaactccataccgaactccgaagagtgtgagaagaggggtggcccccgttgatgatgggcgaattctaggaaccccagactaccttgcacctgagctgttactaggcagggcccatggtcctgcggtagactggtgggcacttggagtttgcttgtttgaatttctaacaggaattccccctttcaatgatgaaacaccacaacaagtattccagaatattctgaaaagagatatcccttggccagaaggtgaagaaaagttatctgataatgctcaaagtgcagtagaaatacttttaaccattgatgatacaaagagagctggaatgaaagagctaaaacgtcatcctctcttcagtgatgtggactgggaaaatctgcagcatcagactatgcctttcatcccccagccagatgatgaaacagatacctcctattttgaagccaggaatactgctcagcacctgaccgtatctggatttagtctgtagcacaaaaattttccttttagtctagcctcgtgttatagaatgaacttgcataattatatactccttaatactagattgatctaagggggaaagatcattatttaacctagttcaatgtgcttttaatgtacgttacagctttcacagagttaaaaggctgaaaggaatatagtcagtaatttatcttaacctcaaaactgtatataaatcttcaaagcttttttcatctatttattttgtttattgcactttatgaaaactgaagcatcaataaaattagaggacact

SEQ ID NO: 431891 - DNA, 2773 bp, Homo sapiens
agttggcgggaatggctgctcgcggaggggcagtgtacgcggggccgctgtaggctgtccagcgatggatcccaccgcgggaagcaagaaggagcctggaggaggcgcggcgactgaggagggcgtgaataggatcgcagtgccaaaaccgccctccattgaggaattcagcatagtgaagcccattagccggggcgccttcgggaaagtgtatctggggcagaaaggcggcaaattgtatgcagtaaaggttgttaaaaaagcagacatgatcaacaaaaatatgactcatcaggtccaagctgagagagatgcactggcactaagcaaaagcccattcattgtccatttgtattattcactgcagtctgcaaacaatgtctacttggtaatggaatatcttattgggggagatgtcaagtctctcctacatatatatggttattttgatgaagagatggctgtgaaatatatttctgaagtagcactggctctagactaccttcacagacatggaatcatccacagggacttgaaaccggacaatatgcttatttctaatgagggtcatattaaactgacggattttggcctttcaaaagttactttgaatagagatattaatatgatggatatccttacaacaccatcaatggcaaaacctagacaagattattcaagaaccccaggacaagtgttatcgcttatcagctcgttgggatttaacacaccaattgcagaaaaaaatcaagaccctgcaaacatcctttcagcctgtctgtctgaaacatcacagctttctcaaggactcgtatgccctatgtctgtagatcaaaaggacactacgccttattctagcaaattactaaaatcatgtcttgaaacagttgcctccaacccaggaatgcctgtgaagtgtctaacttctaatttactccagtctaggaaaaggctggccacatccagtgccagtagtcaatcccacaccttcatatccagtgtggaatcagaatgccacagcagtcccaaatgggaaaaagattgccaggaaagtgatgaagcattgggcccaacaatgatgagttggaatgcagttgaaaagttatgcgcaaaatctgcaaatgccattgagacgaaaggtttcaataaaaaggatctggagttagctctttctcccattcataacagcagtgcccttcccaccactggacgctcttgtgtaaaccttgctaaaaaatgcttctctggggaagtttcttgggaagcagtagaactggatgtaaataatataaatatggacactgacacaagtcagttaggtttccatcagtcaaatcagtgggctgtggattctggtgggatatctgaagagcaccttgggaaaagaagtttaaaaagaaattttgagttggttgactccagtccttgtaaaaaaattatacagaataaaaaaacttgtgtagagtataagcataacgaaatgacaaattgttatacaaatcaaaatacaggcttaacagttgaagtgcaggaccttaagctatcagtgcacaaaagtcaacaaaatgactgtgctaataaggagaacattgtcaattcttttactgataaacaacaaacaccagaaaaattacctataccaatgatagcaaaaaaccttatgtgtgaactcgatgaagactgtgaaaagaatagtaagagggactacttaagttctagttttctatgttctgatgatgatagagcttctaaaaatatttctatgaactctgattcatcttttcctggaatttctataatggaaagtccattagaaagtcagcccttagattcagatagaagcatcaaagaatcctcttttgaagaatcaaatattgaagatccacttattgtaacaccagattgccaagaaaagacctcaccaaaaggtgtcgagaaccctgctgtacaagagagtaaccaaaaaatgttaggtcctcctttggaggtgctgaaaacgttagcctctaaaagaaatgctgttgcttttcgaagttttaacagtcatattaatgcatccaataactcagaaccatccagaatgaacatgacttctttagatgcaatggatatttcgtgtgcctacagtggttcatatcccatggctataacccctactcaaaaaagaagatcctgtatgccacatcagaccccaaatcagatcaagtcgggaactccataccgaactccgaagagtgtgagaagaggggtggcccccgttgatgatgggcgaattctaggaaccccagactaccttgcacctgagctgttactaggcagggcccatgagctaaaacgtcatcctctcttcagtgatgtggactgggaaaatctgcagcatcagactatgcctttcatcccccagccagatgatgaaacagatacctcctattttgaagccaggaatactgctcagcacctgaccgtatctggatttagtctgtagcacaaaaattttccttttagtctagcctcgtgttatagaatgaacttgcataattatatactccttaatactagattgatctaagggggaaagatcattatttaacctagttcaatgtgcttttaatgtacgttacagctttcacagagttaaaaggctgaaaggaatatagtcagtaatttatcttaacctcaaaactgtatataaatcttcaaagcttttttcatctatttattttgtttattgcactttatgaaaactgaagcatcaataaaattagaggacact

SEQ ID NO: 431892 - DNA, 2405 bp, Homo sapiens
agttggcgggaatggctgctcgcggaggggcagtgtacgcggggccgctgtaggctgtccagcgatggatcccaccgcgggaagcaagaaggagcctggaggaggcgcggcgactgaggagggcgtgaataggatcgcagtgccaaaaccgccctccattgaggaattcagcatagtgaagcccattagccggggcgccttcgggaaagtgtatctggggcagaaaggcggcaaattgtatgcagtaaaggttgttaaaaaagcagacatgatcaacaaaaatatgactcatcaggtccaagctgagagagatgcactggcactaagcaaaagcccattcattgtccatttgtattattcactgcagtctgcaaacaatgtctacttggtaatggaatatcttattgggggagatgtcaagtctctcctacatatatatggttattttgatgaagagatggctgtgaaatatatttctgaagtagcactggctctagactaccttcacagacatggaatcatccacagggacttgaaaccggacaatatgcttatttctaatgagggtcatattaaactgacggattttggcctttcaaaagttactttgaatagagatattaatatgatggatatccttacaacaccatcaatggcaaaacctagacaagattattcaagaaccccaggacaagtgttatcgcttatcagctcgttgggatttaacacaccaattgcagaaaaaaatcaagaccctgcaaacatcctttcagcctgtctgtctgaaacatcacagctttctcaaggactcgtatgccctatgtctgtagatcaaaaggacactacgccttattctagcaaattactaaaatcatgtcttgaaacagttgcctccaacccaggaatgcctgtgaagtgtctaacttctaatttactccagtctaggaaaaggctggccacatccagtgccagtagtcaatcccacaccttcatatccagtgtggaatcagaatgccacagcagtcccaaatgggaaaaagattgccaggaaagtgatgaagcattgggcccaacaatgatgagttggaatgcagttgaaaagttatgcgcaaaatctgcaaatgccattgagacgaaaggtttcaataaaaaggatctggagttagctctttctcccattcataacagcagtgcccttcccaccactggacgctcttgtgtaaaccttgctaaaaaatgcttctctggggaagtttcttgggaagcagtagaactggatgtaaataatataaatatggacactgacacaagtcagttaggtttccatcagtcaaatcagtgggctgtggattctggtgggatatctgaagagcaccttgggaaaagaagtttaaaaagaaattttgagttggttgactccagtccttgtaaaaaaattatacagaataaaaaaacttgtgtagagtataagcataacgaaatgacaaattgttatacaaatcaaaatacaggcttaacagttgaagtgcaggaccttaagctatcagtgcacaaaagtcaacaaaatgactgtgctaataaggagaacattgtcaattcttttactgataaacaacaaacaccagaaaaattacctataccaatgatagcaaaaaaccttatgtgtgaactcgatgaagactgtgaaaagaatagtaagagggactacttaagttctagttttctatgttctgatgatgatagagcttctaaaaatatttctatgaactctgattcatcttttcctggaatttctataatggaaagtccattagaaagtcagcccttagattcagatagaagcatcaaagaatcctcttttgaagaatcaaatattgaagatccacttattgtaacaccagattgccaagaaaagacctcaccaaaaggtgtcgagaaccctgctgtacaagagagtaaccaaaaaatgttaggtcctcctttggaggtgctgaaaacgttagcctctaaaagaaatgctgttgcttttcgaagttttaacagtcatattaatgcatccaataactcagaaccatccagaattggcttccttttcgtagacttaagtgtgagaaattatagcagcatgaggttagggttgttgaaggtgccgtgccagatcagaatcatggaccacagaaggatgcaaaagaaattgtctaaatctgccctgaatatgggacaagtttgcatgaatatttctaatgagctcttggctgggaaggaattttcgtcctataaattccgataataatgggttcacatagtctttcataagaatgtattagatagcgttacattggtattgaaaacccttgagatttaagaatttaagtataagggggttgagtgttggagatgaccct

SEQ ID NO: 431893 - DNA, 1551 bp, Homo sapiens
agttggcgggaatggctgctcgcggaggggcagtgtacgcggggccgctgtaggctgtccagcgatggatcccaccgcgggaagcaagaaggagcctggaggaggcgcggcgactgaggagggcgtgaataggatcgcagtgccaaaaccgccctccattgaggaattcagcatagtgaagcccattagccggggcgccttcgggaaagtgtatctggggcagaaaggcggcaaattgtatgcagtaaaggttgttaaaaaagcagacatgatcaacaaaaatatgactcatcaggtccaagctgagagagatgcactggcactaagcaaaagcccattcattgtccatttgtattattcactgcagtctgcaaacaatgtctacttggtaatggaatatcttattgggggagatgtcaagtctctcctacatatatatggttattttgatgaagagatggctgtgaaatatatttctgaagtagcactggctctagactaccttcacagacatggaatcatccacagggacttgaaaccggacaatatgcttatttctaatgagggtcatattaaactgacggattttggcctttcaaaagttactttgaatagagatattaatatgatggatatccttacaacaccatcaatggcaaaacctagacaagattattcaagaaccccaggacaagtgttatcgcttatcagctcgttgggatttaacacaccaattgcagaaaaaaatcaagaccctgcaaacatcctttcagcctgtctgtctgaaacatcacagctttctcaaggactcgtatgccctatgtctgtagatcaaaaggacactacgccttattctagcaaattactaaaatcatgtcttgaaacagttgcctccaacccaggaatgcctgtgaagtgtctaacttctaatttactccagtctaggaaaaggctggccacatccagtgccagtagtcaatcccacaccttcatatccagtgtggaatcagaatgccacagcagtcccaaatgggaaaaagattgccaggtttgagggacatttatcttaatgaaaatcaattatgtatgtcaaatgaatgtgagaaatattataccttttcatataaattccataaagaaatgaaattgttacatgaatggcagtcatagtattaatcagaaattcattttcctgcacattctgtcaaattcttttgaaatatttcatttctcattcaattgtgacattgttcttacttgattatataatgagattcttgcagtaaattgataataaatgcttggcttctgtgtatctaggtggacctcacttgtttttagaagtccttcccatgatacagacattggcttgttggttttgttttattttgtttttaacctatgtcatttaaaaactcatattacctccttctatactgtttcctgtcagtttcttgtttaatggaatggtaactcttctggatcagaaataacttttagaccggaaaggtaacgtgggtgtgcccttaaagtgtctgttctgaggatatt

SEQ ID NO: 431894 - DNA, 721 bp, Homo sapiens
agaaagataggcttctaagttaaggcaaatcattcattctgtcattaaacaaatacaaaccaggcacctgtcatatgccaagtgatattcaaaatggcccatgtagacctttgtgaagtatgtggcctaacagacattaaacaaatgtctgtgaaactgacataataaagtaaggtaagttatatgtgagacattctctttttataataattcctgtaaagcagtacttacttaggtaatgatatcatactgttttgttttatatttttcctaagagctaaaacgtcatcctctcttcagtgatgtggactgggaaaatctgcagcatcagactatgcctttcatcccccagccagatgatgaaacagatacctcctattttgaagccaggaatactgctcagcacctgaccgtatctggatttagtctgtagcacaaaaattttccttttagtctagcctcgtgttatagaatgaacttgcataattatatactccttaatactagattgatctaagggggaaagatcattatttaacctagttcaatgtgcttttaatgtacgttacagctttcacagagttaaaaggctgaaaggaatatagtcagtaatttatcttaacctcaaaactgtatataaatcttcaaagcttttttcatctatttattttgtttattgcactttatgaaaactgaagcatcaataaaattagaggacact

SEQ ID NO: 431895 - DNA, 604 bp, Homo sapiens
gacactgccccccatcagggacaaaggtcacccctgggctggcccccatcctctattggggaccttgctcctccatgccctggggaggaagaagagaaataagggtgggtcattgactgggtgctcttggtactcctgcaagaatgtgtgatgagggagaagcagggacccatccaccccagcacaaacatgcttgcacttctctttcctcactaagggctctcagggtccacgtcaaggctccagcagtcgtccaccattgctccctacgtcacactccggaggggtctcaatgccgaaagcagcaaggcgaccttccctagacctaagagtgccttggagcgcctgtactcaggggatcaccagcgaggcaagatgagtgcagaggagcagctggagcgcatgaagcgacaccagaaggccctggtccgagagcgcaagaggacactgggccaaggggagaggacgggcctgccctcatctcgctacctcagccggccgctccctggagatcttggctcagtatgttaggaggggccaggcagcggggcagggacagggagccgagtgcccctcagagtcccccaaacacaagcacatcaca

SEQ ID NO: 431896 - DNA, 817 bp, Homo sapiens
ggaggatgtagactctgtccttgttcaggtccccaccttgctgaaggcgccagagctcgtgtagggccaatgagccggctcaggctgagcactgctgagtgggtagatgttactctccagcaggaagatgaagcacctcccaggcccccactccccgaactctacagcccagaggaccagcccccggctgtgccgcctctgccaagagaggccaccatcatccggcacacatctgtgcggggcctcaagcggcagtcagacgagaggaagcgagaccgggagctggggcagtgtgtgaatggggattccagggtggagctgcggtcgtatgtcagtgagcctgagctggcgaccctcagcggggacatggcccagccctccctaggacttgtgggccctgagagcaggtaccagacgctgccaggcagagggctctcagggtccacgtcaaggctccagcagtcgtccaccattgctccctacgtcacactccggaggggtctcaatgccgaaagcagcaaggcgaccttccctagacctaagagtgccttggagcgcctgtactcaggggatcaccagcgaggcaagatgagtgcagaggagcagctggagcgcatgaagcgacaccagaaggccctggtccgagagcgcaagaggacactgggccaaggggagaggacgggcctgccctcatctcgctacctcagccggccgctccctggagatcttggctcagtatgttaggaggggccaggcagcggggcagggacagggagccgagtgcccctcagagtcccccaaacacaagcacatcaca

SEQ ID NO: 431897 - DNA, 1458 bp, Homo sapiens
gccccgccctttcctgtcgtgacttaacgcacgcaagcggctccagggtacgtccccgccacgcgcgctcgcaggatcggtgcgtggtgacgtttcgccggcgcgggcgccatcccggaagcgcgagcaaggccgccagatgtgcaggcagcggaggaggagaaagagatggacctcccggactcggcctcgagggtcttctgcggccgcatcctgagcatggtgaacacagatgatgtcaacgccatcatcctggcccagaagaacatgctggaccgctttgagaagaccaatgagatgctgctcaacttcaacaacctgtccagtgcccgcctgcagcagatgagcgaacgcttcctgcaccacacgaggaccctagtagagatgaaacgggacctggacagcatcttccgccgtatcaggacgctgaaagggaaactggccaggcagcacccagaggccttcagccatatcccagaggcatccttcctggaggaagaggatgaagaccccatcccacccagcaccacgaccaccattgccacctcagaacagagcacgggctcatgtgacaccagccccgacaccgtctcgccctccctgagccccggcttcgaggacctgtcccatgtccaggctggctccccagccatcaacggccgcagccagacagatgacgaggagatgacgggcgaatagccctgctgcccggtgccttgagggggtctcagggcagcagcatacaaggtggcagcgggtaaccctgccttgttctgtcatccagggctcctttgctgccccgttctgtcacccagggctcctagggggacaaggctctctcccgaggggtgtggaattcctgggggggtctttaattctggctccttccttcctcagaacatctctattctgcaagacccctctgccatgccagggcacgcccattccagctggagtcgtggggctgggcacaggggaatttttccagagctgagcctgacgtctgctctgaagaatgcttagaaggttcccagacaccagagccagatgtcccccaccaccggtcaggacctccttgaggtgcacaagcacggtctcctctgagttcaccccagcccacccccgcacccactaattctgcttttcctgccccttgctccgtaaaagtatcaaatactttctccttggtatctcaaggaggtttctgagataggtagaagtcttgagacggaggctggccatccattcagccctgagcgtgctgagttctgtgtttctctgaatagaggtgtggaacctgaggggccagcaggcctctctgaaggcctccatggagcaaacggagccacctcgggaaagagtttaatggaatatttttgtacccgatgtttacagatgctgttgggaagttatcaataaaaagacaccattactaaaaagggaaaaaaaacctagttg

SEQ ID NO: 431898 - DNA, 2333 bp, Homo sapiens
gtggagactgggtgtctctgcatggcatgtcataggagttcaataaccatagttattattagagggaagggggttttgctgggtgtggcaccttatttctagaaggtgctgcaaaccactgaccagatacagatcacaaatagatgctcttggcctccatgatatcttggaaaaaagtattgattgctgacatttgtcaatgaggcaatttcccagaaaaaaaaaatccctgtttcctttttcctggagaaacatcagaagtcaggcagaaatcagctgctgtaagaagccactgtcctgtcacagctggatattgtgcacctgttcagattcacacctttgtgagacccgtgggctgtggccgtttgttgtgacttaggttcactggctgtgtgacagtggcccagtttctcagtgtccctgagcctcagttttctcatctataaataagaatcgcttgaacctgggaggcggaggttgcgctaagccaagatcgcgccattgcactccagcctgggtgacaggagtgaaactctgtatcaaaaagaaataaaaaaacgaggtcaagtagtaagagaagcggtaagagtgacgggaacaggagtcattgacctcttgggagaggagacattggaggtggtgatgatttgctgaagcagccacacacgttcagcttgtgaggacagcagttgttaggcaggggatgagggaggaagctggcagatctgtgcaggtgagaggtacctgtggccttgggctcatggaagtgggaggtgatgggattctaatgtgcttgggtacagtttacaaatacaacctctcttagtttgcccaatacctccaaattcctggggtggcacacctgaggttcaggtggcatgactgagccacagtcacacatccccactgtaggataccaccacggttgggttaggttccagcacatggcggtcccggcctggcctcttggtcccacctcacctggtgactagtgcagaccactctgttcttgcctgtttcaggcagcggaggaggagaaagagatggacctcccggactcggcctcgagggtcttctgcggccgcatcctgagcatggtgaacacagatgatgtcaacgccatcatcctggcccagaagaacatgctggaccgctttgagaagaccaatgagatgctgctcaacttcaacaacctgtccagtgcccgcctgcagcagatgagcgaacgcttcctgcaccacacgaggaccctagtagagatgaaacgggacctggacagcatcttccgccgtatcaggacgctgaaagggaaactggccaggcagcacccagaggccttcagccatatcccagaggcatccttcctggaggaagaggatgaagaccccatcccacccagcaccacgaccaccattgccacctcagaacagagcacgggctcatgtgacaccagccccgacaccgtctcgccctccctgagccccggcttcgaggacctgtcccatgtccaggctggctccccagccatcaacggccgcagccagacagatgacgaggagatgacgggcgaatagccctgctgcccggtgccttgagggggtctcagggcagcagcatacaaggtggcagcgggtaaccctgccttgttctgtcatccagggctcctttgctgccccgttctgtcacccagggctcctagggggacaaggctctctcccgaggggtgtggaattcctgggggggtctttaattctggctccttccttcctcagaacatctctattctgcaagacccctctgccatgccagggcacgcccattccagctggagtcgtggggctgggcacaggggaatttttccagagctgagcctgacgtctgctctgaagaatgcttagaaggttcccagacaccagagccagatgtcccccaccaccggtcaggacctccttgaggtgcacaagcacggtctcctctgagttcaccccagcccacccccgcacccactaattctgcttttcctgccccttgctccgtaaaagtatcaaatactttctccttggtatctcaaggaggtttctgagataggtagaagtcttgagacggaggctggccatccattcagccctgagcgtgctgagttctgtgtttctctgaatagaggtgtggaacctgaggggccagcaggcctctctgaaggcctccatggagcaaacggagccacctcgggaaagagtttaatggaatatttttgtacccgatgtttacagatgctgttgggaagttatcaataaaaagacaccattactaaaaagggaaaaaaaacctagttg

SEQ ID NO: 431899 - DNA, 1775 bp, Homo sapiens
ctctgcctcccaggttcaagccattctcctgcctcagccatccaagtagctgcgactacaggtgcccgccaccatgcccggctaattttttttgtatttttagtagagactgagtttcactatgttggccaggctggttttgaactcctgacctcaagcagtctgcccacctcggcctcccaaagtgctaggattacagacgtgagccaccacacccggcctctgaaaccctttctgatccagtagaagttcgtctctgtttcttggctattaaatgtgtgggcctcagagccaaactatatcaagatcctagatttttcctgaactccctaggagggtcagtgctgtagcccctcctaccctggctgctccgggaagtccctgcctgccattacggtcatctgtgtgccagcaaaactgggaacctcagaaccatctggattgctggggcccacaggttggctgcagcggaggaggagaaagagatggacctcccggactcggcctcgagggtcttctgcggccgcatcctgagcatggtgaacacagatgatgtcaacgccatcatcctggcccagaagaacatgctggaccgctttgagaagaccaatgagatgctgctcaacttcaacaacctgtccagtgcccgcctgcagcagatgagcgaacgcttcctgcaccacacgaggaccctagtagagatgaaacgggacctggacagcatcttccgccgtatcaggacgctgaaagggaaactggccaggcagcacccagaggccttcagccatatcccagaggcatccttcctggaggaagaggatgaagaccccatcccacccagcaccacgaccaccattgccacctcagaacagagcacgggctcatgtgacaccagccccgacaccgtctcgccctccctgagccccggcttcgaggacctgtcccatgtccaggctggctccccagccatcaacggccgcagccagacagatgacgaggagatgacgggcgaatagccctgctgcccggtgccttgagggggtctcagggcagcagcatacaaggtggcagcgggtaaccctgccttgttctgtcatccagggctcctttgctgccccgttctgtcacccagggctcctagggggacaaggctctctcccgaggggtgtggaattcctgggggggtctttaattctggctccttccttcctcagaacatctctattctgcaagacccctctgccatgccagggcacgcccattccagctggagtcgtggggctgggcacaggggaatttttccagagctgagcctgacgtctgctctgaagaatgcttagaaggttcccagacaccagagccagatgtcccccaccaccggtcaggacctccttgaggtgcacaagcacggtctcctctgagttcaccccagcccacccccgcacccactaattctgcttttcctgccccttgctccgtaaaagtatcaaatactttctccttggtatctcaaggaggtttctgagataggtagaagtcttgagacggaggctggccatccattcagccctgagcgtgctgagttctgtgtttctctgaatagaggtgtggaacctgaggggccagcaggcctctctgaaggcctccatggagcaaacggagccacctcgggaaagagtttaatggaatatttttgtacccgatgtttacagatgctgttgggaagttatcaataaaaagacaccattactaaaaagggaaaaaaaacctagttg

SEQ ID NO: 431900 - DNA, 1589 bp, Homo sapiens
gccccgccctttcctgtcgtgacttaacgcacgcaagcggctccagggtacgtccccgccacgcgcgctcgcaggatcggtgcgtggtgacgtttcgccggcgcgggcgccatcccggaagcgcgagcaaggccgccagatgtgcaggagggtcagtgctgtagcccctcctaccctggctgctccgggaagtccctgcctgccattacggtcatctgtgtgccagcaaaactgggaacctcagaaccatctggattgctggggcccacaggttggctgcagcggaggaggagaaagagatggacctcccggactcggcctcgagggtcttctgcggccgcatcctgagcatggtgaacacagatgatgtcaacgccatcatcctggcccagaagaacatgctggaccgctttgagaagaccaatgagatgctgctcaacttcaacaacctgtccagtgcccgcctgcagcagatgagcgaacgcttcctgcaccacacgaggaccctagtagagatgaaacgggacctggacagcatcttccgccgtatcaggacgctgaaagggaaactggccaggcagcacccagaggccttcagccatatcccagaggcatccttcctggaggaagaggatgaagaccccatcccacccagcaccacgaccaccattgccacctcagaacagagcacgggctcatgtgacaccagccccgacaccgtctcgccctccctgagccccggcttcgaggacctgtcccatgtccaggctggctccccagccatcaacggccgcagccagacagatgacgaggagatgacgggcgaatagccctgctgcccggtgccttgagggggtctcagggcagcagcatacaaggtggcagcgggtaaccctgccttgttctgtcatccagggctcctttgctgccccgttctgtcacccagggctcctagggggacaaggctctctcccgaggggtgtggaattcctgggggggtctttaattctggctccttccttcctcagaacatctctattctgcaagacccctctgccatgccagggcacgcccattccagctggagtcgtggggctgggcacaggggaatttttccagagctgagcctgacgtctgctctgaagaatgcttagaaggttcccagacaccagagccagatgtcccccaccaccggtcaggacctccttgaggtgcacaagcacggtctcctctgagttcaccccagcccacccccgcacccactaattctgcttttcctgccccttgctccgtaaaagtatcaaatactttctccttggtatctcaaggaggtttctgagataggtagaagtcttgagacggaggctggccatccattcagccctgagcgtgctgagttctgtgtttctctgaatagaggtgtggaacctgaggggccagcaggcctctctgaaggcctccatggagcaaacggagccacctcgggaaagagtttaatggaatatttttgtacccgatgtttacagatgctgttgggaagttatcaataaaaagacaccattactaaaaagggaaaaaaaacctagttg

SEQ ID NO: 431901 - DNA, 1799 bp, Homo sapiens
tcgactctaaggatcccccattgatgcccctgtgatcgtagggatggcgagggcgatgaggattagggtgatggcgggcaggataattcagacggtttctatttcctgagcgtctgagatgttggtattagttagtattcttgtgaggacagcagttgttaggcaggggatgagggaggaagctggcagatctgtgcaggtgagaggtacctgtggccttgggctcatggaagtgggaggtgatgggattctaatgtgcttgggtacagtttacaaatacaacctctcttagtttgcccaatacctccaaattcctggggtggcacacctgaggttcaggtggcatgactgagccacagtcacacatccccactgtaggataccaccacggttgggttaggttccagcacatggcggtcccggcctggcctcttggtcccacctcacctggtgactagtgcagaccactctgttcttgcctgtttcaggcagcggaggaggagaaagagatggacctcccggactcggcctcgagggtcttctgcggccgcatcctgagcatggtgaacacagatgatgtcaacgccatcatcctggcccagaagaacatgctggaccgctttgagaagaccaatgagatgctgctcaacttcaacaacctgtccagtgcccgcctgcagcagatgagcgaacgcttcctgcaccacacgaggaccctagtagagatgaaacgggacctggacagcatcttccgccgtatcaggacgctgaaagggaaactggccaggcagcacccagaggccttcagccatatcccagaggcatccttcctggaggaagaggatgaagaccccatcccacccagcaccacgaccaccattgccacctcagaacagagcacgggctcatgtgacaccagccccgacaccgtctcgccctccctgagccccggcttcgaggacctgtcccatgtccaggctggctccccagccatcaacggccgcagccagacagatgacgaggagatgacgggcgaatagccctgctgcccggtgccttgagggggtctcagggcagcagcatacaaggtggcagcgggtaaccctgccttgttctgtcatccagggctcctttgctgccccgttctgtcacccagggctcctagggggacaaggctctctcccgaggggtgtggaattcctgggggggtctttaattctggctccttccttcctcagaacatctctattctgcaagacccctctgccatgccagggcacgcccattccagctggagtcgtggggctgggcacaggggaatttttccagagctgagcctgacgtctgctctgaagaatgcttagaaggttcccagacaccagagccagatgtcccccaccaccggtcaggacctccttgaggtgcacaagcacggtctcctctgagttcaccccagcccacccccgcacccactaattctgcttttcctgccccttgctccgtaaaagtatcaaatactttctccttggtatctcaaggaggtttctgagataggtagaagtcttgagacggaggctggccatccattcagccctgagcgtgctgagttctgtgtttctctgaatagaggtgtggaacctgaggggccagcaggcctctctgaaggcctccatggagcaaacggagccacctcgggaaagagtttaatggaatatttttgtacccgatgtttacagatgctgttgggaagttatcaataaaaagacaccattactaaaaagggaaaaaaaacctagttg

SEQ ID NO: 431902 - DNA, 2092 bp, Homo sapiens
ctgtgagtttcggcaacggagcccgcccctgtgagcctcagtttcactcggagatgattgtgtctgcctcgtaacggtgattgaggatgaaatgaagtgctctacaagtgtttgcccgtaatatattcttagaggcccctgggatgctctcaaaatgttgattcccgggacttcttcacactcctcttggagaaacagcctgtcctgagctccagtcgttatcacctttggtttcagttgccacagacagcactgtgagatcttcattctaccttattttcattttatggttgaaaaaactgattcagaagggtgaagtggctctcccatggtcaaacagcctacctctctgcgtttcttcaataaatctacatttggagttgggatcagagctcttgctgggtcaatttcactgtgtatgtgggccagactagcagtaatcagggaaggcttcttgggagaggaagttgcggggggacgggagggaggtgccaggaacccctcagccctcacatctgggagccagagacagaaaagagtcctgttttgaaggaggagtgtatcccagaaggtcccagtactgtgtctcactggtactagctatgggcctcccatctccaggtgtctttttttttttttttttttttttttcagttgagatgaagtctccctctgtagcccacactagaatgcagtggcttgattttggctcattgcaacctccgcctcccgggttcaagcgattctcctgcctcagcctcctgagtagctgggactacaggcagcggaggaggagaaagagatggacctcccggactcggcctcgagggtcttctgcggccgcatcctgagcatggtgaacacagatgatgtcaacgccatcatcctggcccagaagaacatgctggaccgctttgagaagaccaatgagatgctgctcaacttcaacaacctgtccagtgcccgcctgcagcagatgagcgaacgcttcctgcaccacacgaggaccctagtagagatgaaacgggacctggacagcatcttccgccgtatcaggacgctgaaagggaaactggccaggcagcacccagaggccttcagccatatcccagaggcatccttcctggaggaagaggatgaagaccccatcccacccagcaccacgaccaccattgccacctcagaacagagcacgggctcatgtgacaccagccccgacaccgtctcgccctccctgagccccggcttcgaggacctgtcccatgtccaggctggctccccagccatcaacggccgcagccagacagatgacgaggagatgacgggcgaatagccctgctgcccggtgccttgagggggtctcagggcagcagcatacaaggtggcagcgggtaaccctgccttgttctgtcatccagggctcctttgctgccccgttctgtcacccagggctcctagggggacaaggctctctcccgaggggtgtggaattcctgggggggtctttaattctggctccttccttcctcagaacatctctattctgcaagacccctctgccatgccagggcacgcccattccagctggagtcgtggggctgggcacaggggaatttttccagagctgagcctgacgtctgctctgaagaatgcttagaaggttcccagacaccagagccagatgtcccccaccaccggtcaggacctccttgaggtgcacaagcacggtctcctctgagttcaccccagcccacccccgcacccactaattctgcttttcctgccccttgctccgtaaaagtatcaaatactttctccttggtatctcaaggaggtttctgagataggtagaagtcttgagacggaggctggccatccattcagccctgagcgtgctgagttctgtgtttctctgaatagaggtgtggaacctgaggggccagcaggcctctctgaaggcctccatggagcaaacggagccacctcgggaaagagtttaatggaatatttttgtacccgatgtttacagatgctgttgggaagttatcaataaaaagacaccattactaaaaagggaaaaaaaacctagttg

SEQ ID NO: 431903 - DNA, 1373 bp, Homo sapiens
cgctagtgagggcgcgggttaatcggcgaggcggaaccgcgagcataggcgcagatgtgcaggcagcggaggaggagaaagagatggacctcccggactcggcctcgagggtcttctgcggccgcatcctgagcatggtgaacacagatgatgtcaacgccatcatcctggcccagaagaacatgctggaccgctttgagaagaccaatgagatgctgctcaacttcaacaacctgtccagtgcccgcctgcagcagatgagcgaacgcttcctgcaccacacgaggaccctagtagagatgaaacgggacctggacagcatcttccgccgtatcaggacgctgaaagggaaactggccaggcagcacccagaggccttcagccatatcccagaggcatccttcctggaggaagaggatgaagaccccatcccacccagcaccacgaccaccattgccacctcagaacagagcacgggctcatgtgacaccagccccgacaccgtctcgccctccctgagccccggcttcgaggacctgtcccatgtccaggctggctccccagccatcaacggccgcagccagacagatgacgaggagatgacgggcgaatagccctgctgcccggtgccttgagggggtctcagggcagcagcatacaaggtggcagcgggtaaccctgccttgttctgtcatccagggctcctttgctgccccgttctgtcacccagggctcctagggggacaaggctctctcccgaggggtgtggaattcctgggggggtctttaattctggctccttccttcctcagaacatctctattctgcaagacccctctgccatgccagggcacgcccattccagctggagtcgtggggctgggcacaggggaatttttccagagctgagcctgacgtctgctctgaagaatgcttagaaggttcccagacaccagagccagatgtcccccaccaccggtcaggacctccttgaggtgcacaagcacggtctcctctgagttcaccccagcccacccccgcacccactaattctgcttttcctgccccttgctccgtaaaagtatcaaatactttctccttggtatctcaaggaggtttctgagataggtagaagtcttgagacggaggctggccatccattcagccctgagcgtgctgagttctgtgtttctctgaatagaggtgtggaacctgaggggccagcaggcctctctgaaggcctccatggagcaaacggagccacctcgggaaagagtttaatggaatatttttgtacccgatgtttacagatgctgttgggaagttatcaataaaaagacaccattactaaaaagggaaaaaaaacctagttg

SEQ ID NO: 431904 - DNA, 1426 bp, Homo sapiens
aaacaataggctaggtacgtggccgtgatggttaatcagacacgatggaccggacgcgggcgccatcccggaagcgcgagcaaggcctgccagactgtgcagtgcatgctggatggcagcggaggaggagaaagagatggacctcccggactcggcctcgagggtcttctgcggccgcatcctgagcatggtgaacacagatgatgtcaacgccatcatcctggcccagaagaacatgctggaccgctttgagaagaccaatgagatgctgctcaacttcaacaacctgtccagtgcccgcctgcagcagatgagcgaacgcttcctgcaccacacgaggaccctagtagagatgaaacgggacctggacagcatcttccgccgtatcaggacgctgaaagggaaactggccaggcagcacccagaggccttcagccatatcccagaggcatccttcctggaggaagaggatgaagaccccatcccacccagcaccacgaccaccattgccacctcagaacagagcacgggctcatgtgacaccagccccgacaccgtctcgccctccctgagccccggcttcgaggacctgtcccatgtccaggctggctccccagccatcaacggccgcagccagacagatgacgaggagatgacgggcgaatagccctgctgcccggtgccttgagggggtctcagggcagcagcatacaaggtggcagcgggtaaccctgccttgttctgtcatccagggctcctttgctgccccgttctgtcacccagggctcctagggggacaaggctctctcccgaggggtgtggaattcctgggggggtctttaattctggctccttccttcctcagaacatctctattctgcaagacccctctgccatgccagggcacgcccattccagctggagtcgtggggctgggcacaggggaatttttccagagctgagcctgacgtctgctctgaagaatgcttagaaggttcccagacaccagagccagatgtcccccaccaccggtcaggacctccttgaggtgcacaagcacggtctcctctgagttcaccccagcccacccccgcacccactaattctgcttttcctgccccttgctccgtaaaagtatcaaatactttctccttggtatctcaaggaggtttctgagataggtagaagtcttgagacggaggctggccatccattcagccctgagcgtgctgagttctgtgtttctctgaatagaggtgtggaacctgaggggccagcaggcctctctgaaggcctccatggagcaaacggagccacctcgggaaagagtttaatggaatatttttgtacccgatgtttacagatgctgttgggaagttatcaataaaaagacaccattactaaaaagggaaaaaaaacctagttg

SEQ ID NO: 431905 - DNA, 1493 bp, Homo sapiens
gccccgccctttcctgtcgtgacttaacgcacgcaagcggctccagggtacgtccccgccacgcgcgctcgcaggatcggtgcgtggtgacgtttcgccggcgcgggcgccatcccggaagcgcgagcaaggccgccagatgtgcaggtgccgccgctaccgacgccggggccgagtttggggcagcggaggaggagaaagagatggacctcccggactcggcctcgagggtcttctgcggccgcatcctgagcatggtgaacacagatgatgtcaacgccatcatcctggcccagaagaacatgctggaccgctttgagaagaccaatgagatgctgctcaacttcaacaacctgtccagtgcccgcctgcagcagatgagcgaacgcttcctgcaccacacgaggaccctagtagagatgaaacgggacctggacagcatcttccgccgtatcaggacgctgaaagggaaactggccaggcagcacccagaggccttcagccatatcccagaggcatccttcctggaggaagaggatgaagaccccatcccacccagcaccacgaccaccattgccacctcagaacagagcacgggctcatgtgacaccagccccgacaccgtctcgccctccctgagccccggcttcgaggacctgtcccatgtccaggctggctccccagccatcaacggccgcagccagacagatgacgaggagatgacgggcgaatagccctgctgcccggtgccttgagggggtctcagggcagcagcatacaaggtggcagcgggtaaccctgccttgttctgtcatccagggctcctttgctgccccgttctgtcacccagggctcctagggggacaaggctctctcccgaggggtgtggaattcctgggggggtctttaattctggctccttccttcctcagaacatctctattctgcaagacccctctgccatgccagggcacgcccattccagctggagtcgtggggctgggcacaggggaatttttccagagctgagcctgacgtctgctctgaagaatgcttagaaggttcccagacaccagagccagatgtcccccaccaccggtcaggacctccttgaggtgcacaagcacggtctcctctgagttcaccccagcccacccccgcacccactaattctgcttttcctgccccttgctccgtaaaagtatcaaatactttctccttggtatctcaaggaggtttctgagataggtagaagtcttgagacggaggctggccatccattcagccctgagcgtgctgagttctgtgtttctctgaatagaggtgtggaacctgaggggccagcaggcctctctgaaggcctccatggagcaaacggagccacctcgggaaagagtttaatggaatatttttgtacccgatgtttacagatgctgttgggaagttatcaataaaaagacaccattactaaaaagggaaaaaaaacctagttg

SEQ ID NO: 431906 - DNA, 1318 bp, Homo sapiens
gccccgccctttcctgtcgtgacttaacgcacgcaagcggctccagggtacgtccccgccacgcgcgctcgcaggatcggtgcgtggtgacgtttcgccggcgcgggcgccatcccggaagcgcgagcaaggccgccagatgtgcaggcagcggaggaggagaaagagatggacctcccggactcggcctcgagggtcttctgcggccgcatcctgagcatggtgaacacagatgatgtcaacgccatcatcctggcccagaagaacatgctggaccgctttgagaagaccaatgagatgctgctcaacttcaacaacctgtccagtgcccgcctgcagcagatgagcgaacgcttcctgcaccacacgaggaccctagtagagatgaaacgggacctggacagcatcttccgccgtatcaggacgctgaaagggaaactggccaggcagcacccagaggccttcagccatatcccagaggcatccttcctggaggaagaggatgaagaccccatcccacccagcaccacgaccaccattgccacctcagaacagagcacgggctcatgtgacaccagccccgacaccgtctcgccctccctgagccccggcttcgaggacctgtcccatgtccaggctggctccccagccatcaacggccgcagccagacagatgacgaggagatgacgggcgaatagccctgctgcccggtgccttgagggggtctcagggcagcagcatacaaggtggcagcggaacatctctattctgcaagacccctctgccatgccagggcacgcccattccagctggagtcgtggggctgggcacaggggaatttttccagagctgagcctgacgtctgctctgaagaatgcttagaaggttcccagacaccagagccagatgtcccccaccaccggtcaggacctccttgaggtgcacaagcacggtctcctctgagttcaccccagcccacccccgcacccactaattctgcttttcctgccccttgctccgtaaaagtatcaaatactttctccttggtatctcaaggaggtttctgagataggtagaagtcttgagacggaggctggccatccattcagccctgagcgtgctgagttctgtgtttctctgaatagaggtgtggaacctgaggggccagcaggcctctctgaaggcctccatggagcaaacggagccacctcgggaaagagtttaatggaatatttttgtacccgatgtttacagatgctgttgggaagttatcaataaaaagacaccattactaaaaagggaaaaaaaacctagttg

SEQ ID NO: 431907 - DNA, 1295 bp, Homo sapiens
gccccgccctttcctgtcgtgacttaacgcacgcaagcggctccagggtacgtccccgccacgcgcgctcgcaggatcggtgcgtggtgacgtttcgccggcgcgggcgccatcccggaagcgcgagcaaggccgccagatgtgcaggcagcggaggaggagaaagagatggacctcccggactcggcctcgagggtcttctgcggccgcatcctgagcatggtgaacacagatgatgtcaacgccatcatcctggcccagaagaacatgctggaccgctttgagaagaccaatgagatgctgctcaacttcaacaacctgtccagtgcccgcctgcagcagatgagcgaacgcttcctgcaccacacgaggaccctagtagagatgaaacgggacctggacagcatcttccgccgtatcaggacgctgaaagggaaactggccaggcagcacccagaggccttcagccatatcccagaggcatccttcctggaggaagaggatgaagaccccatcccacccagcaccacgaccaccattgccacctcagaacagagcacgggctcatgtgacaccagccccgacaccgtctcgccctccctgagccccggcttcgaggacctgtcccatgtccaggctggctccccagccatcaacggccgcagccagacagatgacgaggagatgacgggcgaatagccctgctgcccggtgccttgagggggtctcagggcagcagcatacaaggtggcagcgggtaaccctgccttgttctgtcatccagggctcctttgctgccccgttctgtcacccagggctcctagggggacaaggctctctcccgaggggtgtggaattcctgggggggtctttaattctggctccttccttcctcagaacatctctattctgcaagacccctctgccatgccagggcacgcccattccagctggagtcgtggggctgggcacaggggaatttttccagagctgagcctgacgtctgctctgaagaatgcttagaaggttcccagacaccagagccagatgtcccccaccaccggtcaggacctccttgaggtgcacaagcacggtctcctctgagttcaccccagcccaccccgtcgggtggagcgctccacccgacggggtgggagatgatgcgcttgagcctgcgctcctgcaccccaggggcgctgcgctggctctggtcgtgcaagcccaggaaggccgtccactgcgtggggtctgagtaactgaatcctctgtcatcgatgtagcagtgtgcggcagag

SEQ ID NO: 431908 - DNA, 1117 bp, Homo sapiens
  misc_feature (1074)..(1074): n is a, c, g, or t
  misc_feature (1083)..(1083): n is a, c, g, or t
  misc_feature (1106)..(1106): n is a, c, g, or t
gccccgccctttcctgtcgtgacttaacgcacgcaagcggctccagggtacgtccccgccacgcgcgctcgcaggatcggtgcgtggtgacgtttcgccggcgcgggcgccatcccggaagcgcgagcaaggccgccagatgtgcaggcagcggaggaggagaaagagatggacctcccggactcggcctcgagggtcttctgcggccgcatcctgagcatggtgaacacagatgatgtcaacgccatcatcctggcccagaagaacatgctggaccgctttgagaagaccaatgagatgctgctcaacttcaacaacctgtccagtgcccgcctgcagcagatgagcgaacgcttcctgcaccacacgaggaccctagtagagatgaaacgggacctggacagcatcttccgccgtatcaggacgctgaaagggaaactggccaggcagcacccagaggccttcagccatatcccagaggcatccttcctggaggaagaggatgaagaccccatcccacccagcaccacgaccaccattgccacctcagaacagagcacgggctcatgtgacaccagccccgacaccgtctcgccctccctgagccccggcttcgaggacctgtcccatgtccaggctggctccccagccatcaacggccgcagccagacagatgacgaggagatgacgggcgaatagccctgctgcccggtgccttgagggggtctcagggcagcagcatacaaggtggcagcgggtaaccctgccttgttctgtcatccagggctcctttgctgccccgttctgtcacccagggctcctagggggacaaggctctctcccgaggggtgtggaattcctgggggggtctttaattctggctccttccttcctcagaacatctctattctgcaagacccctctgccatgccagggcacgcccattccagctggagtcgtggggctgggcacaggggaatttttccagagctgagcctgacgtctgctctgaagaatgcttagaaggttcccagacaccagagccagatgtcccccaccgtcagcaaccccatncgttcttgnccccgcgcccacaaacgggtacnctgagctcgaa

SEQ ID NO: 431909 - DNA, 1233 bp, Homo sapiens
gccccgccctttcctgtcgtgacttaacgcacgcaagcggctccagggtacgtccccgccacgcgcgctcgcaggatcggtgcgtggtgacgtttcgccggcgcgggcgccatcccggaagcgcgagcaaggccgccagatgtgcaggcagcggaggaggagaaagagatggacctcccggactcggcctcgagggtcttctgcggccgcatcctgagcatggtgaacacagatgatgtcaacgccatcatcctggcccagaagaacatgctggaccgctttgagaagaccaatgagatgctgctcaacttcaacaacctgtccagtgcccgcctgcagcagatgagcgaacgcttcctgcaccacacgaggaccctagtagagatgaaacgggacctggacagcatcttccgccgtatcaggacgctgaaagggaaactggccaggcagcacccagaggccttcagccatatcccagaggcatccttcctggaggaagaggatgaagaccccatcccacccagcaccacgaccaccattgccacctcagaacagagcacgggctcatgtgacaccagccccgacaccgtctcgccctccctgagccccggcttcgaggacctgtcccatgtccaggctggctccccagccatcaacggccgcagccagacagatgacgaggagatgacgggcgaatagccctgctgcccggtgccttgagggggtctcagggcagcagcatacaaggtggcagcgggtaaccctgccttgttctgtcatccagggctcctttgctgccccgttctgtcacccagggctcctagggggacaaggctctctcccgaggggtgtggagtgcacaagcacggtctcctctgagttcaccccagcccacccccgcacccactaattctgcttttcctgccccttgctccgtaaaagtatcaaatactttctccttggtatctcaaggaggtttctgagataggtagaagtcttgagacggaggctggccatccattcagccctgagcgtgctgagttctgtgtttctctgaatagaggtgtggaacctgaggggccagcaggcctctctgaaggcctccatggagcaaacggagccacctcgggaaagagtttaatggaatatttttgtacccgatgtttacagatgctgttgggaagttatcaataaaaagacaccattactaaaaagggaaaaaaaacctagttg

SEQ ID NO: 431910 - DNA, 1164 bp, Homo sapiens
gccccgccctttcctgtcgtgacttaacgcacgcaagcggctccagggtacgtccccgccacgcgcgctcgcaggatcggtgcgtggtgacgtttcgccggcgcgggcgccatcccggaagcgcgagcaaggccgccagatgtgcaggcagcggaggaggagaaagagatggacctcccggactcggcctcgagggtcttctgcggccgcatcctgagcatggtgaacacagatgatgtcaacgccatcatcctggcccagaagaacatgctggaccgctttgagaagaccaatgagatgctgctcaacttcaacaacctgtccagtgcccgcctgcagcagatgagcgaacgcttcctgcaccacacgaggaccctagtagagatgaaacgggacctggacagcatcttccgccgtatcaggacgctgaaagggaaactggccaggcagcacccagaggccttcagccatatcccagaggcatccttcctggaggaagaggatgaagaccccatcccacccagcaccacgaccaccattgccacctcagaacagagcacgggctcatgtgacaccagccccgacaccgtctcgccctccctgagccccggcttcgaggacctgtcccatgtccaggctggctccccagccatcaacggccgcagccagacagatgacgaggagatgacgggcgaatagccctgctgcccggtgccttgagggggtctcagggcagcagcatacaaggtggcagcgggtaaccctgccttgttctgtcatccagggctcctttgctgccccgttctgtcacccaggcccagcccacccccgcacccactaattctgcttttcctgccccttgctccgtaaaagtatcaaatactttctccttggtatctcaaggaggtttctgagataggtagaagtcttgagacggaggctggccatccattcagccctgagcgtgctgagttctgtgtttctctgaatagaggtgtggaacctgaggggccagcaggcctctctgaaggcctccatggagcaaacggagccacctcgggaaagagtttaatggaatatttttgtacccgatgtttacagatgctgttgggaagttatcaataaaaagacaccattactaaaaagggaaaaaaaacctagttg

SEQ ID NO: 431911 - DNA, 1021 bp, Homo sapiens
gccccgccctttcctgtcgtgacttaacgcacgcaagcggctccagggtacgtccccgccacgcgcgctcgcaggatcggtgcgtggtgacgtttcgccggcgcgggcgccatcccggaagcgcgagcaaggccgccagatgtgcaggcagcggaggaggagaaagagatggacctcccggactcggcctcgagggtcttctgcggccgcatcctgagcatggtgaacacagatgatgtcaacgccatcatcctggcccagaagaacatgctggaccgctttgagaagaccaatgagatgctgctcaacttcaacaacctgtccagtgcccgcctgcagcagatgagcgaacgcttcctgcaccacacgaggaccctagtagagatgaaacgggacctggacagcatcttccgccgtatcaggacgctgaaagggaaactggccaggcagcacccagaggccttcagccatatcccagaggcatccttcctggaggaagaggatgaagaccccatcccacccagcaccacgaccaccattgccacctcagaacagagcacgggctcatgtgacaccagccccgacaccgtctcgccctccctgagccccggcttcgaggacctgtcccatgtccaggctggctccccagccatcaacggccgcagccagacagatgacgaggagatgacgggcgaatagccctgctgcccggtgccttgagggggtctcagggcagcagcatacaaggtggcagcgggtaaccctgccttgttctgtcatccagggctcctttgctgccccgttctgtcacccagggctcctagggggacaaggctctctcccgaggggtgtggaggaacctgaggggccagcaggcctctctgaaggcctccatggagcaaacggagccacctcgggaaagagtttaatggaatatttttgtacccgatgtttacagatgctgttgggaagttatcaataaaaagacaccattactaaaaagggaaaaaaaacctagttg

SEQ ID NO: 431912 - DNA, 1155 bp, Homo sapiens
gccccgccctttcctgtcgtgacttaacgcacgcaagcggctccagggtacgtccccgccacgcgcgctcgcaggatcggtgcgtggtgacgtttcgccggcgcgggcgccatcccggaagcgcgagcaaggccgccagatgtgcaggcagcggaggaggagaaagagatggacctcccggactcggcctcgagggtcttctgcggccgcatcctgagcatggtgaacacagatgatgtcaacgccatcatcctggcccagaagaacatgctggaccgctttgagaagaccaatgagatgctgctcaacttcaacaacctgtccagtgcccgcctgcagcagatgagcgaacgcttcctgcaccacacgaggaccctagtagagatgaaacgggacctggacagcatcttccgccgtatcaggacgctgaaagggaaactggccaggcagcacccagaggccttcagccatatcccagaggcatccttcctggaggaagaggatgaagaccccatcccacccagcaccacgaccaccattgccacctcagaacagagcacgggctcatgtgacaccagccccgacaccgtctcgccctccctgagccccggcttcgaggacctgtcccatgtccaggctggctccccagccatcaacggccgcagccagacagatgacgaggagatgacgggcgaatagccctgctgcccggtgccttgagggggtctcagggcagcagcatacaaggtggcagcggaacatctctattctgcaagacccctctgccatgccagggcacgcccattccagctggagtcgtggggctgggcacaggggaatttttccagagctgagcctgacgtctgctctgaagaatgcttagaaggttcccagacaccagagccagatgtcccccaccaccggtcaggacctccttgaggtgcacaagcacggtctcctctgagttcaccccagcccaccccgtcgggtggagcgctccacccgacggggtgggagatgatgcgcttgagcctgcgctcctgcaccccaggggcgctgcgctggctctggtcgtgcaagcccaggaaggccgtccactgcgtggggtctgagtaactgaatcctctgtcatcgatgtagcagtgtgcggcagag

SEQ ID NO: 431913 - DNA, 2376 bp, Homo sapiens
gtggagactgggtgtctctgcatggcatgtcataggagttcaataaccatagttattattagagggaagggggttttgctgggtgtggcaccttatttctagaaggtgctgcaaaccactgaccagatacagatcacaaatagatgctcttggcctccatgatatcttggaaaaaagtattgattgctgacatttgtcaatgaggcaatttcccagaaaaaaaaaatccctgtttcctttttcctggagaaacatcagaagtcaggcagaaatcagctgctgtaagaagccactgtcctgtcacagctggatattgtgcacctgttcagattcacacctttgtgagacccgtgggctgtggccgtttgttgtgacttaggttcactggctgtgtgacagtggcccagtttctcagtgtccctgagcctcagttttctcatctataaataagaatcgcttgaacctgggaggcggaggttgcgctaagccaagatcgcgccattgcactccagcctgggtgacaggagtgaaactctgtatcaaaaagaaataaaaaaacgaggtcaagtagtaagagaagcggtaagagtgacgggaacaggagtcattgacctcttgggagaggagacattggaggtggtgatgatttgctgaagcagccacacacgttcagcttgtgaggacagcagttgttaggcaggggatgagggaggaagctggcagatctgtgcaggtgagaggtacctgtggccttgggctcatggaagtgggaggtgatgggattctaatgtgcttgggtacagtttacaaatacaacctctcttagtttgcccaatacctccaaattcctggggtggcacacctgaggttcaggtggcatgactgagccacagtcacacatccccactgtaggataccaccacggttgggttaggttccagcacatggcggtcccggcctggcctcttggtcccacctcacctggtgactagtgcagaccactctgttcttgcctgtttcaggcagcggaggaggagaaagagatggacctcccggactcggcctcgagggtcttctgcggccgcatcctgagcatggtgaacacagatgatgtcaacgccatcatcctggcccagaagaacatgctggaccgctttgagaagaccaatgagatgctgctcaacttcaacaacctgtccagtgcccgcctgcagcagatgagcgaacgcttcctgcaccacacgaggaccctagtagagatgaaacgggacctggacagcatcttccgccgtatcaggacgctgaaagggaaactggccaggcagcacccagaggccttcagccatatcccagaggcatccttcctggaggaagaggatgaagacccctctgccatgccagggcacgcccattccagctggagtcgtggggctgggcacaggggaatttttccagagctgagcctgacgtctgctctgaagaatgcttagaaggttccccgacaccgtctcgccctccctgagccccggcttcgaggacctgtcccatgtccaggctggctccccagccatcaacggccgcagccagacagatgacgaggagatgacgggcgaatagccctgctgcccggtgccttgagggggtctcagggcagcagcatacaaggtggcagcgggtaaccctgccttgttctgtcatccagggctcctttgctgccccgttctgtcacccagggctcctagggggacaaggctctctcccgaggggtgtggaattcctgggggggtctttaattctggctccttccttcctcagaacatctctattctgcaagacccctctgccatgccagggcacgcccattccagctggagtcgtggggctgggcacaggggaatttttccagagctgagcctgacgtctgctctgaagaatgcttagaaggttcccagacaccagagccagatgtcccccaccaccggtcaggacctccttgaggtgcacaagcacggtctcctctgagttcaccccagcccacccccgcacccactaattctgcttttcctgccccttgctccgtaaaagtatcaaatactttctccttggtatctcaaggaggtttctgagataggtagaagtcttgagacggaggctggccatccattcagccctgagcgtgctgagttctgtgtttctctgaatagaggtgtggaacctgaggggccagcaggcctctctgaaggcctccatggagcaaacggagccacctcgggaaagagtttaatggaatatttttgtacccgatgtttacagatgctgttgggaagttatcaataaaaagacaccattactaaaaagggaaaaaaaacctagttg

SEQ ID NO: 431914 - DNA, 2286 bp, Homo sapiens
gtggagactgggtgtctctgcatggcatgtcataggagttcaataaccatagttattattagagggaagggggttttgctgggtgtggcaccttatttctagaaggtgctgcaaaccactgaccagatacagatcacaaatagatgctcttggcctccatgatatcttggaaaaaagtattgattgctgacatttgtcaatgaggcaatttcccagaaaaaaaaaatccctgtttcctttttcctggagaaacatcagaagtcaggcagaaatcagctgctgtaagaagccactgtcctgtcacagctggatattgtgcacctgttcagattcacacctttgtgagacccgtgggctgtggccgtttgttgtgacttaggttcactggctgtgtgacagtggcccagtttctcagtgtccctgagcctcagttttctcatctataaataagaatcgcttgaacctgggaggcggaggttgcgctaagccaagatcgcgccattgcactccagcctgggtgacaggagtgaaactctgtatcaaaaagaaataaaaaaacgaggtcaagtagtaagagaagcggtaagagtgacgggaacaggagtcattgacctcttgggagaggagacattggaggtggtgatgatttgctgaagcagccacacacgttcagcttgtgaggacagcagttgttaggcaggggatgagggaggaagctggcagatctgtgcaggtgagaggtacctgtggccttgggctcatggaagtgggaggtgatgggattctaatgtgcttgggtacagtttacaaatacaacctctcttagtttgcccaatacctccaaattcctggggtggcacacctgaggttcaggtggcatgactgagccacagtcacacatccccactgtaggataccaccacggttgggttaggttccagcacatggcggtcccggcctggcctcttggtcccacctcacctggtgactagtgcagaccactctgttcttgcctgtttcaggcagcggaggaggagaaagagatggacctcccggactcggcctcgagggtcttctgcggccgcatcctgagcatggtgaacacagatgatgtcaacgccatcatcctggcccagaagaacatgctggaccgctttgagaagaccaatgagatgctgctcaacttcaacaacctgtccagtgcccgcctgcagcagatgagcgaacgcttcctgcaccacacgaggaccctagtagagatgaaacgggacctggacagcatcttccgccgtatcagatatcccagaggcatccttcctggaggaagaggatgaagaccccatcccacccagcaccacgaccaccattgccacctcagaacagagcacgggctcatgtgacaccagccccgacaccgtctcgccctccctgagccccggcttcgaggacctgtcccatgtccaggctggctccccagccatcaacggccgcagccagacagatgacgaggagatgacgggcgaatagccctgctgcccggtgccttgagggggtctcagggcagcagcatacaaggtggcagcgggtaaccctgccttgttctgtcatccagggctcctttgctgccccgttctgtcacccagggctcctagggggacaaggctctctcccgaggggtgtggaattcctgggggggtctttaattctggctccttccttcctcagaacatctctattctgcaagacccctctgccatgccagggcacgcccattccagctggagtcgtggggctgggcacaggggaatttttccagagctgagcctgacgtctgctctgaagaatgcttagaaggttcccagacaccagagccagatgtcccccaccaccggtcaggacctccttgaggtgcacaagcacggtctcctctgagttcaccccagcccacccccgcacccactaattctgcttttcctgccccttgctccgtaaaagtatcaaatactttctccttggtatctcaaggaggtttctgagataggtagaagtcttgagacggaggctggccatccattcagccctgagcgtgctgagttctgtgtttctctgaatagaggtgtggaacctgaggggccagcaggcctctctgaaggcctccatggagcaaacggagccacctcgggaaagagtttaatggaatatttttgtacccgatgtttacagatgctgttgggaagttatcaataaaaagacaccattactaaaaagggaaaaaaaacctagttg

SEQ ID NO: 431915 - DNA, 2390 bp, Homo sapiens
gtggagactgggtgtctctgcatggcatgtcataggagttcaataaccatagttattattagagggaagggggttttgctgggtgtggcaccttatttctagaaggtgctgcaaaccactgaccagatacagatcacaaatagatgctcttggcctccatgatatcttggaaaaaagtattgattgctgacatttgtcaatgaggcaatttcccagaaaaaaaaaatccctgtttcctttttcctggagaaacatcagaagtcaggcagaaatcagctgctgtaagaagccactgtcctgtcacagctggatattgtgcacctgttcagattcacacctttgtgagacccgtgggctgtggccgtttgttgtgacttaggttcactggctgtgtgacagtggcccagtttctcagtgtccctgagcctcagttttctcatctataaataagaatcgcttgaacctgggaggcggaggttgcgctaagccaagatcgcgccattgcactccagcctgggtgacaggagtgaaactctgtatcaaaaagaaataaaaaaacgaggtcaagtagtaagagaagcggtaagagtgacgggaacaggagtcattgacctcttgggagaggagacattggaggtggtgatgatttgctgaagcagccacacacgttcagcttgtgaggacagcagttgttaggcaggggatgagggaggaagctggcagatctgtgcaggtgagaggtacctgtggccttgggctcatggaagtgggaggtgatgggattctaatgtgcttgggtacagtttacaaatacaacctctcttagtttgcccaatacctccaaattcctggggtggcacacctgaggttcaggtggcatgactgagccacagtcacacatccccactgtaggataccaccacggttgggttaggttccagcacatggcggtcccggcctggcctcttggtcccacctcacctggtgactagtgcagaccactctgttcttgcctgtttcaggcagcggaggaggagaaagagatggacctcccggactcggcctcgagggtcttctgcggccgcatcctgagcatggtgaacacagatgatgtcaacgccatcatcctggcccagaagaacatgctggaccgctttgagaagaccaatgagatgctgctcaacttcaacaacctgtccagtgcccgcctgcagcagatgagcgaacgcttcctgcaccacacgaggaccctagtagagatgaaacgggacctggacagcatcttccgccgtatcaggcttcactgcgcacttaagtgtctgggacaattccaaccctgggataaaatcttgacgacgctgaaagggaaactggccaggcagcacccagaggccttcagccatatcccagaggcatccttcctggaggaagaggatgaagaccccatcccacccagcaccacgaccaccattgccacctcagaacagagcacgggctcatgtgacaccagccccgacaccgtctcgccctccctgagccccggcttcgaggacctgtcccatgtccaggctggctccccagccatcaacggccgcagccagacagatgacgaggagatgacgggcgaatagccctgctgcccggtgccttgagggggtctcagggcagcagcatacaaggtggcagcgggtaaccctgccttgttctgtcatccagggctcctttgctgccccgttctgtcacccagggctcctagggggacaaggctctctcccgaggggtgtggaattcctgggggggtctttaattctggctccttccttcctcagaacatctctattctgcaagacccctctgccatgccagggcacgcccattccagctggagtcgtggggctgggcacaggggaatttttccagagctgagcctgacgtctgctctgaagaatgcttagaaggttcccagacaccagagccagatgtcccccaccaccggtcaggacctccttgaggtgcacaagcacggtctcctctgagttcaccccagcccacccccgcacccactaattctgcttttcctgccccttgctccgtaaaagtatcaaatactttctccttggtatctcaaggaggtttctgagataggtagaagtcttgagacggaggctggccatccattcagccctgagcgtgctgagttctgtgtttctctgaatagaggtgtggaacctgaggggccagcaggcctctctgaaggcctccatggagcaaacggagccacctcgggaaagagtttaatggaatatttttgtacccgatgtttacagatgctgttgggaagttatcaataaaaagacaccattactaaaaagggaaaaaaaacctagttg

SEQ ID NO: 431916 - DNA, 1655 bp, Homo sapiens
ctgtgagtttcggcaacggagcccgcccctgtgagcctcagtttcactcggagatgattgtgtctgcctcgtaacggtgattgaggatgaaatgaagtgctctacaagtgtttgcccgtaatatattcttagaggcccctgggatgctctcaaaatgttgattcccgggacttcttcacactcctcttggagaaacagcctgtcctgagctccagtcgttatcacctttggtttcagttgccacagacagcactgtgagatcttcattctaccttattttcattttatggttgaaaaaactgattcagaagggtgaagtggctctcccatggtcaaacagcctacctctctgcgtttcttcaataaatctacatttggagttgggatcagagctcttgctgggtcaatttcactgtgtatgtgggccagactagcagtaatcagggaaggcttcttgggagaggaagttgcggggggacgggagggaggtgccaggaacccctcagccctcacatctgggagccagagacagaaaagagtcctgttttgaaggaggagtgtatcccagaaggtcccagtactgtgtctcactggtactagctatgggcctcccatctccaggtgtctttttttttttttttttttttttttcagttgagatgaagtctccctctgtagcccacactagaatgcagtggcttgattttggctcattgcaacctccgcctcccgggttcaagcgattctcctgcctcagcctcctgagtagctgggactacaggcagcggaggaggagaaagagatggacctcccggactcggcctcgagggtcttctgcggccgcatcctgagcatggtgaacacagatgatgtcaacgccatcatcctggcccagaagaacatgctggaccgctttgagaagaccaatgagatgctgctcaacttcaacaacctgtccagtgcccgcctgcagcagatgagcgaacgcttcctgcaccacacgaggaccctagtagagatgaaacgggacctggacagcatcttccgccgtatcaggacgctgaaagggaaactggccaggcagcacccagaggccttcagccatatcccagaggcatccttcctggaggaagaggatgaagaccccatcccacccagcaccacgaccaccattgccacctcagaacagagcacgggctcatgtgacaccagccccgacaccgtctcgccctccctgagccccggcttcgaggacctgtcccatgtccaggctggctccccagccatcaacggccgcagccagacagatgacgaggagatgacgggcgaatagccctgctgcccggtgccttgagggggtctcagggcagcagcatacaaggtggcagcgggtaaccctgccttgttctgtcatccagggctcctttgctgccccgttctgtcacccagggctcctagggggacaaggctctctcccgaggggtgtggaggaacctgaggggccagcaggcctctctgaaggcctccatggagcaaacggagccacctcgggaaagagtttaatggaatatttttgtacccgatgtttacagatgctgttgggaagttatcaataaaaagacaccattactaaaaagggaaaaaaaacctagttg

SEQ ID NO: 431917 - DNA, 629 bp, Homo sapiens
tttacttttccctttttagtaatggtattcctgggggggtctttaattctggctccttccttcctcagaacatctctattctgcaagacccctctgccatgccagggcacgcccattccagctggagtcgtggggctgggcacaggggaatttttccagagctgagcctgacgtctgctctgaagaatgcttagaaggttcccagacaccagagccagatgtcccccaccaccggtcaggacctccttgaggtgcacaagcacggtctcctctgagttcaccccagcccacccccgcacccactaattctgcttttcctgccccttgctccgtaaaagtatcaaatactttctccttggtatctcaaggaggtttctgagataggtagaagtcttgagacggaggctggccatccattcagccctgagcgtgctgagttctgtgtttctctgaatagaggtgtggaacctgaggggccagcaggcctctctgaaggcctccatggagcaaacggagccacctcgggaaagagtttaatggaatatttttgtacccgatgtttacagatgctgttgggaagttatcaataaaaagacaccattactaaaaagggaaaaaaaacctagttg

SEQ ID NO: 431918 - DNA, 593 bp, Homo sapiens
gccccgccctttcctgtcgtgacttaacgcacgcaagcggctccagggtacgtccccgccacgcgcgctcgcaggatcggtgcgtggtgacgtttcgccggcgcgggcgccatcccggaagcgcgagcaaggccgccagatgtgcagagacgggggtttcaccatgttgaccaggctagtcttgaactcatgacctcaggtgatccaccagccttggcttcccaaagtgctgagattacaggcatgagcacccggtccagaagtcaggcagaaatcagctgctgtaagaagccactgtcctgtcacagctggatattgtgcacctgttcagattcacacctttgtgagacccgtgggctgtggccgtttgttgtgacttaggttcactggctgtgtgacagtggcccagtttctcagtgtccctgagcctcagttttctcatctataaataagaatgataacagtatgtatgagcttgatgctttgtttagcatagagtagctgctgaataaatgggagagtacattaagtgagctctgaaaccctttctttctctttcctttctttctctctttctctgtctctctctcttt

SEQ ID NO: 431919 - DNA, 387 bp, Homo sapiens
ttgagatgaagtctccctctgtagcccacactagaatgcagtggcttgattttggctcattgcaacctccgcctcccgggttcaagcgattctcctgcctcagcctcctgagtagctgggactacaggtgcccgccatcatgcctggctaatttttgtatttttagtagagacgggggtttcaccatgttgaccaggctagtcttgaactcatgacctcaggtgatccaccagccttggcttcccaaagtgctgagattacaggcatgagcacccggtccaggtatcctctttatacaagatcatgcttctttgggaatgtggagactgggtgtctctgcatggcatgtcataggagttcaataaccatagttattattagagggaa

SEQ ID NO: 431920 - DNA, 308 bp, Homo sapiens
gcgggcacctgtaatcccagctacttgggagggtgaggcaggagaatcgcttgaacctgggaggcggaggttgcgctaagccaagatcgcgccattgcactccagcctgggtgacaggagtgaaactctgtatcaaaaagaaataaaaaaacgaggtcaagtagtaagagaagcggtaagagtgacgggaacaggagtcattgacctcttgggagaggagacattggaggtggtgatgatttgctgaagcagccacacacgttcagcttgtgaggacagcagttgttaggcaggggatgagggaggaa

SEQ ID NO: 431921 - DNA, 1980 bp, Homo sapiens
  misc_feature (921)..(921): n is a, c, g, or t
cataactccaccttttctacaattcagtggaaccaatttaatcaaagtgccctacttagggagaacattgctagaaatgacagggattgggaaaccatatggtgcttggcagaggacccgaaaccaatgtagaaactgaggagcttgggcaaagtgtgtcatttatcgttctggggctagggctgagtcaggtccaagaactgaccccctctcagagctgggacttcatcaaggctttggctctggtttgaacgtggtacttgcaggctcttgtcgtagcaccgggagactcctctcccagcaactcaggactcctaggaccagtgaggcctgtgctatcataatgaattatgagtggatccatctgacctataacaaataccacccataaacaacactgcggtgctaagcaaaaatgcctgaagaccatagacagagagaatgggatttttaaagaaacatttataaatagaaatcaaaacatgtgaagctcagaatgaatttgggaaacatgatgggaactgggattcactgagcacgtgctgcactaggtcaagggcagagtgtcagggtgtggcccaacatcaggcgcatgggctctccaggccactctgcactgaagcaaattgcgccattctgtatggtgcttgttcatacacactgcccacagggctctaataatttagaggcactggactgagctcctgagggcaggagcattcatctctgtggccacatgtttggtccagtgtctgacaaataacattcaacttgtaggaacaagtgagagcagagcatcctttctcaggaacaaggcccatcccctggtgagctgctccactggagtcccaggtccctaacctgtggcctaggtagaccttaggatttgcctcactgatgccaatgagttgctgctgcttncttttgaaacaaagtgttggcatgttccagctgctgcgattcaattgcctttcagacagtgtggtgcccaacaaagcatccgtctcaacaccccgcggcctccccagctgccactagtagcaatccattacccacaggcagctcaacaactcaatgtgacttgggctccacgcctctacacaaaagatgcttccctgccctgttctcctccttcctgttgtgaaagcagcctcccttgcccttacccagctgtggctctctcagcggcttcctctagccccaaaggcctgctcagaataaggacctgcacacaagttgtgtggccctgggcaaaacctggagctgcttgatgttctgagcctgctttcaaatctgcaaaatagtgctctctgccttactccctcgcaggctcgtgtgaaggtcaaaagagaactcctgggaaagagcttagtcagctgaaaggctctaaacaaatgatagttattacatcgtcctctgtctccccatgcaagagaccagaacaaaacaatatacaaaagagagagaaaatcccacacctcttggtaactggaaaggctgaggccatgggtgagagcacctcccatttccctgggaaaggagaataagtaaaacttgaattccttcaattagagactcatctaagaatcctttctatcttcccactctgttttgaagtaggacagggggcccagcatcacagacgacaaggttcttaccttgtagttctggtctcatttgtttctgtatttatcaagcctggtacataaacacagtaggtaggtggatggatgaatttgctgtccggtcaagacttcagctagcacattcctaattgacctgcctttacatatatggtttctaaaacactttcacactgggatgatgacagagttctggagatggatggtggtgatggttgcacacactattgggaatatacttaatgacgttgaattgtacatttttaaatggttaaaattgtaaattttatggtatgtatattttaccacaataaaaaattttaagaagaaaaaatgt

SEQ ID NO: 431922 - DNA, 3417 bp, Homo sapiens
ttttcttgcttttcttcccttttttttctttttgcaaacaaaacaaaaaacagcatagaagaaagagcaaaataaagaagaagaagaggaggaagagagggaaagagaggaagggaaaaaaaacaccaacccgggcagaggaggaggtgcggcggcggcggcggcggcggcagcggcggcagcggcgcggcggcggctcggaccccctcccccggctccccccatcagtgcagctctccgggcgatgccagaatagatgccggggcaatgtcccgccgcaaacagggcaacccgcagcacttgtcccagagggagctcatcaccccagaggctgaccatgtggaggccgccatcctcgaagaagacgagggtctggagatagaggagccaagtggcctggggctgatggtgggtggccccgaccctgacctgctcacctgtggccagtgtcaaatgaacttccccttgggggacatcctggtttttatagagcacaaaaggaagcagtgtggcggcagcttgggtgcctgctatgacaaggccctggacaaggacagcccgccaccctcctcacgctccgagctcaggaaagtgtccgagccggtggagatcgggatccaagtcacccccgacgaagatgaccacctgctctcacccacgaaaggcatctgtcccaagcaggagaacattgcagggccgtgcaggcctgcccagctgccagcggtggcccccatagctgcctcctcccaccctcactcatccgtgatcacttcacctctgcgtgccctgggcgctctcccgccctgcctccccctgccgtgctgcagcgcgcgcccggtctcgggtgacgggactcagggtgagggtcagacggaggctccctttggatgccagtgtcagttgtcaggtaaagatgagccttccagctacatttgcacaacatgcaagcagcccttcaacagcgcgtggttcctgctgcagcacgcgcagaacacgcacggcttccgcatctacctggagcccgggccggccagcagctcgctcacgccgcggctcaccatcccgccgccgctcgggccggaggccgtggcgcagtccccgctcatgaatttcctgggcgacagcaaccccttcaacctgctgcgcatgacgggccccatcctgcgggaccacccgggcttcggcgagggccgcctgccgggcacgccgcctctcttcagtcccccgccgcgccaccacctggacccgcaccgcctcagtgccgaggagatggggctcgtcgcccagcaccccagtgccttcgaccgagtcatgcgcctgaaccccatggccatcgactcgcccgccatggacttctcgcggcggctccgcgagctggcgggcaacagctccacgccgccgcccgtgtccccgggccgcggcaaccctatgcaccggctcctgaaccccttccagcccagccccaagtccccgttcctgagcacgccgccgctgccgcccatgccccctggcggcacgccgcccccgcagccgccagccaagagcaagtcgtgcgagttctgcggcaagaccttcaagttccagagcaatctcatcgtgcaccggcgcagtcacacgggcgagaagccctacaagtgccagctgtgcgaccacgcgtgctcgcaggccagcaagctcaagcgccacatgaagacgcacatgcacaaggccggctcgctggccggccgctccgacgacgggctctcggccgccagctcccccgagcccggcaccagcgagctggcgggcgagggcctcaaggcggccgacggtgacttccgccaccacgagagcgacccgtcgctgggccacgagccggaggaggaggacgaggaggaggaggaggaggaggaggagctgctactggagaacgagagccggcccgagtcgagcttcagcatggactcggagctgagccgcaaccgcgagaacggcggtggtggggtgcccggggtcccgggcgcggggggcggcgcggccaaggcgctggctgacgagaaggcgctggtgctgggcaaggtcatggagaacgtgggcctaggcgcactgccgcagtacggcgagctcctggccgacaagcagaagcgcggcgccttcctgaagcgtgcggcgggcggcggggacgcgggcgacgacgacgacgcgggcggctgcggggacgcgggcgcgggcggcgcggtcaacgggcgcgggggcggcttcgcgccaggcaccgagcccttccccgggctcttcccgcgcaagcccgcgccgctgcccagccccgggctcaacagcgccgccaagcgcatcaaggtggagaaggacctggagctgccgcccgccgcgctcatcccgtccgagaacgtgtactcgcagtggctggtgggctacgcggcgtcgcggcacttcatgaaggaccccttcctgggcttcacggacgcacgacagtcgcccttcgccacgtcgtccgagcactcgtccgagaacggcagcctgcgcttctccacgccgcccggggacctgctggacggcggcctctcgggccgcagcggcacggccagcggaggcagcaccccgcacctgggcggcccgggccccgggcggcccagctccaaggagggccgccgcagcgacacgtgcgagtactgcggcaaggtgttcaagaactgcagcaacttgacggtgcaccggcggagccacaccggcgagcggccttacaagtgcgagctgtgcaactacgcgtgcgcgcagagcagcaagctcacgcgccacatgaagacgcacgggcagatcggcaaggaggtgtaccgctgcgacatctgccagatgcccttcagcgtctacagcaccctggagaaacacatgaaaaagtggcacggcgagcacttgctgactaacgacgtcaaaatcgagcaggccgagaggagctaagcgcgcgggccccggcgccccgcacctgtacagtggaaccgttgccaaccgagagaatgctgacctgacttgcctccgtgtcaccgccaccccgcaccccgcgtgtccccggggcccaggggaggcggcactccaacctaacctgtgtctgcgaagtcctatggaaacccgagggttgattaaggcagtacaaattgtggagccttttaactgtgcaataatttctgtatttattgggttttgtaatttttttggcatgtgcaggtactttttattattattttttctgtttgaattcactcattcattcaacagatatacttcaggcacaactctgtgcaaatcatttatttaacaaatattgttaaaattctgtggcaattattgttctagtggctgggtacagcaatgaacaatgtagatacaactttctgcctttttggagtttatattctggtgggtgac

SEQ ID NO: 431923 - DNA, 7603 bp, Homo sapiens
ttttcttgcttttcttcccttttttttctttttgcaaacaaaacaaaaaacagcatagaagaaagagcaaaataaagaagaagaagaggaggaagagagggaaagagaggaagggaaaaaaaacaccaacccgggcagaggaggaggtgcggcggcggcggcggcggcggcagcggcggcagcggcgcggcggcggctcggaccccctcccccggctccccccatcagtgcagctctccgggcgatgccagaatagatgccggggcaatgtcccgccgcaaacagggcaacccgcagcacttgtcccagagggagctcatcaccccagaggctgaccatgtggaggccgccatcctcgaagaagacgagggtctggagatagaggagccaagtggcctggggctgatggtgggtggccccgaccctgacctgctcacctgtggccagtgtcaaatgaacttccccttgggggacatcctggtttttatagagcacaaaaggaagcagtgtggcggcagcttgggtgcctgctatgacaaggccctggacaaggacagcccgccaccctcctcacgctccgagctcaggaaagtgtccgagccggtggagatcgggatccaagtcacccccgacgaagatgaccacctgctctcacccacgaaaggcatctgtcccaagcaggagaacattgcaggtaaagatgagccttccagctacatttgcacaacatgcaagcagcccttcaacagcgcgtggttcctgctgcagcacgcgcagaacacgcacggcttccgcatctacctggagcccgggccggccagcagctcgctcacgccgcggctcaccatcccgccgccgctcgggccggaggccgtggcgcagtccccgctcatgaatttcctgggcgacagcaaccccttcaacctgctgcgcatgacgggccccatcctgcgggaccacccgggcttcggcgagggccgcctgccgggcacgccgcctctcttcagtcccccgccgcgccaccacctggacccgcaccgcctcagtgccgaggagatggggctcgtcgcccagcaccccagtgccttcgaccgagtcatgcgcctgaaccccatggccatcgactcgcccgccatggacttctcgcggcggctccgcgagctggcgggcaacagctccacgccgccgcccgtgtccccgggccgcggcaaccctatgcaccggctcctgaaccccttccagcccagccccaagtccccgttcctgagcacgccgccgctgccgcccatgccccctggcggcacgccgcccccgcagccgccagccaagagcaagtcgtgcgagttctgcggcaagaccttcaagttccagagcaatctcatcgtgcaccggcgcagtcacacgggcgagaagccctacaagtgccagctgtgcgaccacgcgtgctcgcaggccagcaagctcaagcgccacatgaagacgcacatgcacaaggccggctcgctggccggccgctccgacgacgggctctcggccgccagctcccccgagcccggcaccagcgagctggcgggcgagggcctcaaggcggccgacggtgacttccgccaccacgagagcgacccgtcgctgggccacgagccggaggaggaggacgaggaggaggaggaggaggaggaggagctgctactggagaacgagagccggcccgagtcgagcttcagcatggactcggagctgagccgcaaccgcgagaacggcggtggtggggtgcccggggtcccgggcgcggggggcggcgcggccaaggcgctggctgacgagaaggcgctggtgctgggcaaggtcatggagaacgtgggcctaggcgcactgccgcagtacggcgagctcctggccgacaagcagaagcgcggcgccttcctgaagcgtgcggcgggcggcggggacgcgggcgacgacgacgacgcgggcggctgcggggacgcgggcgcgggcggcgcggtcaacgggcgcgggggcggcttcgcgccaggcaccgagcccttccccgggctcttcccgcgcaagcccgcgccgctgcccagccccgggctcaacagcgccgccaagcgcatcaaggtggagaaggacctggagctgccgcccgccgcgctcatcccgtccgagaacgtgtactcgcagtggctggtgggctacgcggcgtcgcggcacttcatgaaggaccccttcctgggcttcacggacgcacgacagtcgcccttcgccacgtcgtccgagcactcgtccgagaacggcagcctgcgcttctccacgccgcccggggacctgctggacggcggcctctcgggccgcagcggcacggccagcggaggcagcaccccgcacctgggcggcccgggccccgggcggcccagctccaaggagggccgccgcagcgacacgtgcgagtactgcggcaaggtgttcaagaactgcagcaacttgacggtgcaccggcggagccacaccggcgagcggccttacaagtgcgagctgtgcaactacgcgtgcgcgcagagcagcaagctcacgcgccacatgaagacgcacgggcagatcggcaaggaggtgtaccgctgcgacatctgccagatgcccttcagcgtctacagcaccctggagaaacacatgaaaaagtggcacggcgagcacttgctgactaacgacgtcaaaatcgagcaggccgagaggagctaagcgcgcgggccccggcgccccgcacctgtacagtggaaccgttgccaaccgagagaatgctgacctgacttgcctccgtgtcaccgccaccccgcaccccgcgtgtccccggggcccaggggaggcggcactccaacctaacctgtgtctgcgaagtcctatggaaacccgagggttgattaaggcagtacaaattgtggagccttttaactgtgcaataatttctgtatttattgggttttgtaatttttttggcatgtgcaggtactttttattattattttttctgtttgaattcctttaagagattttgttgggtatccatcccttctttgttttttttttaacccggtagtagcctgagcaatgactcgcaagcaatgttagaggggaagcatatcttttaaattataatttggggggaggggtggtgctgcttttttgaaatttaagctaagcatgtgtaatttcttgtgaagaagccaacactcaaatgacttttaaagttgtttactttttcattccttccttttttttgtcctgaaataaaaagtggcatgcagttttttttttaattattttttaattttttttttggtttttgtttttggggtggggggtgtggatgtacagcggataacaatctttcaagtcgtagcactttgtttcagaactggaatggagatgtagcactcatgtcgtcccgagtcaagcggccttttctgtgttgatttcggctttcatattacataagggaaaccttgagtggtggtgctgggggaggcaccccacagactcagcgccgccagagatagggtttttggagggctcctctgggaaatggcccgacagcattctgaggttgtgcatgaccagcagatactatcctgttggtgtgccctggggtgccatggctgctattcgctgtagattaggctacataaaatgggctgagggtacctttttggggagatggggtggcctgcagtgacacagaaaggaagaaactagcggtgttcttttaggcgttttctggcttgacggcttctctctttttttaaatcacccccaccacataaatctcaaatcctatgttgctacaaggggtcatccatcatttcccaagcagacgaatgccctaattaattgaagttagtgttctctcatttaatgcacactgatgatattgtagggatgggtggggtggggatcttgcaaatttctattctcttttactgaaaaagcaggggatgagttccatcagaaggtgcccagcgctacttcccaggtttttattttttttttcctatctcattaggttggaaggtactaaatattgaactgttaagattagacatttgaattctgttgacccgcactttaaagcttttgtttgcatttaaattaaatggcttctaaacaagaaattgcagcatattcttctctttggcccagaggtgggttaaactgtaagggacagctgagattgagtgtcagtattgctaagcgtggcattcacaatactggcactataaagaacaaaataaaataataatttataggacagtttttctactgccattcaatttgatgtgagtgccttgaaaactgatcttcctatttgagtctcttgagacaaatgcaaaactttttttttgaaatgaaaagactttttaaaaaagtaaaacaagaaaagtacattctttagaaactaacaaagccacatttactttaagtaaaaaaaaaaaaaattctggttgaagatagaggatatgaaatgccataagacccaatcaaatgaagaaataaacccagcacaaccttggacatccattagctgaattatcctcagccccttttgtttttgggacaacgctgcttagatatggagtggaggtgatttactgctgaattaaaactcaagtgacacaagttacaagttgatatcgttgaatgaaaagcaaaacaaaaacaattcaggaacaacggctaattttttctaaagttaaatttagtgcactctgtcttaaaaatacgtttacagtattgggtacatacaagggtaaaaaaaaaattgtgtgtatgtgtgttggagcgatctttttttttcaaagtttgcttaataggttatacaaaaatgccacagtggccgcgtgtatattgttttcttttggtgacggggttttagtatatattatatatattaaaatttcttgattactgtaaaagtggaccagtatttgtaataatcgagaatgcctgggcattttacaaaacaagaaaaaaaatacccttttcttttccttgaaaatgttgcagtaaaatttaaatggtgggtctataaatttgttcttgttacagtaactgtaaagtcggagttttagtaaatttttttctgccttgggtgttgaatttttatttcaaaaaaaatgtatagaaacttgtatttggggattcaaaggggattgctacaccatgtagaaaaagtatgtagaaaaaaagtgcttaatattgttattgctttgcagaaaaaaaaaaaatcacatttctgacctgtacttatttttctcttcccgcctccctctggaatggatatattggttggttcatatgatgtaggcacttgctgtatttttactggagctcgtaattttttaactgtaagcttgtccttttaaagggatttaatgtacctttttgttagtgaatttggaaataaaaagaaaaaaaaaacaaaaacaaacaggctgccataatatatttttttaatttggcaggataaaatattgcaaaaaaaacacatttgtatgttaagtcctattgtacaggagaaaaagggttgtttgacaacctttgagaaaaagaaacaaaaggaagtagttaaatgctttggttcacaaatcatttagttgtatatattttttgtcggaattggcctacacagagaaccgttcgtgttgggcttctctctgaacgccccgaaccttgcatcaaggctccttggtgtggccacagcagaccagatgggaaattatttgtgttgagtggaaaaaaatcagtttttgtaaagatgtcagtaacattccacatcgtcctccctttctctaagaggccatctctaagatgtcagatgtagaggagagagagcgagagaacatcttccttctctaccatcactcctgtggcggtcaccaccaccacctctcccgcccttaccagcagaaagcaatgcaaactgagctgctttagtccttgagaaattgtgaaacaaacacaaatatcataaaaggagctggtgattcagctgggtccaggtgaagtgacctgctgttgagaccggtacaaattggatttcaggaaggagactccatcacagccaggacctttcgtgccatggagagtgttggcctcttgtctttcttccctgctttgctgctttgctctctgaaacctacattccgtcagtttccgaatgcgagggcctgggatgaatttggtgcctttccatatctcgttctctctccttcccctgcgtttcctctccatccttcatcctccattggtcctttttttttctttcattttttatttaatttcttttcttcctgtctgttcctcccctaatcctctattttatttttattttttgtaaagccaagtagctttaagataaagtggtggtcttttggatgagggaataatgcatttttaaataaaataccaatatcaggaagccattttttatttcaggaaatgtaagaaaccattatttcaggttatgaaagtataaccaagcatccttttgggcaattccttaccaaatgcagaagcttttctgttcgatgcactctttcctccttgccacttacctttgcaaagttaaaaaaaaggggggagggaatgggagagaaagctgagatttcagtttcctactgcagtttcctacctgcagatccaggggctgctgttgcctttggatgccccactgaggtcctagagtgcctccagggtggtcttcctgtagtcataacagctagccagtgctcaccagcttaccagattgccaggactaagccatcccaaagcacaagcattgtgtgtctctgtgactgcagagaagagagaattttgcttctgttttgtgtttaaaaaaccaacacggaagcagatgatcccgagagagaggcctctagcatgggtgacccagccgacctcaggccggtttccgcactgccacaactttgttcaaagttgcccccaattggaacctgccacttggcattagagggtctttcatggggagagaaggagactgaattactctaagcaaaatgtgaaaagtaaggaaatcagcctttcatcccggtcctaagtaaccgtcagccgaaggtctcgtggaacacaggcaaacccgtgattttggtgctccttgtaactcagccctgcaaagcaaagtcccattgatttaagttgtttgcatttgtactggcaaggcaaaatatttttattaccttttctattacttattgtatgagcttttgttgtttacttggaggttttgtcttttactacaagtttggaactatttattattgcttggtatttgtgctctgtttaagaaacaggcacttttttttattatggataaaatgttgagatgacaggaggtcatttcaatatggcttagtaaaatatttattgttcctttattctctgtacaagattttgggcctctttttttccttaatgtcacaatgttgagttcagcatgtgtctgccatttcatttgtacgcttgttcaaaaccaagtttgttctggtttcaagttataaaaataaattggacatttaacttgatctccaaa

SEQ ID NO: 431924 - DNA, 333 bp, Homo sapiens
ccggaggcgggcgcacggctgcttctcattcattgtcttgacaagagcatcttcagcgggcgagtccccggctcctccagctccttcctcctcttcctcctcctcctccacctccggcttttgggggatcactgtcctctctcggcagcaggtgaggctgggcctgggaggcgcgggtgggccggggcgagggccacctgtggggcggcgcgcgcgtgggagccgcgggctgcgggggcgcgcggctgtcaccgcgacccagccagcgccggggccaggtagcgggcgcagcagcccgtggggggacgctgcttggagtgggggccgccgggg

SEQ ID NO: 431925 - DNA, 598 bp, Homo sapiens
cccgggcttcagcgggcgagtccccggctcctccagctccttcctcctcttcctcctcctcctccacctccggcttttgggggatcactgtcctctctcggcagcagaatgagccggcaggtggtccgctccagcaagttccgccacgtgtttggaaagcacctggaggagccgctgtccctgcaggagctggacaccagcagcggtgtcctgctgcccttctttgaccctgacaccaacatcgtctacctctgtggcaagggtgacagctcaatccggtactttgagatcacttccgaggcccctttcctgcactatctctccatgttcagttccaaggagtcccagcggggcatgggctacatgcccaaacgtggcctggaggtgaacaagtgtgagatcgccaggttctacaagctgcacgagcggaggtgtgagcccattgccatgacagtgcctcgaaagtcggacctgttccaggaaggacctgaccccaccccccggagggccccgcccgtcctttcggttaggagggctggggggttggaatcttgcccccccccttctccctctggggggggggggcgccccccaaaac

SEQ ID NO: 431926 - DNA, 794 bp, Homo sapiens
aaggctagtacgagctggtgtgaatcggccgagggagtcccggctcctccagctccttcctcctcttcctcctcctcctccacctccggcttttgggggatcactgtcctctctcggcagcagaatgagccggcaggtggtccgctccagcaagttccgccacgtgtttggacagccggccaaggccgaccagtgctatgaagatgtgcgcgtctcacagaccacctgggacagtggcttctgtgctgtcaaccctaagtttgtggccctgatctgtgaggccagcgggggaggggccttcctggtgctgcccctgggcaagactggacgtgtggacaagaatgcgcccacggtctgtggccacacagcccctgtgctagacatcgcctggtgcccgcacaatgacaacgtcattgccagtggctccgaggactgcacagtcatggtgtgggagatcccggatgggggcctgatgctgcccctgcgggagcccgtcgtcaccctggagggccacaccaagcgtgtgggcattgtggcctggcacaccacagcccagaacgtgctgctcagtgcaggttgtgacaacgtgatcatggtgtgggacgtgggcactggggcggccatgctgacactgggcccagaggtgcacccagacacgatctacagtgtggactggagccgagatggaggcctcatttgtacctcctgccgtgacaagcgcgtgcgcatcatcgagccccgaagccttttttttaaggcgccccaggcccgcccgcgagtcatggggaactccg

SEQ ID NO: 431927 - DNA, 964 bp, Homo sapiens
acattgggaatctttgtgggtccgggaatggtaatcctgaggcctcagaacacaggtttcagattgataggcctgcaggtctccaggcagcaaccagctgagcgactaaagggcccaaggccagggctctagggatggggctcagcagaggctggggtaaggggagccagggaggagctgggcctaatgcagcaccgggtccccaggatgccgtgtctcggctggaggaggagatgcggaagctccaggccacggtgcaggagctccagaagcgcttggacaggctggaggagacagtccaggccaagtagagccccgcagggcctccagcagggtcagccattcacacccatccactcacctcccattcccagccacatggcagagaaaaaaatcataataaaatggctttattttctggtacctcccagactctgatgactggtcccctagacacgcagtttgctgaaccaaccagccctagagcttcccctccaccgcgctgaggggactgacccatggcaggggatgtgggatgccccctgacttactacatcacaggaacagggccttcgtgggtagaaaccagccatgctgatgtgggccaggaggctgctctccgtttccgagctccttctcagagctgacacagctgaactatttaaggccctagcttagaacctcaataattcccaaatttaccaaaaatctgcctttcctagtcaaccaaaacatcacgttgcacgtgactctgctggcactgttgcttgtgaggaaatgaaccaaccatcacttacagggtaggcatcttttaaactgcaggtccaaagataaaaataacgagggaggctgggcatggggactcacgtctataatcccagcactgtgggaggctgaggcggcaggatcatttgagcccaggagtttgagacctgcctgagcaacacggcgagataccgtctct

SEQ ID NO: 431928 - DNA, 423 bp, Homo sapiens
acattgggaatctttgtgggtccgggaatggtaatcctgaggcctcagaacacaggtttcagattgataggcctgcaggtctccaggcagcaaccagctgagcgactaaagggcccaaggccagggctctagggatggggctcagcagaggctggggtaaggggagccagggaggagctgggcctaatgcagcaccgggtccccaggatgccgtgtctcggctggaggaggagatgcggaagctccaggccacggtgcaggagctccagaagcgcttggacaggctggaggagacagtccaggccaagtagagccccgcagggcctccagcagggtcagccattcacacccatccactcacctcccattcccagccacatggcagagaaaaaaatcataataaaatggctttattttctggta

SEQ ID NO: 431929 - DNA, 124 bp, Homo sapiens
tttttcttttcattattaataacgattgaaattaactggtatttccacacccatccactcacctcccattcccagccacatggcagagaaaaaaatcataataaaatggctttattttctggta

SEQ ID NO: 431930 - DNA, 1652 bp, Homo sapiens
ataggctagtagaggcatgcgcttaaatcggcaccgaggctgacaagagcatcttcagcgggcgagtccccggctcctccagctccttcctcctcttcctcctcctcctccacctccggcttttgggggatcactgtcctctctcggcagcagaatgagccggcaggtggtccgctccagcaagttccgccacgtgtttggacagccggccaaggccgaccagtgctatgaagatgtgcgcgtctcacagaccacctgggacagtggcttctgtgctgtcaaccctaagtttgtggccctgatctgtgaggccagcgggggaggggccttcctggtgctgcccctgggcaagactggacgtgtggacaagaatgcgcccacggtctgtggccacacagcccctgtgctagacatcgcctggtgcccgcacaatgacaacgtcattgccagtggctccgaggactgcacagtcatggtgtgggagatcccggatgggggcctgatgctgcccctgcgggagcccgtcgtcaccctggagggccacaccaagcgtgtgggcattgtggcctggcacaccacagcccagaacgtgctgctcagtgcaggttgtgacaacgtgatcatggtgtgggacgtgggcactggggcggccatgctgacactgggcccagaggtgcacccagacacgatctacagtgtggactggagccgagatggaggcctcatttgtacctcctgccgtgacaagcgcgtgcgcatcatcgagccccgcaaaggcactgtcgtagctgagaaggaccgtccccacgaggggacccggcccgtgcgtgcagtgttcgtgtcggaggggaagatcctgaccacgggcttcagccgcatgagtgagcggcaggtggcgctgtgggacacaaagcacctggaggagccgctgtccctgcaggagctggacaccagcagcggtgtcctgctgcccttctttgaccctgacaccaacatcgtctacctctgtggcaagggtgacagctcaatccggtactttgagatcacttccgaggcccctttcctgcactatctctccatgttcagttccaaggagtcccagcggggcatgggctacatgcccaaacgtggcctggaggtgaacaagtgtgagatcgccaggttctacaagctgcacgagcggaggtgtgagcccattgccatgacagtgcctcgaaagtcggacctgttccaggaggacctgtacccacccaccgcagggcccgaccctgccctcacggctgaggagtggctggggggtcgggatgctgggcccctcctcatctccctcaaggatggctacgtacccccaaagagccgggagctgagggtcaaccggggcctggacaccgggcgcaggagggcagcaccagaggccagtggcactcccagctcggatgccgtgtctcggctggaggaggagatgcggaagctccaggccacggtgcaggagctccagaagcgcttggacaggctggaggagacagtccaggccaagtagagccccgcagggcctccagcagggtcagccattcacacccatccactcacctcccattcccagccacatggcagagaaaaaaatcataataaaatggctttattttctggta

SEQ ID NO: 431931 - DNA, 1881 bp, Homo sapiens
  misc_feature (1881)..(1881): n is a, c, g, or t
ataggctagtagaggcatgcgcttaaatcggcaccgaggctgacaagagcatcttcagcgggcgagtccccggctcctccagctccttcctcctcttcctcctcctcctccacctccggcttttgggggatcactgtcctctctcggcagcagaatgagccggcaggtggtccgctccagcaagttccgccacgtgtttggacagccggccaaggccgaccagtgctatgaagatgtgcgcgtctcacagaccacctgggacagtggcttctgtgctgtcaaccctaagtttgtggccctgatctgtgaggccagcgggggaggggccttcctggtgctgcccctgggcaagactggacgtgtggacaagaatgcgcccacggtctgtggccacacagcccctgtgctagacatcgcctggtgcccgcacaatgacaacgtcattgccagtggctccgaggactgcacagtcatggtgtgggagatcccggatgggggcctgatgctgcccctgcgggagcccgtcgtcaccctggagggccacaccaagcgtgtgggcattgtggcctggcacaccacagcccagaacgtgctgctcagtgcaggttgtgacaacgtgatcatggtgtgggacgtgggcactggggcggccatgctgacactgggcccagaggtgcacccagacacgatctacagtgtggactggagccgagatggaggcctcatttgtacctcctgccgtgacaagcgcgtgcgcatcatcgagccccgcaaaggcactgtcgtagctgagaaggaccgtccccacgaggggacccggcccgtgcgtgcagtgttcgtgtcggaggggaagatcctgaccacgggcttcagccgcatgagtgagcggcaggtggcgctgtgggacacaaagcacctggaggagccgctgtccctgcaggagctggacaccagcagcggtgtcctgctgcccttctttgaccctgacaccaacatcgtctacctctgtggcaagggtgacagctcaatccggtactttgagatcacttccgaggcccctttcctgcactatctctccatgttcagttccaaggagtcccagcggggcatgggctacatgcccaaacgtggcctggaggtgaacaagtgtgagatcgccaggttctacaagctgcacgagcggaggtgtgagcccattgccatgacagtgcctcgaaagtcggacctgttccaggaggacctgtacccacccaccgcagggcccgaccctgccctcacggctgaggagtggctggggggtcgggatgctgggcccctcctcatctccctcaaggatggctacgtacccccaaagagccgggagctgagggtcaaccggggcctggacaccgggcgcaggagggcagcaccagaggccagtggcactcccagctcggatgccgtgtctcggctggaggaggagatgcggaagctccaggccacggtgcaggagctccagaagcgcttggacaggctggaggagacagtccaggccaagtagagccccgcagggcctccagcagggtcagccattcacacccatccactcacctcccattcccagccacatggcagagaaaaaaatcataataaaatggctttattttctggtaaaaacaacacaaacaatgctcacatatacatcaactaacgactaacagcagagcaagaagatcacagcgcagcatttcatgcgagggcagcacaaaagaggtccttcaatactagccacatgactgcccacgcgagtttcgcgaccacaccagctgtagctacgaacgggatagtttcgccgaggcccccacatgaggggcgcagctacgcgaacgagcggttctgttn

SEQ ID NO: 431932 - DNA, 2011 bp, Homo sapiens
ataggctagtagaggcatgcgcttaaatcggcaccgaggctgacaagagcatcttcagcgggcgagtccccggctcctccagctccttcctcctcttcctcctcctcctccacctccggcttttgggggatcactgtcctctctcggcagcagaatgagccggcaggtggtccgctccagcaagttccgccacgtgtttggacagccggccaaggccgaccagtgctatgaagatgtgcgcgtctcacagaccacctgggacagtggcttctgtgctgtcaaccctaagtttgtggccctgatctgtgaggccagcgggggaggggccttcctggtgctgcccctgggcaagactggacgtgtggacaagaatgcgcccacggtctgtggccacacagcccctgtgctagacatcgcctggtgcccgcacaatgacaacgtcattgccagtggctccgaggactgcacagtcatggtgtgggagatcccggatgggggcctgatgctgcccctgcgggagcccgtcgtcaccctggagggccacaccaagcgtgtgggcattgtggcctggcacaccacagcccagaacgtgctgctcagtgcaggttgtgacaacgtgatcatggtgtgggacgtgggcactggggcggccatgctgacactgggcccagaggtgcacccagacacgatctacagtgtggactggagccgagatggaggcctcatttgtacctcctgccgtgacaagcgcgtgcgcatcatcgagccccgcaaaggcactgtcgtagctgagaaggaccgtccccacgaggggacccggcccgtgcgtgcagtgttcgtgtcggaggggaagatcctgaccacgggcttcagccgcatgagtgagcggcaggtggcgctgtgggacacaaagcacctggaggagccgctgtccctgcaggagctggacaccagcagcggtgtcctgctgcccttctttgaccctgacaccaacatcgtctacctctgtggcaagggtgacagctcaatccggtactttgagatcacttccgaggcccctttcctgcactatctctccatgttcagttccaaggagtcccagcggggcatgggctacatgcccaaacgtggcctggaggtgaacaagtgtgagatcgccaggttctacaagctgcacgagcggaggtgtgagcccattgccatgacagtgcctcgaaagtcggacctgttccaggaggacctgtacccacccaccgcagggcccgaccctgccctcacggctgaggagtggctggggggtcgggatgctgggcccctcctcatctccctcaaggatggctacgtacccccaaagagccgggagctgagggtcaaccggggcctggacaccgggcgcaggagggcagcaccagaggccagtggcactcccagctcggatgccgtgtctcggctggaggaggagatgcggaagctccaggccacggtgcaggagctccagaagcgcttggacaggctggaggagacagtccaggccaagtagagccccgcagggcctccagcagggtcagccattcacacccatccactcacctcccattcccagccacatggcagagaaaaaaatcataataaaatggctttattttctggtaaaaaaaaaaaaaaaaaaaaaaaaaaaaaaaaaaaaaaaaaaaaaaaaaaaaaaaaaaaaaaaaaaaaaacaaaaacaaaaaaaataaaaaaagaagaaaagaagaaaaaaagacaaaaaagaaagcgaggagggggggagccgcagaaacagaaccgacgcggagaggcggccacagaagatgagacacccagcgcgctgtagagggagaggagacgccagccagagagaggagaaaaaaaaaaaaagcgcgaggaggagcagaaaaaacaacacacgagggaggagggaacacgggccagaggggaacaggggggagtcaacaacggggggggaggaaaaggggaaaaccacccgaga

SEQ ID NO: 431933 - DNA, 2193 bp, Homo sapiens
ataggctagtagaggcatgcgcttaaatcggcaccgaggctgacaagagcatcttcagcgggcgagtccccggctcctccagctccttcctcctcttcctcctcctcctccacctccggcttttgggggatcactgtcctctctcggcagcagaatgagccggcaggtggtccgctccagcaagttccgccacgtgtttggacagccggccaaggccgaccagtgctatgaagatgtgcgcgtctcacagaccacctgggacagtggcttctgtgctgtcaaccctaagtttgtggccctgatctgtgaggccagcgggggaggggccttcctggtgctgcccctgggcaagactggacgtgtggacaagaatgcgcccacggtctgtggccacacagcccctgtgctagacatcgcctggtgcccgcacaatgacaacgtcattgccagtggctccgaggactgcacagtcatggtgtgggagatcccggatgggggcctgatgctgcccctgcgggagcccgtcgtcaccctggagggccacaccaagcgtgtgggcattgtggcctggcacaccacagcccagaacgtgctgctcagtgcaggttgtgacaacgtgatcatggtgtgggacgtgggcactggggcggccatgctgacactgggcccagaggtgcacccagacacgatctacagtgtggactggagccgagatggaggcctcatttgtacctcctgccgtgacaagcgcgtgcgcatcatcgagccccgcaaaggcactgtcgtagctgagaaggaccgtccccacgaggggacccggcccgtgcgtgcagtgttcgtgtcggaggggaagatcctgaccacgggcttcagccgcatgagtgagcggcaggtggcgctgtgggacacaaagcacctggaggagccgctgtccctgcaggagctggacaccagcagcggtgtcctgctgcccttctttgaccctgacaccaacatcgtctacctctgtggcaagggtgacagctcaatccggtactttgagatcacttccgaggcccctttcctgcactatctctccatgttcagttccaaggagtcccagcggggcatgggctacatgcccaaacgtggcctggaggtgaacaagtgtgagatcgccaggttctacaagctgcacgagcggaggtgtgagcccattgccatgacagtgcctcgaaagtcggacctgttccaggaggacctgtacccacccaccgcagggcccgaccctgccctcacggctgaggagtggctggggggtcgggatgctgggcccctcctcatctccctcaaggatggctacgtacccccaaagagccgggagctgagggtcaaccggggcctggacaccgggcgcaggagggcagcaccagaggccagtggcactcccagctcggatgccgtgtctcggctggaggaggagatgcggaagctccaggccacggtgcaggagctccagaagcgcttggacaggctggaggagacagtccaggccaagtagagccccgcagggcctccagcagggtcagccattcacacccatccactcacctcccattcccagccacatggcagagaaaaaaatcataataaaatggctttattttctggtacctcccagactctgatgactggtcccctagacacgcagtttgctgaaccaaccagccctagagcttcccctccaccgcgctgaggggactgacccatggcaggggatgtgggatgccccctgacttactacatcacaggaacagggccttcgtgggtagaaaccagccatgctgatgtgggccaggaggctgctctccgtttccgagctccttctcagagctgacacagctgaactatttaaggccctagcttagaacctcaataattcccaaatttaccaaaaatctgcctttcctagtcaaccaaaacatcacgttgcacgtgactctgctggcactgttgcttgtgaggaaatgaaccaaccatcacttacagggtaggcatcttttaaactgcaggtccaaagataaaaataacgagggaggctgggcatggggactcacgtctataatcccagcactgtgggaggctgaggcggcaggatcatttgagcccaggagtttgagacctgcctgagcaacacggcgagataccgtctct

SEQ ID NO: 431934 - DNA, 1631 bp, Homo sapiens
ataggctagtagaggcatgcgcttaaatcggcaccgaggctgacaagagcatcttcagcgggcgagtccccggctcctccagctccttcctcctcttcctcctcctcctccacctccggcttttgggggatcactgtcctctctcggcagcagaatgagccggcaggtggtccgctccagcaagttccgccacgtgtttggacagccggccaaggccgaccagtgctatgaagatgtgcgcgtctcacagaccacctgggacagtggcttctgtgctgtcaaccctaagtttgtggccctgatctgtgaggccagcgggggaggggccttcctggtgctgcccctgggcaagactggacgtgtggacaagaatgcgcccacggtctgtggccacacagcccctgtgctagacatcgcctggtgcccgcacaatgacaacgtcattgccagtggctccgaggactgcacagtcatggtgtgggagatcccggatgggggcctgatgctgcccctgcgggagcccgtcgtcaccctggagggccacaccaagcgtgtgggcattgtggcctggcacaccacagcccagaacgtgctgctcagtgcaggttgtgacaacgtgatcatggtgtgggacgtgggcactggggcggccatgctgacactgggcccagaggtgcacccagacacgatctacagtgtggactggagccgagatggaggcctcatttgtacctcctgccgtgacaagcgcgtgcgcatcatcgagccccgcaaaggcactgtcgtagctgagaaggaccgtccccacgaggggacccggcccgtgcgtgcagtgttcgtgtcggaggggaagatcctgaccacgggcttcagccgcatgagtgagcggcaggtggcgctgtgggacacaaagcacctggaggagccgctgtccctgcaggagctggacaccagcagcggtgtcctgctgcccttctttgaccctgacaccaacatcgtctacctctgtggcaagggtgacagctcaatccggtactttgagatcacttccgaggcccctttcctgcactatctctccatgttcagttccaaggagtcccagcggggcatgggctacatgcccaaacgtggcctggaggtgaacaagtgtgagatcgccaggttctacaagctgcacgagcggaggtgtgagcccattgccatgacagtgcctcgaaagtcggacctgttccaggaggacctgtacccacccaccgcagggcccgaccctgccctcacggctgaggagtggctggggggtcgggatgctgggcccctcctcatctccctcaaggatggctacgtacccccaaagagccgggagctgagggtcaaccggggcctggacaccgggcgcaggagggcagcaccagaggatgccgtgtctcggctggaggaggagatgcggaagctccaggccacggtgcaggagctccagaagcgcttggacaggctggaggagacagtccaggccaagtagagccccgcagggcctccagcagggtcagccattcacacccatccactcacctcccattcccagccacatggcagagaaaaaaatcataataaaatggctttattttctggta

SEQ ID NO: 431935 - DNA, 1756 bp, Homo sapiens
ataggctagtagaggcatgcgcttaaatcggcaccgaggctgacaagagcatcttcagcgggcgagtccccggctcctccagctccttcctcctcttcctcctcctcctccacctccggcttttgggggatcactgtcctctctcggcagcagaatgagccggcaggtggtccgctccagcaagttccgccacgtgtttggacagccggccaaggccgaccagtgctatgaagatgtgcgcgtctcacagaccacctgggacagtggcttctgtgctgtcaaccctaagtttgtggccctgatctgtgaggccagcgggggaggggccttcctggtgctgcccctgggcaagactggacgtgtggacaagaatgcgcccacggtctgtggccacacagcccctgtgctagacatcgcctggtgcccgcacaatgacaacgtcattgccagtggctccgaggactgcacagtcatggtgtgggagatcccggatgggggcctgatgctgcccctgcgggagcccgtcgtcaccctggagggccacaccaagcgtgtgggcattgtggcctggcacaccacagcccagaacgtgctgctcagtgcaggttgtgacaacgtgatcatggtgtgggacgtgggcactggggcggccatgctgacactgggcccagaggtgcacccagacacgatctacagtgtggactggagccgagatggaggcctcatttgtacctcctgccgtgacaagcgcgtgcgcatcatcgagccccgcaaaggcactgtcgtagctgagaaggaccgtccccacgaggggacccggcccgtgcgtgcagtgttcgtgtcggaggggaagatcctgaccacgggcttcagccgcatgagtgagcggcaggtggcgctgtgggacacaaagcacctggaggagccgctgtccctgcaggagctggacaccagcagcggtgtcctgctgcccttctttgaccctgacaccaacatcgtctacctctgtggcaagggtgacagctcaatccggtactttgagatcacttccgaggcccctttcctgcactatctctccatgttcagttccaaggagtcccagcggggcatgggctacatgcccaaacgtggcctggaggtgaacaagtgtgagatcgccaggtgactgacccccggccctgaccgcagcatgctccttgggcagtgggcagtcccaagcccacccaaccagactgtgggccccgctcaccttccccttcccacaggttctacaagctgcacgagcggaggtgtgagcccattgccatgacagtgcctcgaaagtcggacctgttccaggaggacctgtacccacccaccgcagggcccgaccctgccctcacggctgaggagtggctggggggtcgggatgctgggcccctcctcatctccctcaaggatggctacgtacccccaaagagccgggagctgagggtcaaccggggcctggacaccgggcgcaggagggcagcaccagaggccagtggcactcccagctcggatgccgtgtctcggctggaggaggagatgcggaagctccaggccacggtgcaggagctccagaagcgcttggacaggctggaggagacagtccaggccaagtagagccccgcagggcctccagcagggtcagccattcacacccatccactcacctcccattcccagccacatggcagagaaaaaaatcataataaaatggctttattttctggta

SEQ ID NO: 431936 - DNA, 1619 bp, Homo sapiens
  misc_feature (22)..(22): n is a, c, g, or t
  misc_feature (24)..(24): n is a, c, g, or t
  misc_feature (30)..(31): n is a, c, g, or t
taagcctaggctggtacggtcngngatttnnggatcccggctcctccagctccttcctcctcttcctcctcctcctccacctccggcttttgggggatcactgtcctctctcggcagcagaatgagccggcaggtggtccgctccagcaagttccgccacgtgtttggacagccggccaaggccgaccagtgctatgaagatgtgcgcgtctcacagaccacctgggacagtggcttctgtgctgtcaaccctaagtttgtggccctgatctgtgaggccagcgggggaggggccttcctggtgctgcccctgggcaagactggacgtgtggacaagaatgcgcccacggtctgtggccacacagcccctgtgctagacatcgcctggtgcccgcacaatgacaacgtcattgccagtggctccgaggactgcacagtcatggtgtgggagatcccggatgggggcctgatgctgcccctgcgggagcccgtcgtcaccctggagggccacaccaagcgtgtgggcattgtggcctggcacaccacagcccagaacgtgctgctcagtgcaggttgtgacaacgtgatcatggtgtgggacgtgggcactggggcggccatgctgacactgggcccagaggtgcacccagacacgatctacagtgtggactggagccgagatggaggcctcatttgtacctcctgccgtgacaagcgcgtgcgcatcatcgagccccgcaaaggcactgtcgtagctgagaaggaccgtccccacgaggggacccggcccgtgcgtgcagtgttcgtgtcggaggggaagatcctgaccacgggcttcagccgcatgagtgagcggcaggtggcgctgtgggacacaaagcacctggaggagccgctgtccctgcaggagctggacaccagcagcggtgtcctgctgcccttctttgaccctgacaccaacatcgtctacctctgtggcaagggtgacagctcaatccggtactttgagatcacttccgaggcccctttcctgcactatctctccatgttcagttccaaggagtcccagcggggcatgggctacatgcccaaacgtggcctggaggtgaacaagtgtgagatcgccaggttctacaagctgcacgagcggaggtgtgagcccattgccatgacagtgcctcgaaagtcggacctgttccaggaggacctgtacccacccaccgcagggcccgaccctgccctcacggctgaggagtggctggggggtcgggatgctgggcccctcctcatctccctcaaggatggctacgtacccccaaagagccgggagctgagggtcaaccggggcctggacaccgggcgcaggagggcagcaccagaggccagtggcactcccagctcggatgccgtgtctcggctggaggaggagatgcggaagctccaggccacggtgcaggagctccagaagcgcttggacaggctggaggagacagtccaggccaagtagagccccgcagggcctccagcagggtcagccattcacacccatccactcacctcccattcccagccacatggcagagaaaaaaatcataataaaatggctttattttctggta

SEQ ID NO: 431937 - DNA, 1902 bp, Homo sapiens
ataggctagtagaggcatgcgcttaaatcggcaccgaggctgacaagagcatcttcagcgggcgagtccccggctcctccagctccttcctcctcttcctcctcctcctccacctccggcttttgggggatcactgtcctctctcggcagcagaatgagccggcaggtggtccgctccagcaagttccgccacgtgtttggacagccggccaaggccgaccagtgctatgaagatgtgcgcgtctcacagaccacctgggacagtggcttctgtgctgtcaaccctaagtttgtggccctgatctgtgaggccagcgggggaggggccttcctggtgctgcccctgggcaagactggacgtgtggacaagaatgcgcccacggtctgtggccacacagcccctgtgctagacatcgcctggtgcccgcacaatgacaacgtcattgccagtggctccgaggactgcacagtcatggtgtgggagatcccggatgggggcctgatgctgcccctgcgggagcccgtcgtcaccctggagggccacaccaagcgtgtgggcattgtggcctggcacaccacagcccagaacgtgctgctcagtgcaggttgtgacaacgtgatcatggtgtgggacgtgggcactggggcggccatgctgacactgggcccagaggtgcacccagacacgatctacagtgtggactggagccgagatggaggcctcatttgtacctcctgccgtgacaagcgcgtgcgcatcatcgagccccgcaaaggcactgtcgtagctgagaaggaccgtccccacgaggggacccggcccgtgcgtgcagtgttcgtgtcggaggggaagatcctgaccacgggcttcagccgcatgagtgagcggcaggtggcgctgtgggacacaaagcacctggaggagccgctgtccctgcaggagctggacaccagcagcggtgtcctgctgcccttctttgaccctgacaccaacatcgtctacctctgtggcaagggtgacagctcaatccggtactttgagatcacttccgaggcccctttcctgcactatctctccatgttcagttccaaggagtcccagcggggcatgggctacatgcccaaacgtggcctggaggtgaacaagtgtgagatcgccaggttctacaagctgcacgagcggaggtgtgagcccattgccatgacagtgcctcgaaagtcggacctgttccaggaggacctgtacccacccaccgcagggcctccagcagggtcagccattcacacccatccactcacctcccattcccagccacatggcagagaaaaaaatcataataaaatggctttattttctggtacctcccagactctgatgactggtcccctagacacgcagtttgctgaaccaaccagccctagagcttcccctccaccgcgctgaggggactgacccatggcaggggatgtgggatgccccctgacttactacatcacaggaacagggccttcgtgggtagaaaccagccatgctgatgtgggccaggaggctgctctccgtttccgagctccttctcagagctgacacagctgaactatttaaggccctagcttagaacctcaataattcccaaatttaccaaaaatctgcctttcctagtcaaccaaaacatcacgttgcacgtgactctgctggcactgttgcttgtgaggaaatgaaccaaccatcacttacagggtaggcatcttttaaactgcaggtccaaagataaaaataacgagggaggctgggcatggggactcacgtctataatcccagcactgtgggaggctgaggcggcaggatcatttgagcccaggagtttgagacctgcctgagcaacacggcgagataccgtctct

SEQ ID NO: 431938 - DNA, 1361 bp, Homo sapiens
ataggctagtagaggcatgcgcttaaatcggcaccgaggctgacaagagcatcttcagcgggcgagtccccggctcctccagctccttcctcctcttcctcctcctcctccacctccggcttttgggggatcactgtcctctctcggcagcagaatgagccggcaggtggtccgctccagcaagttccgccacgtgtttggacagccggccaaggccgaccagtgctatgaagatgtgcgcgtctcacagaccacctgggacagtggcttctgtgctgtcaaccctaagtttgtggccctgatctgtgaggccagcgggggaggggccttcctggtgctgcccctgggcaagactggacgtgtggacaagaatgcgcccacggtctgtggccacacagcccctgtgctagacatcgcctggtgcccgcacaatgacaacgtcattgccagtggctccgaggactgcacagtcatggtgtgggagatcccggatgggggcctgatgctgcccctgcgggagcccgtcgtcaccctggagggccacaccaagcgtgtgggcattgtggcctggcacaccacagcccagaacgtgctgctcagtgcaggttgtgacaacgtgatcatggtgtgggacgtgggcactggggcggccatgctgacactgggcccagaggtgcacccagacacgatctacagtgtggactggagccgagatggaggcctcatttgtacctcctgccgtgacaagcgcgtgcgcatcatcgagccccgcaaaggcactgtcgtagctgagaaggaccgtccccacgaggggacccggcccgtgcgtgcagtgttcgtgtcggaggggaagatcctgaccacgggcttcagccgcatgagtgagcggcaggtggcgctgtgggacacaaagcacctggaggagccgctgtccctgcaggagctggacaccagcagcggtgtcctgctgcccttctttgaccctgacaccaacatcgtctacctctgtggcaagggtgacagctcaatccggtactttgagatcacttccgaggcccctttcctgcactatctctccatgttcagttccaaggagtcccagcggggcatgggctacatgcccaaacgtggcctggaggtgaacaagtgtgagatcgccaggttctacaagctgcacgagcggaggtgtgagcccattgccatgacagtgcctcgaaagtcggacctgttccaggaggacctgtacccacccaccgcagggcctccagcagggtcagccattcacacccatccactcacctcccattcccagccacatggcagagaaaaaaatcataataaaatggctttattttctggta

SEQ ID NO: 431939 - DNA, 1498 bp, Homo sapiens
ataggctagtagaggcatgcgcttaaatcggcaccgaggctgacaagagcatcttcagcgggcgagtccccggctcctccagctccttcctcctcttcctcctcctcctccacctccggcttttgggggatcactgtcctctctcggcagcagaatgagccggcaggtggtccgctccagcaagttccgccacgtgtttggacagccggccaaggccgaccagtgctatgaagatgtgcgcgtctcacagaccacctgggacagtggcttctgtgctgtcaaccctaagtttgtggccctgatctgtgaggccagcgggggaggggccttcctggtgctgcccctgggcaagactggacgtgtggacaagaatgcgcccacggtctgtggccacacagcccctgtgctagacatcgcctggtgcccgcacaatgacaacgtcattgccagtggctccgaggactgcacagtcatggtgtgggagatcccggatgggggcctgatgctgcccctgcgggagcccgtcgtcaccctggagggccacaccaagcgtgtgggcattgtggcctggcacaccacagcccagaacgtgctgctcagtgcaggttgtgacaacgtgatcatggtgtgggacgtgggcactggggcggccatgctgacactgggcccagaggtgcacccagacacgatctacagtgtggactggagccgagatggaggcctcatttgtacctcctgccgtgacaagcgcgtgcgcatcatcgagccccgcaaaggcactgtcgtagctgagaaggaccgtccccacgaggggacccggcccgtgcgtgcagtgttcgtgtcggaggggaagatcctgaccacgggcttcagccgcatgagtgagcggcaggtggcgctgtgggacacaaagcacctggaggagccgctgtccctgcaggagctggacaccagcagcggtgtcctgctgcccttctttgaccctgacaccaacatcgtctacctctgtggcaagggtgacagctcaatccggtactttgagatcacttccgaggcccctttcctgcactatctctccatgttcagttccaaggagtcccagcggggcatgggctacatgcccaaacgtggcctggaggtgaacaagtgtgagatcgccaggttctacaagctgcacgagcggaggtgtgagcccattgccatgacagtgcctcgaaagtcggacctgttccagccgggcgcaggagggcagcaccagaggccagtggcactcccagctcggatgccgtgtctcggctggaggaggagatgcggaagctccaggccacggtgcaggagctccagaagcgcttggacaggctggaggagacagtccaggccaagtagagccccgcagggcctccagcagggtcagccattcacacccatccactcacctcccattcccagccacatggcagagaaaaaaatcataataaaatggctttattttctggta

SEQ ID NO: 431940 - DNA, 1452 bp, Homo sapiens
ataggctagtagaggcatgcgcttaaatcggcaccgaggctgacaagagcatcttcagcgggcgagtccccggctcctccagctccttcctcctcttcctcctcctcctccacctccggcttttgggggatcactgtcctctctcggcagcagaatgagccggcaggtggtccgctccagcaagttccgccacgtgtttggacagccggccaaggccgaccagtgctatgaagatgtgcgcgtctcacagaccacctgggacagtggcttctgtgctgtcaaccctaagtttgtggccctgatctgtgaggccagcgggggaggggccttcctggtgctgcccctgggcaagactggacgtgtggacaagaatgcgcccacggtctgtggccacacagcccctgtgctagacatcgcctggtgcccgcacaatgacaacgtcattgccagtggctccgaggactgcacagtcatggtgtgggagatcccggatgggggcctgatgctgcccctgcgggagcccgtcgtcaccctggagggccacaccaagcgtgtgggcattgtggcctggcacaccacagcccagaacgtgctgctcagtgcaggttgtgacaacgtgatcatggtgtgggacgtgggcactggggcggccatgctgacactgggcccagaggtgcacccagacacgatctacagtgtggactggagccgagatggaggcctcatttgtacctcctgccgtgacaagcgcgtgcgcatcatcgagccccgcaaaggcactgtcgtagctgagaaggaccgtccccacgaggggacccggcccgtgcgtgcagtgttcgtgtcggaggggaagatcctgaccacgggcttcagccgcatgagtgagcggcaggtggcgctgtgggacacaaagcacctggaggagccgctgtccctgcaggagctggacaccagcagcggtgtcctgctgcccttctttgaccctgacaccaacatcgtctacctctgtggcaagggtgacagctcaatccggtactttgagatcacttccgaggcccctttcctgcactatctctccatgttcagttccaaggagtcccagcggggcatgggctacatgcccaaacgtggcctggaggtgaacaagtgtgagatcgccaggttctacaagctgcacgagcggaggtgtgagcccattgccatgacagtgcctcgaaagtcggacctgttccagggatgccgtgtctcggctggaggaggagatgcggaagctccaggccacggtgcaggagctccagaagcgcttggacaggctggaggagacagtccaggccaagtagagccccgcagggcctccagcagggtcagccattcacacccatccactcacctcccattcccagccacatggcagagaaaaaaatcataataaaatggctttattttctggta

SEQ ID NO: 431941 - DNA, 1460 bp, Homo sapiens
  misc_feature (1423)..(1423): n is a, c, g, or t
ataggctagtagaggcatgcgcttaaatcggcaccgaggctgacaagagcatcttcagcgggcgagtccccggctcctccagctccttcctcctcttcctcctcctcctccacctccggcttttgggggatcactgtcctctctcggcagcagaatgagccggcaggtggtccgctccagcaagttccgccacgtgtttggacagccggccaaggccgaccagtgctatgaagatgtgcgcgtctcacagaccacctgggacagtggcttctgtgctgtcaaccctaagtttgtggccctgatctgtgaggccagcgggggaggggccttcctggtgctgcccctgggcaagactggacgtgtggacaagaatgcgcccacggtctgtggccacacagcccctgtgctagacatcgcctggtgcccgcacaatgacaacgtcattgccagtggctccgaggactgcacagtcatggtgtgggagatcccggatgggggcctgatgctgcccctgcgggagcccgtcgtcaccctggagggccacaccaagcgtgtgggcattgtggcctggcacaccacagcccagaacgtgctgctcagtgcaggttgtgacaacgtgatcatggtgtgggacgtgggcactggggcggccatgctgacactgggcccagaggtgcacccagacacgatctacagtgtggactggagccgagatggaggcctcatttgtacctcctgccgtgacaagcgcgtgcgcatcatcgagccccgcaaaggcactgtcgtagctgagaaggaccgtccccacgaggggacccggcccgtgcgtgcagtgttcgtgtcggaggggaagatcctgaccacgggcttcagccgcatgagtgagcggcaggtggcgctgtgggacacaaagcacctggaggagccgctgtccctgcaggagctggacaccagcagcggtgtcctgctgcccttctttgaccctgacaccaacatcgtctacctctgtggcaagggtgacagctcaatccggtactttgagatcacttccgaggcccctttcctgcactatctctccatgttcagttccaaggagtcccagcggggcatgggctacatgcccaaacgtggcctggaggtgaacaagtgtgagatcgccaggttctacaagctgcacgagcggaggtgtgagcccattgccatgacagtgcctcgaaagtcggacctgttccagggagggagcctggtacccaccgcacccggccggcgggcccgaccctgccctcacggctgaggagtggctggggggtcgggatgctgggcccctcctcatctccctcaaggatggctacgtacccccaaagagccgggagctgagggtcaaccggggcctggacacccgggcgcacggacgggcacgcanccatgaggcgccaggtaggcacctcccccggctcccg

SEQ ID NO: 431942 - DNA, 1268 bp, Homo sapiens
ataggctagtagaggcatgcgcttaaatcggcaccgaggctgacaagagcatcttcagcgggcgagtccccggctcctccagctccttcctcctcttcctcctcctcctccacctccggcttttgggggatcactgtcctctctcggcagcagaatgagccggcaggtggtccgctccagcaagttccgccacgtgtttggacagccggccaaggccgaccagtgctatgaagatgtgcgcgtctcacagaccacctgggacagtggcttctgtgctgtcaaccctaagtttgtggccctgatctgtgaggccagcgggggaggggccttcctggtgctgcccctgggcaagactggacgtgtggacaagaatgcgcccacggtctgtggccacacagcccctgtgctagacatcgcctggtgcccgcacaatgacaacgtcattgccagtggctccgaggactgcacagtcatggtgtgggagatcccggatgggggcctgatgctgcccctgcgggagcccgtcgtcaccctggagggccacaccaagcgtgtgggcattgtggcctggcacaccacagcccagaacgtgctgctcagtgcaggttgtgacaacgtgatcatggtgtgggacgtgggcactggggcggccatgctgacactgggcccagaggtgcacccagacacgatctacagtgtggactggagccgagatggaggcctcatttgtacctcctgccgtgacaagcgcgtgcgcatcatcgagccccgcaaaggcactgtcgtagctgagaaggaccgtccccacgaggggacccggcccgtgcgtgcagtgttcgtgtcggaggggaagatcctgaccacgggcttcagccgcatgagtgagcggcaggtggcgctgtgggacacaaagcacctggaggagccgctgtccctgcaggagctggacaccagcagcggtgtcctgctgcccttctttgaccctgacaccaacatcgtctacctctgtggcaagggtgacagctcaatccggtactttgagatcacttccgaggcccctttcctgcactatctctccatgttcagttccaaggagtcccagcggggcatgggctacatgcccaaacgtggcctggaggtgaacaagtgtgagatcgccaggttctacaagctgcacgagcggaggtgtgagccatgctgacggccaaagcgacgtccgggctgtccccccggggcgaccttcccggtggaggctgggcggatggcct

SEQ ID NO: 431943 - DNA, 1620 bp, Homo sapiens
  misc_feature (1)..(1): n is a, c, g, or t
naccacctacccccacgcacaatcacccatctcctaacaccccgccaaaacaccaatcggctaggtagcgaggctgggtggcgccggcttttgggggatcactgtcctctctcggcagcagaatgagccggcaggtggtccgctccagcaagttccgccacgtgtttggacagccggccaaggccgaccagtgctatgaagatgtgcgcgtctcacagaccacctgggacagtggcttctgtgctgtcaaccctaagtttgtggccctgatctgtgaggccagcgggggaggggccttcctggtgctgcccctgggcaagactggacgtgtggacaagaatgcgcccacggtctgtggccacacagcccctgtgctagacatcgcctggtgcccgcacaatgacaacgtcattgccagtggctccgaggactgcacagtcatggtgtgggagatcccggatgggggcctgatgctgcccctgcgggagcccgtcgtcaccctggagggccacaccaagcgtgtgggcattgtggcctggcacaccacagcccagaacgtgctgctcagtgcaggttgtgacaacgtgatcatggtgtgggacgtgggcactggggcggccatgctgacactgggcccagaggtgcacccagacacgatctacagtgtggactggagccgagatggaggcctcatttgtacctcctgccgtgacaagcgcgtgcgcatcatcgagccccgcaaaggcactgtcgtagctgagaaggaccgtccccacgaggggacccggcccgtgcgtgcagtgttcgtgtcggaggggaagatcctgaccacgggcttcagccgcatgagtgagcggcaggtggcgctgtgggacacaaagcacctggaggagccgctgtccctgcaggagctggacaccagcagcggtgtcctgctgcccttctttgaccctgacaccaacatcgtctacctctgtggcaagggtgacagctcaatccggtactttgagatcacttccgaggcccctttcctgcactatctctccatgttcagttccaaggagtcccagcggggcatgggctacatgcccaaacgtggcctggaggtgaacaagtgtgagatcgccaggttctacaagctgcacgagcggaggtgtgagcccattgccatgacagtgcctcgaaagtcggacctgttccaggaggacctgtacccacccaccgcagggcccgaccctgccctcacggctgaggagtggctggggggtcgggatgctgggcccctcctcatctccctcaaggatggctacgtacccccaaagagccgggagctgagggtcaaccggggcctggacaccgggcgcaggagggcagcaccagaggccagtggcactcccagctcggatgccgtgtctcggctggaggaggagatgcggaagctccaggccacggtgcaggagctccagaagcgcttggacaggctggaggagacagtccaggccaagtagagccccgcagggcctccagcagggtcagccattcacacccatccactcacctcccattcccagccacatggcagagaaaaaaatcataataaaatggctttattttctggta

SEQ ID NO: 431944 - DNA, 1253 bp, Homo sapiens
ataggctagtagaggcatgcgcttaaatcggcaccgaggctgacaagagcatcttcagcgggcgagtccccggctcctccagctccttcctcctcttcctcctcctcctccacctccggcttttgggggatcactgtcctctctcggcagcagaatgagccggcaggtggtccgctccagcaagttccgccacgtgtttggacagccggccaaggccgaccagtgctatgaagatgtgcgcgtctcacagaccacctgggacagtggcttctgtgctgtcaaccctaagtttgtggccctgatctgtgaggccagcgggggaggggccttcctggtgctgcccctgggcaagactggacgtgtggacaagaatgcgcccacggtctgtggccacacagcccctgtgctagacatcgcctggtgcccgcacaatgacaacgtcattgccagtggctccgaggactgcacagtcatggtgtgggagatcccggatgggggcctgatgctgcccctgcgggagcccgtcgtcaccctggagggccacaccaagcgtgtgggcattgtggcctggcacaccacagcccagaacgtgctgctcagtgcaggttgtgacaacgtgatcatggtgtgggacgtgggcactggggcggccatgctgacactgggcccagaggtgcacccagacacgatctacagtgtggactggagccgagatggaggcctcatttgtacctcctgccgtgacaagcgcgtgcgcatcatcgagccccgcaaaggcactgtcgtagctgagaaggaccgtccccacgaggggacccggcccgtgcgtgcagtgttcgtgtcggaggggaagatcctgaccacgggcttcagccgcatgagtgagcggcaggtggcgctgtgggacacaaagcacctggaggagccgctgtccctgcaggagctggacaccagcagcggtgtcctgctgcccttctttgaccctgacaccgggcgcaggagggcagcaccagaggccagtggcactcccagctcggatgccgtgtctcggctggaggaggagatgcggaagctccaggccacggtgcaggagctccagaagcgcttggacaggctggaggagacagtccaggccaagtagagccccgcagggcctccagcagggtcagccattcacacccatccactcacctcccattcccagccacatggcagagaaaaaaatcataataaaatggctttattttctggta

SEQ ID NO: 431945 - DNA, 1163 bp, Homo sapiens
ataggctagtagaggcatgcgcttaaatcggcaccgaggctgacaagagcatcttcagcgggcgagtccccggctcctccagctccttcctcctcttcctcctcctcctccacctccggcttttgggggatcactgtcctctctcggcagcagaatgagccggcaggtggtccgctccagcaagttccgccacgtgtttggacagccggccaaggccgaccagtgctatgaagatgtgcgcgtctcacagaccacctgggacagtggcttctgtgctgtcaaccctaagtttgtggccctgatctgtgaggccagcgggggaggggccttcctggtgctgcccctgggcaagactggacgtgtggacaagaatgcgcccacggtctgtggccacacagcccctgtgctagacatcgcctggtgcccgcacaatgacaacgtcattgccagtggctccgaggactgcacagtcatggtgtgggagatcccggatgggggcctgatgctgcccctgcgggagcccgtcgtcaccctggagggccacaccaagcgtgtgggcattgtggcctggcacaccacagcccagaacgtgctgctcagtgcaggttgtgacaacgtgatcatggtgtgggacgtgggcactggggcggccatgctgacactgggcccagaggtgcacccagacacgatctacagtgtggactggagccgagatggaggcctcatttgtacctcctgccgtgacaagcgcgtgcgcatcatcgagccccgcaaaggcactgtcgtagctgagaaggaccgtccccacgaggggacccggcccgtgcgtgcagtgttcgtgtcggaggggaagatcctgaccacgggcttcagccgcatgagtgagcggcaggtggcgctgtgggacacaaagcacctggaggagccgctgtccctgcaggagctggacaccagcagcggtgtcctgctgcccttctttgaccctgacaccacggtgcaggagctccagaagcgcttggacaggctggaggagacagtccaggccaagtagagccccgcagggcctccagcagggtcagccattcacacccatccactcacctcccattcccagccacatggcagagaaaaaaatcataataaaatggctttattttctggta

SEQ ID NO: 431946 - DNA, 2842 bp, Homo sapiens
ataggctagtagaggcatgcgcttaaatcggcaccgaggctgacaagagcatcttcagcgggcgagtccccggctcctccagctccttcctcctcttcctcctcctcctccacctccggcttttgggggatcactgtcctctctcggcagcagaatgagccggcaggtggtccgctccagcaagttccgccacgtgtttggacagccggccaaggccgaccagtgctatgaagatgtgcgcgtctcacagaccacctgggacagtggcttctgtgctgtcaaccctaagtttgtggccctgatctgtgaggccagcgggggaggggccttcctggtgctgcccctgggcaaggtgagcccctggggccctggggggagcagctcctccaccggacccatggctctgtgcaggtcctgattaggtgacggtcaccaggccttccagggcctgtgttgccatctggaaaactgagctgggccccatgagccttacacttcctccagctcctctgtgctgtggctgtgtggaaactgacgctcagaaggagccaacacaagatgggtcacaccagtgaccaggactacagacagtcctgcagacccatgatcagccctcctgagcctcagcctggggctttctccccatggaaacacagagggggttgggatggggtctgggggccctggcagcgttctcagggttgggagggactctggctctgggcctgtctgaggacctagcaactctgtcccccagctcgcaggcagggatgatgcaagaggtgctctcccccacccgcagccctgccctcccctggagcctgctgccccctccgctggctggctgctgccccgcacccccagcacactcctgtgctctttggggggtaagacaggaaggggagatgggccccaagttgttaccttaaaagggctgatggaagcaaagagaagaggaagtggttgtcggggtgagagctgggcccgcgccccacatggctgtcacacaggaagccctgctgaagcagctgtccccggaagaagccatttccaaacctctgctcctgcctggggccagttgggacaggctccctggcccctctccttttgggaggagccagccctgcagccccaccactcacactcgctctctggggagctgcctccacccccccagcccccatacacctgtcctggctccagggccagttgtgcccatggaagcctcactcggggaagctggggtgggggtgccaaccctaagggcagagacagactgagacagagaccggcgggaactctgccagggtcttgcacggcccccaacctctgccatgcgtggccagccctcctggggtttgcccaggccattttgggactggaacaagagaagaacaacccgcccccgtccccaccccaggccctggtccagctcccagggacaccacagctttcctctctgggcctctctgaaggaggtgtggggaggttggattgggtttgggaggcaaaagcacctccaaggccctgctgtgcctttagactggacgtgtggacaagaatgcgcccacggtctgtggccacacagcccctgtgctagacatcgcctggtgcccgcacaatgacaacgtcattgccagtggctccgaggactgcacagtcatggtgtgggagatcccggatgggggcctgatgctgcccctgcgggagcccgtcgtcaccctggagggccacaccaagcgtgtgggcattgtggcctggcacaccacagcccagaacgtgctgctcagtgcaggttgtgacaacgtgatcatggtgtgggacgtgggcactggggcggccatgctgacactgggcccagaggtgcacccagacacgatctacagtgtggactggagccgagatggaggcctcatttgtacctcctgccgtgacaagcgcgtgcgcatcatcgagccccgcaaaggcactgtcgtagctgagaaggaccgtccccacgaggggacccggcccgtgcgtgcagtgttcgtgtcggaggggaagatcctgaccacgggcttcagccgcatgagtgagcggcaggtggcgctgtgggacacaaagcacctggaggagccgctgtccctgcaggagctggacaccagcagcggtgtcctgctgcccttctttgaccctgacaccaacatcgtctacctctgtggcaagggtgacagctcaatccggtactttgagatcacttccgaggcccctttcctgcactatctctccatgttcagttccaaggagtcccagcggggcatgggctacatgcccaaacgtggcctggaggtgaacaagtgtgagatcgccaggttctacaagctgcacgagcggaggtgtgagcccattgccatgacagtgcctcgaaagtcggacctgttccaggaggacctgtacccacccaccgcagggcccgaccctgccctcacggctgaggagtggctggggggtcgggatgctgggcccctcctcatctccctcaaggatggctacgtacccccaaagagccgggagctgagggtcaaccggggcctggacaccgggcgcaggagggcagcaccagaggccagtggcactcccagctcggatgccgtgtctcggctggaggaggagatgcggaagctccaggccacggtgcaggagctccagaagcgcttggacaggctggaggagacagtccaggccaagtagagccccgcagggcctccagcagggtcagccattcacacccatccactcacctcccattcccagccacatggcagagaaaaaaatcataataaaatggctttattttctggta

SEQ ID NO: 431947 - DNA, 1745 bp, Homo sapiens
ataggctagtagaggcatgcgcttaaatcggcaccgaggctgacaagagcatcttcagcgggcgagtccccggctcctccagctccttcctcctcttcctcctcctcctccacctccggcttttgggggatcactgtcctctctcggcagcagaatgagccggcaggtggtccgctccagcaagttccgccacgtgtttggacagccggccaaggccgaccagtgctatgaagatgtgcgcgtctcacagaccacctgggacagtggcttctgtgctgtcaaccctaagtttgtggccctgatctgtgaggccagcgggggaggggccttcctggtgctgcccctgggcaagactggacgtgtggacaagaatgcgcccacggtctgtggccacacagcccctgtgctagacatcgcctggtgcccgcacaatgacaacgtcattgccagtggctccgaggactgcacagtcatggtgtgggagatcccggatgggggcctgatgctgcccctgcgggagcccgtcgtcaccctggagggccacaccaagcgtgtgggcattgtggcctggcacaccacagcccagaacgtgctgctcagtgcaggtgctgcgggaggaggggcttgggggtggctcgtggcctgcagtggatgagggcaggaggctcatggcttctgacactgtggggaacgtgcaggttgtgacaacgtgatcatggtgtgggacgtgggcactggggcggccatgctgacactgggcccagaggtgcacccagacacgatctacagtgtggactggagccgagatggaggcctcatttgtacctcctgccgtgacaagcgcgtgcgcatcatcgagccccgcaaaggcactgtcgtagctgagaaggaccgtccccacgaggggacccggcccgtgcgtgcagtgttcgtgtcggaggggaagatcctgaccacgggcttcagccgcatgagtgagcggcaggtggcgctgtgggacacaaagcacctggaggagccgctgtccctgcaggagctggacaccagcagcggtgtcctgctgcccttctttgaccctgacaccaacatcgtctacctctgtggcaagggtgacagctcaatccggtactttgagatcacttccgaggcccctttcctgcactatctctccatgttcagttccaaggagtcccagcggggcatgggctacatgcccaaacgtggcctggaggtgaacaagtgtgagatcgccaggttctacaagctgcacgagcggaggtgtgagcccattgccatgacagtgcctcgaaagtcggacctgttccaggaggacctgtacccacccaccgcagggcccgaccctgccctcacggctgaggagtggctggggggtcgggatgctgggcccctcctcatctccctcaaggatggctacgtacccccaaagagccgggagctgagggtcaaccggggcctggacaccgggcgcaggagggcagcaccagaggccagtggcactcccagctcggatgccgtgtctcggctggaggaggagatgcggaagctccaggccacggtgcaggagctccagaagcgcttggacaggctggaggagacagtccaggccaagtagagccccgcagggcctccagcagggtcagccattcacacccatccactcacctcccattcccagccacatggcagagaaaaaaatcataataaaatggctttattttctggta

SEQ ID NO: 431948 - DNA, 1810 bp, Homo sapiens
ataggctagtagaggcatgcgcttaaatcggcaccgaggctgacaagagcatcttcagcgggcgagtccccggctcctccagctccttcctcctcttcctcctcctcctccacctccggcttttgggggatcactgtcctctctcggcagcagaatgagccggcaggtggtccgctccagcaagttccgccacgtgtttggacagccggccaaggccgaccagtgctatgaagatgtgcgcgtctcacagaccacctgggacagtggcttctgtgctgtcaaccctaagtttgtggccctgatctgtgaggccagcgggggaggggccttcctggtgctgcccctgggcaagactggacgtgtggacaagaatgcgcccacggtctgtggccacacagcccctgtgctagacatcgcctggtgcccgcacaatgacaacgtcattgccagtggctccgaggactgcacagtcatggtgtgggagatcccggatgggggcctgatgctgcccctgcgggagcccgtcgtcaccctggagggccacaccaagcgtgtgggcattgtggcctggcacaccacagcccagaacgtgctgctcagtgcaggttgtgacaacgtgatcatggtgtgggacgtgggcactggggcggccatgctgacactgggcccagaggtgcacccagacacgatctacagtgtggactggagccgagatggaggcctcatttgtacctcctgccgtgacaagcgcgtgcgcatcatcgagccccgcaaaggcactgtcgtagctgtgagtcgccatctaccctgacctttgaccctacagcctttatccttcttatccaccatcagccaggcccttggatgctgccctccctcgcctccacctgggactggccccgtagggtatgtacgggtgcctgacctaccacctccctttccttgcaggagaaggaccgtccccacgaggggacccggcccgtgcgtgcagtgttcgtgtcggaggggaagatcctgaccacgggcttcagccgcatgagtgagcggcaggtggcgctgtgggacacaaagcacctggaggagccgctgtccctgcaggagctggacaccagcagcggtgtcctgctgcccttctttgaccctgacaccaacatcgtctacctctgtggcaagggtgacagctcaatccggtactttgagatcacttccgaggcccctttcctgcactatctctccatgttcagttccaaggagtcccagcggggcatgggctacatgcccaaacgtggcctggaggtgaacaagtgtgagatcgccaggttctacaagctgcacgagcggaggtgtgagcccattgccatgacagtgcctcgaaagtcggacctgttccaggaggacctgtacccacccaccgcagggcccgaccctgccctcacggctgaggagtggctggggggtcgggatgctgggcccctcctcatctccctcaaggatggctacgtacccccaaagagccgggagctgagggtcaaccggggcctggacaccgggcgcaggagggcagcaccagaggccagtggcactcccagctcggatgccgtgtctcggctggaggaggagatgcggaagctccaggccacggtgcaggagctccagaagcgcttggacaggctggaggagacagtccaggccaagtagagccccgcagggcctccagcagggtcagccattcacacccatccactcacctcccattcccagccacatggcagagaaaaaaatcataataaaatggctttattttctggta

SEQ ID NO: 431949 - DNA, 1528 bp, Homo sapiens
ataggctagtagaggcatgcgcttaaatcggcaccgaggctgacaagagcatcttcagcgggcgagtccccggctcctccagctccttcctcctcttcctcctcctcctccacctccggcttttgggggatcactgtcctctctcggcagcagaatgagccggcaggtggtccgctccagcaagttccgccacgtgtttggacagccggccaaggccgaccagtgctatgaagatgtgcgcgtctcacagaccacctgggacagtggcttctgtgctgtcaaccctaagtttgtggccctgatctgtgaggccagcgggggaggggccttcctggtgctgcccctgggcaggtgtgggagatcccggatgggggcctgatgctgcccctgcgggagcccgtcgtcaccctggagggccacaccaagcgtgtgggcattgtggcctggcacaccacagcccagaacgtgctgctcagtgcaggttgtgacaacgtgatcatggtgtgggacgtgggcactggggcggccatgctgacactgggcccagaggtgcacccagacacgatctacagtgtggactggagccgagatggaggcctcatttgtacctcctgccgtgacaagcgcgtgcgcatcatcgagccccgcaaaggcactgtcgtagctgagaaggaccgtccccacgaggggacccggcccgtgcgtgcagtgttcgtgtcggaggggaagatcctgaccacgggcttcagccgcatgagtgagcggcaggtggcgctgtgggacacaaagcacctggaggagccgctgtccctgcaggagctggacaccagcagcggtgtcctgctgcccttctttgaccctgacaccaacatcgtctacctctgtggcaagggtgacagctcaatccggtactttgagatcacttccgaggcccctttcctgcactatctctccatgttcagttccaaggagtcccagcggggcatgggctacatgcccaaacgtggcctggaggtgaacaagtgtgagatcgccaggttctacaagctgcacgagcggaggtgtgagcccattgccatgacagtgcctcgaaagtcggacctgttccaggaggacctgtacccacccaccgcagggcccgaccctgccctcacggctgaggagtggctggggggtcgggatgctgggcccctcctcatctccctcaaggatggctacgtacccccaaagagccgggagctgagggtcaaccggggcctggacaccgggcgcaggagggcagcaccagaggccagtggcactcccagctcggatgccgtgtctcggctggaggaggagatgcggaagctccaggccacggtgcaggagctccagaagcgcttggacaggctggaggagacagtccaggccaagtagagccccgcagggcctccagcagggtcagccattcacacccatccactcacctcccattcccagccacatggcagagaaaaaaatcataataaaatggctttattttctggta

SEQ ID NO: 431950 - DNA, 1140 bp, Homo sapiens
ttgaggactctcagaggcacaaggagggccacaccaagcgtgtgggcattgtggcctggcacaccacagcccagaacgtgctgctcagtgcaggttgtgacaacgtgatcatggtgtgggacgtgggcactggggcggccatgctgacactgggcccagaggtgcacccagacacgatctacagtgtggactggagccgagatggaggcctcatttgtacctcctgccgtgacaagcgcgtgcgcatcatcgagccccgcaaaggcactgtcgtagctgagaaggaccgtccccacgaggggacccggcccgtgcgtgcagtgttcgtgtcggaggggaagatcctgaccacgggcttcagccgcatgagtgagcggcaggtggcgctgtgggacacaaagcacctggaggagccgctgtccctgcaggagctggacaccagcagcggtgtcctgctgcccttctttgaccctgacaccaacatcgtctacctctgtggcaagggtgacagctcaatccggtactttgagatcacttccgaggcccctttcctgcactatctctccatgttcagttccaaggagtcccagcggggcatgggctacatgcccaaacgtggcctggaggtgaacaagtgtgagatcgccaggttctacaagctgcacgagcggaggtgtgagcccattgccatgacagtgcctcgaaagtcggacctgttccaggaggacctgtacccacccaccgcagggcccgaccctgccctcacggctgaggagtggctggggggtcgggatgctgggcccctcctcatctccctcaaggatggctacgtacccccaaagagccgggagctgagggtcaaccggggcctggacaccgggcgcaggagggcagcaccagaggccagtggcactcccagctcggatgccgtgtctcggctggaggaggagatgcggaagctccaggccacggtgcaggagctccagaagcgcttggacaggctggaggagacagtccaggccaagtagagccccgcagggcctccagcagggtcagccattcacacccatccactcacctcccattcccagccacatggcagagaaaaaaatcataataaaatggctttattttctggta

SEQ ID NO: 431951 - DNA, 1839 bp, Homo sapiens
ataggctagtagaggcatgcgcttaaatcggcaccgaggctgacaagagcatcttcagcgggcgagtccccggctcctccagctccttcctcctcttcctcctcctcctccacctccggcttttgggggatcactgtcctctctcggcagcagaatgagccggcaggtggtccgctccagcaagttccgccacgtgtttggacagccggccaaggccgaccagtgctatgaagatgtgcgcgtctcacagaccacctgggacagtggcttctgtgctgtcaaccctaagtttgtggccctgatctgtgaggccagcgggggaggggccttcctggtgctgcccctgggcaagactggacgtgtggacaagaatgcgcccacggtctgtggccacacagcccctgtgctagacatcgcctggtgcccgcacaatgacaacgtcattgccagtggctccgaggactgcacagtcatggtgagtggtggtggggacccaggagctgggagaggggctctaggatgggatctgacatttggagtcctgaagactcactggcccctcctctgcggtgtgggagatcccggatgggggcctgatgctgcccctgcgggagcccgtcgtcaccctggagggccacaccaagcgtgtgggcattgtggcctggcacaccacagcccagaacgtgctgctcagtgcaggtgctgcgggaggaggggcttgggggtggctcgtggcctgcagtggatgagggcaggaggctcatggcttctgacactgtggggaacgtgcaggttgtgacaacgtgatcatggtgtgggacgtgggcactggggcggccatgctgacactgggcccagaggtgcacccagacacgatctacagtgtggactggagccgagatggaggcctcatttgtacctcctgccgtgacaagcgcgtgcgcatcatcgagccccgcaaaggcactgtcgtagctgagaaggaccgtccccacgaggggacccggcccgtgcgtgcagtgttcgtgtcggaggggaagatcctgaccacgggcttcagccgcatgagtgagcggcaggtggcgctgtgggacacaaagcacctggaggagccgctgtccctgcaggagctggacaccagcagcggtgtcctgctgcccttctttgaccctgacaccaacatcgtctacctctgtggcaagggtgacagctcaatccggtactttgagatcacttccgaggcccctttcctgcactatctctccatgttcagttccaaggagtcccagcggggcatgggctacatgcccaaacgtggcctggaggtgaacaagtgtgagatcgccaggttctacaagctgcacgagcggaggtgtgagcccattgccatgacagtgcctcgaaagtcggacctgttccaggaggacctgtacccacccaccgcagggcccgaccctgccctcacggctgaggagtggctggggggtcgggatgctgggcccctcctcatctccctcaaggatggctacgtacccccaaagagccgggagctgagggtcaaccggggcctggacaccgggcgcaggagggcagcaccagaggccagtggcactcccagctcggatgccgtgtctcggctggaggaggagatgcggaagctccaggccacggtgcaggagctccagaagcgcttggacaggctggaggagacagtccaggccaagtagagccccgcagggcctccagcagggtcagccattcacacccatccactcacctcccattcccagccacatggcagagaaaaaaatcataataaaatggctttattttctggta

SEQ ID NO: 431952 - DNA, 1152 bp, Homo sapiens
ataggctagtagaggcatgcgcttaaatcggcaccgaggctgacaagagcatcttcagcgggcgagtccccggctcctccagctccttcctcctcttcctcctcctcctccacctccggcttttgggggatcactgtcctctctcggcagcagaatgagccggcaggtggtccgctccagcaagttccgccacgtgtttggacagccggccaaggccgaccagtgctatgaagatgtgcgcgtctcacagaccacctgggacagtggcttctgtgctgtcaaccctaagtttgtggccctgatctgtgaggccagcgggggaggggccttcctggtgctgcccctgggcaagactggacgtgtggacaagaatgcgcccacggtctgtggccacacagcccctgtgctagacatcgcctggtgcccgcacaatgacaacgtcattgccagtggctccgaggactgcacagtcatggtgtgggagatcccggatgggggcctgatgctgcccctgcgggagcccgtcgtcaccctggagggccacaccaagcgtgtgggcattgtggcctggcacaccacagcccagaacgtgctgctcagtgcaggttgtgacaacgtgatcatggtgtgggacgtgggcactggggcggccatgctgacactgggcccagaggtgcacccagacacgatctaccattgccatgacagtgcctcgaaagtcggacctgttccaggaggacctgtacccacccaccgcagggcccgaccctgccctcacggctgaggagtggctggggggtcgggatgctgggcccctcctcatctccctcaaggatggctacgtacccccaaagagccgggagctgagggtcaaccggggcctggacaccgggcgcaggagggcagcaccagaggccagtggcactcccagctcggatgccgtgtctcggctggaggaggagatgcggaagctccaggccacggtgcaggagctccagaagcgcttggacaggctggaggagacagtccaggccaagtagagccccgcagggcctccagcagggtcagccattcacacccatccactcacctcccattcccagccacatggcagagaaaaaaatcataataaaatggctttattttctggta

SEQ ID NO: 431953 - DNA, 1140 bp, Homo sapiens
ataggctagtagaggcatgcgcttaaatcggcaccgaggctgacaagagcatcttcagcgggcgagtccccggctcctccagctccttcctcctcttcctcctcctcctccacctccggcttttgggggatcactgtcctctctcggcagcagaatgagccggcaggtggtccgctccagcaagttccgccacgtgtttggacagccggccaaggccgaccagtgctatgaagatgtgcgcgtctcacagaccacctgggacagtggcttctgtgctgtcaaccctaagtttgtggccctgatctgtgaggccagcgggggaggggccttcctggtgctgcccctgggcaaggtgagcccctggggccctggggggagcagctcctccaccggacccatggctctgtgcaggtcctgattaggtgacggtcaccaggccttccagggcctgtgttgccatctggaaaactgagctgggccccatgagccttacacttcctccagctcctctgtgctgtggctgtgtggaaactgacgctcagaaggagccaacacaagatgggtcacaccagtgaccaggactacagacagtcctgcagacccatgatcagccctcctgagcctcagcctggggctttctccccatggaaacacagagggggttgggatggggtctgggggccctggcagcgttctcagggttgggagggactctggctctgggcctgtctgaggacctagcaactctgtcccccagctcgcaggcagggatgatgcaagaggtgctctcccccacccgcagccctgccctcccctggagcctgctgccccctccgctggctggctgctgccccgcacccccagcacactcctgtgctctttggggggtaagacaggaaggggagatgggccccaagttgttaccttaaaagggctgatggaagcaaagagaagaggaagtggttgtcggggtgagagctgggcccgcgccccacatggctgtcacacaggaagccctgctgaagcagctgtccccggaagaagccatttccaaacctctgctcctgcctggggccagttgggacaggctccctggcccctgcacctcatgggacacacgggcagcagggggatactgag

SEQ ID NO: 431954 - DNA, 1312 bp, Homo sapiens
tcagctcggtaccattctaactatattcaaaactattcatttaaaaattggaatatattgactacatactttaaaagacttttttataatgggaaactttgaacataggcaaaaatagaataatagaaaagcccagcgtgcgacatcagtgtcaacagaggtccatatgtggccagtcttgtctcagccttttccccacccattcactcctctcccaaatccggatggttttaaggtgattttagccatcgaattccatatgactctgttctcaagtgtactggatacattcttgaaaatactcttgaacatattcttgaggatgagaaattcttacaaatgtatattttttgtgcccctgtgtctccccttccttgcctttcaaactcctctctctgtccctttgtctcctttcccccacccttctctctccactcccgggagtggagagagaaggaccgtccccacgaggggacccggcccgtgcgtgcagtgttcgtgtcggaggggaagatcctgaccacgggcttcagccgcatgagtgagcggcaggtggcgctgtgggacacaaagcacctggaggagccgctgtccctgcaggagctggacaccagcagcggtgtcctgctgcccttctttgaccctgacaccaacatcgtctacctctgtggcaagggtgacagctcaatccggtactttgagatcacttccgaggcccctttcctgcactatctctccatgttcagttccaaggagtcccagcggggcatgggctacatgcccaaacgtggcctggaggtgaacaagtgtgagatcgccaggttctacaagctgcacgagcggaggtgtgagcccattgccatgacagtgcctcgaaagtcggacctgttccaggaggacctgtacccacccaccgcagggcccgaccctgccctcacggctgaggagtggctggggggtcgggatgctgggcccctcctcatctccctcaaggatggctacgtacccccaaagagccgggagctgagggtcaaccggggcctggacaccgggcgcaggagggcagcaccagaggccagtggcactcccagctcggatgccgtgtctcggctggaggaggagatgcggaagctccaggccacggtgcaggagctccagaagcgcttggacaggctggaggagacagtccaggccaagtagagccccgcagggcctccagcagggtcagccattcacacccatccactcacctcccattcccagccacatggcagagaaaaaaatcataataaaatggctttattttctggta

SEQ ID NO: 431955 - DNA, 948 bp, Homo sapiens
ataggctagtagaggcatgcgcttaaatcggcaccgaggctgacaagagcatcttcagcgggcgagtccccggctcctccagctccttcctcctcttcctcctcctcctccacctccggcttttgggggatcactgtcctctctcggcagcagaatgagccggcaggtggtccgctccagcaagttccgccacgtgtttggacagccggccaaggccgaccagtgctatgaagatgtgcgcgtctcacagaccacctgggacagtggcttctgtgctgtcaaccctaagtttgtggccctgatctgtgaggccagcgggggaggggccttcctggtgctgcccctgggcaagactggacgtgtggacaagaatgcgcccacggtctgtggccacacagcccctgtgctagacatcgcctggtgcccgcacaatgacaacgtcattgccagtggctccgaggactgcacagtcatggtgtgggagatcccggatgggggcctgatgctgcccctgcgggagcccgtcgtcaccctggagggccacaccaagcgtgtgggcattgtggccctggggcggccatgctgacactgggcccagaggtgcacccagacacgatctacagtgtggactggagccgagatggaggcctcatttgtacctcctgccgtgacaagcgcgtgcgcatcatcgagccccgcaaaggcactgtcgtagctgagaaggaccgtccccacgaggggacccggcccgtgcgtgcagtgttcgtgtcggaggggaagatcctgaccacgggcttcagccgcatgagtgagcggcaggtggcgctgtgggacacaaagcacctggaggagccgctgtccctgcaggagctggacaccagcagcggtgtcctgctgcccttctttgaccctgacactgtgaactgggatcctctaagtactagccag

SEQ ID NO: 431956 - DNA, 5418 bp, Homo sapiens
cagaccacagggcagtgtgagtgtcggccaggttatcaggggcttcactgtgaaacctgcaaagagggcttttacctaaattacacttctgggctctgtcagccatgtgactgtagtccacatggagctctcagcataccgtgcaacagttctgggaaatgccagtgcaaagtgggtgtcattggctctatatgtgaccgatgccaagatggatattatggctttagtaagaatggctgcttgccctgccaatgcaataatcggtctgccagttgcgatgccctcacaggtgcttgtttaaactgccaggaaaatagcaaaggaaatcactgtgaagaatgtaaagaaggattttatcagagtcctgatgccactaaagaatgtcttcgctgcccttgttcagcagtgacatctacaggcagctgctctataaaatcgagtgaattggaacctgaatgtgaccagtgtaaagatggttacataggcccgaactgcaataaatgtgaaaatggctattacaattttgacagcatctgtagaaagtgccaatgtcacggccatgtggacccagttaaaactccaaagatttgtaagcccgagagtggtgagtgcatcaactgcctccataacaccactgggttttggtgtgagaactgcctagaaggttatgttcacgacctcgagggaaattgcatcaagaaagaagttattcttccaacacctgaaggttctaccattttggtttccaatgcctctttgaccacatcagtgcccacccctgttataaatagtacttttacccctacaaccctgcagactatcttttcagtaagcacttctgaaaacagcacttcagctttagctgatgtatcatggacccaatttaacatcatcattttgacagtcatcatcattgttgtggtgctgctaatgggatttgtgggggctgtatatatgtaccgcgagtaccaaaaccggaaactcaatgcccccttttggaccatcgagctgaaagaagacaatatcagtttcagcagctaccatgacagcattcccaatgcagatgtttcgggattgttggaagatgatggcaatgaagtggctcccaatgggcagctgaccctgacgacgcccatacataactacaaagcctaaggagctagaactgttctgaattgttaaaccacagtgcttgctaagacagagtcagcccctgggccagacaaagcctggctagagtttgctgagaaagcaaaggcaaatagtgcatctgaaattttcaggtacaaatttgtaatgcgcttagcctatctattgctcttagttttcccatgaagatctgaagcgttcactgtcattaggacttgaagtaaagtatatttttgtaccaaaccacatgggagtatggaaaggctgaaccccatagtgcagcccaaaaccactttgacctccagatagactcctggggaagcattcaccaagccagtggtaacaagatgatgaatgtggagggggaaaagactgctggaagacttcatctccattcctgaaacattttttttaaaacagtgtcagggattatattcgttttactatacaaaaggacatcattgaggaaaagcttgtttctaggctgtatcacagtaaataatcttgattgtttctagaacaggggtagaaaagtcccaagatcttcagaagggcttggttttttcctcccaggattcttgctcagtgatgagttgaaagcacaggataagcttctaagggaggaaggcagcattggggagcaggaggctgatggtcctcctcagggtctcagtgtaaatgataaattgtctaaaaataaggaatattcctgcctctagagaaataaggtgtacatagttaatgtagcatatctggtcgacgttgtatttgtatctatttgtaaaaaaaaaatcatgtcatattttatcatctggaatttatttgtacagcagttaatggtgttgtaaaaagaaaaatatggggattgcttaaaatactgtaaaatagatggcaatattgctagagctgggactctggtgagcatccgtcatttttagtccttcttgaggacattgctgaaatttataagaggtcgaatgtttctttctttcctttctcagtctaaaagtagagttatatgctctttgacttactatgattcaagcaatagattttgaagtcagtaatcgttaagctgggacataggatgcattctccaaaaacattaatctaattagacattagccaccctatatattttacatagattaatataaaacatatcctcattaaaaaatgtttttcttgaatgtaaaagatagtcttccaaaggatagaaatattttagttccaagagaaaagccatcatattacttgggatctgtagttttcatgcctatgaaatatttataatcctccctcaccccaaataaaaaatctcctacatgtgaacatagcctgtcactcatttgccatgaggtatgtgccatctccctgcagtgctatagttctcccattgtcttcctgtctggttaatgagcagctttgtagatgggtgtgtctagttagttcttgctttttgatggagttttttcctagaggccaactactgttgctctcgtttattatgatattgacattttgggttaagcaaggtgggtgggaaaggtggtcagatgttaaatataacttattaggaggaacagtgaactgtgaagtggttagaaaaaaaataaaaacttcttattagattagacctaggaaattcaagctgacccctttgcctaacttccctagagaaaaacctagaacttggtcatccctttataggagacccctaagttgttctcagggtttggagatgatgttctggagggagtacaagcaaataatctacttctggtaatctgagggtgctttgcgtatttggccattgctcagaagaatagaggttacattatattacattatatgaaaattatttagtttttctatagccctttgtagtttgcaaagcacttttccatatgtgtgtcctctcttccacaccatagccccctgaggaagtaattgttgtccccattttatagatgaaaaggctgaggcacagaggagctaaatatcttgttcaaggctatacaatgtgtgtgattattaggcttggaatcagggcctctaactctaaagcacatgttttttcaactatatgcagaaattgcctagccatggacacaagaaagctgggaggaagagttctacttgtggatgtttttaattttttttaaatatcaggagcaatccagggccatacagctatgaagcacttagtgaaaagaacacaagaagatttactaactgaagttagtattagtgattagaaaacaaaactgccagtttgtgcttcattaaggtgaactcatctctccaagcaggaagggaaaatttgctttccctagcagttgctgcatatgtgtgtacagactgcacaattctaagaaattgtgcaaaatggcatacctgtctttctcccagatacaccgccccctgccccccccaaaaaaggtcaggattaaaggtggtgagaagtgaacatttattaaacagaagttaaaccaatagagagaaaggaggtttgttggagtctaagaggattttgaccatgtagaaattccttgaaacagaccttaaaaggtattgaaaaattgaatcacaaagaaagtttacctttaaatacttgttaatggctcctagatcatggttataatttttctcaatgggaaaaaaagtcttaaaatttgttttaaataagatcctctaatgtctcgagctttttgattctggaaataatttgctttaaaatataaatcaatcagaaagtgatctaccactgaaatcattctaggaaactagcatgggatgcactgcacaatgttctttcctctaaaggcatgggccccataaactgtggcatctggcagcaggatgccatcagtcctttagaaagcctaattttgggccgggtgcggtggctcacgcctgtaatcccagcactttgggaggccgaggcgggtggatcacaaggtcaggagttcgagaccagcctggtcaacatggcgaaatcccgtctctactaaaaacacaaaaattagccgggtgtacgtgcctgtagtctcagctacttgggaggctgaggcaggagaatcacttgaacctgggaggcagaggttacagtgagccgagatggcgccatttcactccagcctgggcgacagagcaagactctgtctcaaaaaaaaggaagaaaaagaaagcctaatattgggagaatgtttgtgtaaggattggaaatctgtttatttttaaataagatagcactgatgtgaatcttatttggaaattacagatactgccattaagcgatgcttttatcttcattaattcattttggtaagcgcctatgcatttctgatggttaggtgccctaggtagtgttaagtatgtccgtgtcctcccttactcccctctcgctccctctaccctctatcccctagggttcttttattaatggaatttctccagttatagagaaaaaaatgacatttgaaaactaaagctcatttatattaatactaaggtcctgtgggcctagtgcgttactcttcccagtgatacctagattttaagagtagagaacagaggaaacatgggatgagaggagagaggttttttagacaacatttgtagacacctcaaattatatcactgttctctagcgccaatattcccaggtaaattgaccattaaagcaatactcactgacctactagtttattttggtcagctgagtaccatcaggatatttaaccctttaagtgctgttttgggagtagaaaactaaagcaacaatacttcctcttgacagctttgattggaatggggttattagatcattcaccttggtcctacactttttaggatgcttggtgaacataacaccacttataatgaacatccctggttcctatattttgggctatgtgggtaggaattgttacttgttgctgcagcagcagccctagaaagtaagcccagggcttcagatctaagttagtccaaaagctaaatgatttaaagtcaagttgtaatgctaggcataagcactctataatacattaaattataggccgagcaattagggaatgtttctgaaacattaaacttgtatttatgtcactaaaattctaacacaaacttaaaaaatgtgtctcatacatatgctgtactaggcttcatcatgcatttctaaatttgtgtatgatttgaatatatgaaagaatttatacaagagtgttatttaaaattattaaaaataaatgtatataatttgta

SEQ ID NO: 431957 - DNA, 5362 bp, Homo sapiens
cagaccacagggcagtgtgagtgtcggccaggttatcaggggcttcactgtgaaacctgcaaagagggcttttacctaaattacacttctgggctctgtcagccatgtgactgtagtccacatggagctctcagcataccgtgcaacagttctgggaaatgccagtgcaaagtgggtgtcattggctctatatgtgaccgatgccaagatggatattatggctttagtaagaatggctgcttgccctgccaatgcaataatcggtctgccagttgcgatgccctcacaggtgcttgtttaaactgccaggaaaatagcaaaggaaatcactgtgaagaatgtaaagaaggattttatcagagtcctgatgccactaaagaatgtcttcgctgcccttgttcagcagtgacatctacaggcagctgctctataaaatcgagtgaattggaacctgaatgtgaccagtgtaaagatggttacataggcccgaactgcaataaatgtgaaaatggctattacaattttgacagcatctgtagaaagtgccaatgtcacggccatgtggacccagttaaaactccaaagatttgtaagcccgagagtggtgagtgcatcaactgcctccataacaccactgggttttggtgtgagaactgcctagaaggttatgttcacgacctcgagggaaattgcatcaagaaagaagttattcttccaacacctgaaggttctaccattttggtttccaatgcctctttgaccacatcagtgcccacccctgttataaatagtacttttacccctacaaccctgcagactatcttttcagtaagcacttctgaaaacagcacttcagctttagctgatgtatcatggacccaatttaacatcatcattttgacagtcatcatcattgttgtggtgctgctaatgggatttgtgggggctgtatatatgtaccgcgagtaccaaaaccggaaactcaatgcccccttttggaccatcgagctgaaagaagacaatatcagtttcagcagctaccatgacagcattcccaatgcagatgtttcgggattgttggaagatgatggcaatgaagtggctcccaatgggcagctgaccctgacgacgcccatacataactacaaagcctaaggagctagaactgttctgaattgttaaaccacagtgcttgctaagacagagtcagcccctgggccagacaaagcctggctagagtttgctgagaaagcaaaggcaaatagtgcatctgaaattttcaggtacaaatttgtaatgcgcttagcctatctattgctcttagttttcccatgaagatctgaagcgttcactgtcattaggacttgaagtaaagtatatttttgtaccaaaccacatgggagtatggaaaggctgaaccccatagtgcagcccaaaaccactttgacctccagatagactcctggggaagcattcaccaagccagtggtaacaagatgatgaatgtggagggggaaaagactgctggaagacttcatctccattcctgaaacattttttttaaaacagtgtcagggattatattcgttttactatacaaaaggacatcattgaggaaaagcttgtttctaggctgtatcacagtaaataatcttgattgtttctagaacaggggtagaaaagtcccaagatcttcagaagggcttggttttttcctcccaggattcttgctcagtgatgagttgaaagcacaggataagcttctaagggaggaaggcagcattggggagcaggaggctgatggtcctcctcagggtctcagtgtaaatgataaattgtctaaaaataaggaatattcctgcctctagagaaataaggtgtacatagttaatgtagcatatctggtcgacgttgtatttgtatctatttgtaaaaaaaaaatcatgtcatattttatcatctggaatttatttgtacagcagttaatggtgttgtaaaaagaaaaatatggggattgcttaaaatactgtaaaatagatggcaatattgctagagctgggactctggtgagcatccgtcatttttagtccttcttgaggacattgctgaaatttataagaggtcgaatgtttctttctttcctttctcagtctaaaagtagagttatatgctctttgacttactatgattcaagcaatagattttgaagtcagtaatcgttaagctgggacataggatgcattctccaaaaacattaatctaattagacattagccaccctatatattttacatagattaatataaaacatatcctcattaaaaaatgtttttcttgaatgtaaaagatagtcttccaaaggatagaaatattttagttccaagagaaaagccatcatattacttgggatctgtagttttcatgcctatgaaatatttataatcctccctcaccccaaataaaaaatctcctacatgtgaacatagcctgtcactcatttgccatgaggtatgtgccatctccctgcagtgctatagttctcccattgtcttcctgtctggttaatgagcagctttgtagatgggtgtgtctagttagttcttgctttttgatggagttttttcctagaggccaactactgttgctctcgtttattatgatattgacattttgggttaagcaaggtgggtgggaaaggtggtcagatgttaaatataacttattaggaggaacagtgaactgtgaagtggttagaaaaaaaataaaaacttcttattagattagacctaggaaattcaagctgacccctttgcctaacttccctagagaaaaacctagaacttggtcatccctttataggagacccctaagttgttctcagggtttggagatgatgttctggagggagtacaagcaaataatctacttctggtaatctgagggtgctttgcgtatttggccattgctcagaagaatagaggttacattatattacattatatgaaaattatttagtttttctatagccctttgtagtttgcaaagcacttttccatatgtgtgtcctctcttccacaccatagccccctgaggaagtaattgttgtccccattttatagatgaaaaggctgaggcacagaggagctaaatatcttgttcaaggctatacaatgtgtgtgattattaggcttggaatcagggcctctaactctaaagcacatgttttttcaactatatgcagaaattgcctagccatggacacaagaaagctgggaggaagagttctacttgtggatgtttttaattttttttaaatatcaggagcaatccagggccatacagctatgaagcacttagtgaaaagaacacaagaagatttactaactgaagttagtattagtgattagaaaacaaaactgccagtttgtgcttcattaaggtgaactcatctctccaagcaggaagggaaaatttgctttccctagcagttgctgcatatgtgtgtacagactgcacaattctaagaaattgtgcaaaatggcatacctgtctttctcccagatacaccgccccctgccccccccaaaaaaggtcaggattaaaggtggtgagaagtgaacatttattaaacagaagttaaaccaatagagagaaaggaggtttgttggagtctaagaggattttgaccatgtagaaattccttgaaacagaccttaaaaggtattgaaaaattgaatcacaaagaaagtttacctttaaatacttgttaatggctcctagatcatggttataatttttctcaatgggaaaaaaagtcttaaaatttgttttaaataagatcctctaatgtctcgagctttttgattctggaaataatttgctttaaaatataaatcaatcagaaagtgatctaccactgaaatcattctaggaaactagcatgggatgcactgcacaatgttctttcctctaaaggcatgggccccataaactgtggcatctggcagcaggatgccatcagtcctttagaaagcctaattttgggccgggtgcggtggctcacgcctgtaatcccagcactttgggaggccgaggcgggtggatcacaaggtcaggagttcgagaccagcctggtcaacatggcgaaatcccgtctctagctgaggcaggagaatcacttgaacctgggaggcagaggttacagtgagccgagatggcgccatttcactccagcctgggcgacagagcaagactctgtctcaaaaaaaaggaagaaaaagaaagcctaatattgggagaatgtttgtgtaaggattggaaatctgtttatttttaaataagatagcactgatgtgaatcttatttggaaattacagatactgccattaagcgatgcttttatcttcattaattcattttggtaagcgcctatgcatttctgatggttaggtgccctaggtagtgttaagtatgtccgtgtcctcccttactcccctctcgctccctctaccctctatcccctagggttcttttattaatggaatttctccagttatagagaaaaaaatgacatttgaaaactaaagctcatttatattaatactaaggtcctgtgggcctagtgcgttactcttcccagtgatacctagattttaagagtagagaacagaggaaacatgggatgagaggagagaggttttttagacaacatttgtagacacctcaaattatatcactgttctctagcgccaatattcccaggtaaattgaccattaaagcaatactcactgacctactagtttattttggtcagctgagtaccatcaggatatttaaccctttaagtgctgttttgggagtagaaaactaaagcaacaatacttcctcttgacagctttgattggaatggggttattagatcattcaccttggtcctacactttttaggatgcttggtgaacataacaccacttataatgaacatccctggttcctatattttgggctatgtgggtaggaattgttacttgttgctgcagcagcagccctagaaagtaagcccagggcttcagatctaagttagtccaaaagctaaatgatttaaagtcaagttgtaatgctaggcataagcactctataatacattaaattataggccgagcaattagggaatgtttctgaaacattaaacttgtatttatgtcactaaaattctaacacaaacttaaaaaatgtgtctcatacatatgctgtactaggcttcatcatgcatttctaaatttgtgtatgatttgaatatatgaaagaatttatacaagagtgttatttaaaattattaaaaataaatgtatataatttgta

SEQ ID NO: 431958 - DNA, 396 bp, Homo sapiens
ttctggggtgttactcaatacaacttttaaattgatttacttttattcattgtctttgcttttatttgcagttctgggaaatgccagtgcaaagtgggtgtcattggctctatatgtgaccgatgccaagatggatattatggctttagtaagaatggctgcttgccctgccaatgcaataatcggtctgccagttgcgatgccctcacaggtacgtactttccttaactttgtcatgtaattattccactgttcttttaatttggaaatctttcagctataggttgattcttctgaaatagtttggaagggcctttatcttctaagtaggatgtactagatcacagcaagccaaactcctgctacaacaaacttgaaaaagtacgtaaattaaaa

SEQ ID NO: 431959 - DNA, 5532 bp, Homo sapiens
cagaccacagggcagtgtgagtgtcggccaggttatcaggggcttcactgtgaaacctgcaaagagggcttttacctaaattacacttctgggctctgtcagccatgtgactgtagtccacatggagctctcagcataccgtgcaacagttctgggaaatgccagtgcaaagtgggtgtcattggctctatatgtgaccgatgccaagatggatattatggctttagtaagaatggctgcttgccctgccaatgcaataatcggtctgccagttgcgatgccctcacaggtgcttgtttaaactgccaggaaaatagcaaaggaaatcactgtgaagaatgtaaagaaggattttatcagagtcctgatgccactaaagaatgtcttcgctgcccttgttcagcagtgacatctacaggcagctgctctataaaatcgagtgaattggaacctgaatgtgaccagtgtaaagatggttacataggcccgaactgcaataaatgtgaaaatggctattacaattttgacagcatctgtagaaagtgccaatgtcacggccatgtggacccagttaaaactccaaagatttgtaagcccgagagtggtgagtgcatcaactgcctccataacaccactgggttttggtgtgagaactgcctagaaggttatgttcacgacctcgagggaaattgcatcaagaaagaagttattcttccaacacctgaaggttctaccattttggtttccaatgcctctttgaccacatcagtgcccacccctgttataaatagtacttttacccctacaaccctgcagactatcttttcagtaagcacttctgaaaacagcacttcagctttagctgatgtatcatggacccaatttaacatcatcattttgacagtcatcatcattgttgtggtgctgctaatgggatttgtgggggctgtatatatgtaccgcgagtaccaaaaccggaaactcaatgcccccttttggaccatcgagctgaaagaagacaatatcagtttcagcagctaccatgacagcattcccaatgcagatgtttcgggattgttggaagatgatggcaatgaagtggctcccaatgggcagctgaccctgacgacgcccatacataactacaaagcctaaggagctagaactgttctgaattgttaaaccacagtgcttgctaagacagagtcagcccctgggccagacaaagcctggctagagtttgctgagaaagcaaaggcaaatagtgcatctgaaattttcaggtacaaatttgtaatgcgcttagcctatctattgctcttagttttcccatgaagatctgaagcgttcactgtcattaggacttgaagtaaagtatatttttgtaccaaaccacatgggagtatggaaaggctgaaccccatagtgcagcccaaaaccactttgacctccagatagactcctggggaagcattcaccaagccagtggtaacaagatgatgaatgtggagggggaaaagactgctggaagacttcatctccattcctgaaacattttttttaaaacagtgtcagggattatattcgttttactatacaaaaggacatcattgaggaaaagcttgtttctaggctgtatcacagtaaataatcttgattgtttctagaacaggggtagaaaagtcccaagatcttcagaagggcttggttttttcctcccaggattcttgctcagtgatgagttgaaagcacaggataagcttctaagggaggaaggcagcattggggagcaggaggctgatggtcctcctcagggtctcagtgtaaatgataaattgtctaaaaataaggaatattcctgcctctagagaaataaggtgtacatagttaatgtagcatatctggtcgacgttgtatttgtatctatttgtaaaaaaaaaatcatgtcatattttatcatctggaatttatttgtacagcagttaatggtgttgtaaaaagaaaaatatggggattgcttaaaatactgtaaaatagatggcaatattgctagagctgggactctggtgagcatccgtcatttttagtccttcttgaggacattgctgaaatttataagaggtcgaatgtttctttctttcctttctcagtctaaaagtagagttatatgctctttgacttactatgattcaagcaatagattttgaagtcagtaatcgttaagctgggacataggatgcattctccaaaaacattaatctaattagacattagccaccctatatattttacatagattaatataaaacatatcctcattaaaaaatgtttttcttgaatgtaaaagatagtcttccaaaggatagaaatattttagttccaagagaaaagccatcatattacttgggatctgtagttttcatgcctatgaaatatttataatcctccctcaccccaaataaaaaatctcctacatgtgaacatagcctgtcactcatttgccatgaggtatgtgccatctccctgcagtgctatagttctcccattgtcttcctgtctggttaatgagcagctttgtagatgggtgtgtctagttagttcttgctttttgatggagttttttcctagaggccaactactgttgctctcgtttattatgatattgacattttgggttaagcaaggtgggtgggaaaggtggtcagatgttaaatataacttattaggaggaacagtgaactgtgaagtggttagaaaaaaaataaaaacttcttattagattagacctaggaaattcaagctgacccctttgcctaacttccctagagaaaaacctagaacttggtcatccctttataggagacccctaagttgttctcagggtttggagatgatgttctggagggagtacaagcaaataatctacttctggtaatctgagggtgctttgcgtatttggccattgctcagaagaatagaggttacattatattacattatatgaaaattatttagtttttctatagccctttgtagtttgcaaagcacttttccatatgtgtgtcctctcttccacaccatagccccctgaggaagtaattgttgtccccattttatagatgaaaaggctgaggcacagaggagctaaatatcttgttcaaggctatacaatgtgtgtgattattaggcttggaatcagggcctctaactctaaagcacatgttttttcaactatatgcagaaattgcctagccatggacacaagaaagctgggaggaagagttctacttgtggatgtttttaattttttttaaatatcaggagcaatccagggccatacagctatgaagcacttagtgaaaagaacacaagaagatttactaactgaagttagtattagtgattagaaaacaaaactgccagtttgtgcttcattaaggtgaactcatctctccaagcaggaagggaaaatttgctttccctagcagttgctgcatatgtgtgtacagactgcacaattctaagaaattgtgcaaaatggcatacctgtctttctcccagatacaccgccccctgccccccccaaaaaaggtcaggattaaaggtggtgagaagtgaacatttattaaacagaagttaaaccaatagagagaaaggaggtttgttggagtctaagaggattttgaccatgtagaaattccttgaaacagaccttaaaaggtattgaaaaattgaatcacaaagaaagtttacctttaaatacttgttaatggctcctagatcatggttataatttttctcaatgggaaaaaaagtcttaaaatttgttttaaataagatcctctaatgtctcgagctttttgattctggaaataatttgctttaaaatataaatcaatcagaaagtgatctaccactgaaatcattctaggaaactagcatgggatgcactgcacaatgttctttcctctaaaggcatgggccccataaactgtggcatctggcagcaggatgccatcagtcctttagaaagcctaattttgggccgggtgcggtggctcacgcctgtaatcccagcactttgggaggccgaggcgggtggatcacaaggtcaggagttcgagaccagcctggtcaacatggcgaaatcccgtctctactaaaaacacaaaaattagccgggtgtacgtgcctgtagtctcagctacttgggaggctgaggcaggagaatcacttgaacctgggaggcagaggttacagtgagccgagatggcgccatttcactccagcctgggcgacagagcaagactctgtctcaaaaaaaaggaagaaaaagaaagcctaatattgggagaatgtttgtgtaaggattggaaatctgtttatttttaaataagatagcactgatgtgaatcttatttggaaattacagatactgccattaagcgatgcttttatcttcattaattcattttggtaagcgcctatgcatttctgatggttaggtgccctaggtagtgttaagtatgtccgtgtcctcccttactcccctctcgctccctctaccctctatcccctagggttcttttattaatggaatttctccagttatagagaaaaaaatgacatttgaaaactaaagctcatttatattaatactaaggtcctgtgggcctagtgcgttactcttcccagtgatacctagattttaagagtagagaacagaggaaacatgggatgagaggagagaggttttttagacaacatttgtagacacctcaaattatatcactgttctctagcgccaatattcccaggtaaattgaccattaaagcaatactcactgacctactagtttattttggtcagctgagtaccatcaggatatttaaccctttaagtgctgttttgggagtagaaaactaaagcaacaatacttcctcttgacagctttgattggaatggggttattagatcattcaccttggtcctacactttttaggatgcttggtgaacataacaccacttataatgaacatccctggttcctatattttgggctatgtgggtaggaattgttacttgttgctgcagcagcagccctagaaagtaagcccagggcttcagatctaagttagtccaaaagctaaatgatttaaagtcaagttgtaatgctaggcataagcactctataatacattaaattataggccgagcaattagggaatgtttctgaaacattaaacttgtatttatgtcactaaaattctaacacaaacttaaaaaatgtgtctcatacatatgctgtactaggcttcatcatgcatttctaaatttgtgtatgatttgaatatatgaaagaatttatacaagagtgttatttaaaattattaaaaataaatgtatataatttgtacctattgtagatttgttgtttacttttttgtgtggtcagagttgtttcatgtcttcaaatacatgccaaggatcatttactttcagcccacttcataaaaatctttgaactctt

SEQ ID NO: 431960 - DNA, 2402 bp, Homo sapiens
  misc_feature (1)..(1): n is a, c, g, or t
  misc_feature (3)..(3): n is a, c, g, or t
  misc_feature (6)..(6): n is a, c, g, or t
ncncgngggtccggcagccgctgctgctgctgctgctgctgctgccgccgccgccgccgccgtccctgcgtccttcggtctctgctcccgggacccgggctccgccgcagccagccagcatgtcggggatcaagaagcaaaagacggagaaccagcagaaatccaccaatgtagtctatcaggcccaccatgtgagcaggaataagagagggcaagtggttggaacaaggggtgggttccgaggatgtaccgtgtggctaacaggtctctctggtgctggaaaaacaacgataagttttgccctggaggagtaccttgtctcccatgccatcccttgttactccctggatggggacaatgtccgtcatggccttaacagaaatctcggattctctcctggggacagagaggaaaatatccgccggattgctgaggtggctaagctgtttgctgatgctggtctggtctgcattaccagctttatttctccattcgcaaaggatcgtgagaatgcccgcaaaatacatgaatcagcagggctgccattctttgaaatatttgtagatgcacctctaaatatttgtgaaagcagagacgtaaaaggcctctataaaagggccagagctggggagattaaaggatttacaggtattgattctgattatgagaaacctgaaactcctgagcgtgtgcttaaaaccaatttgtccacagtgagtgactgtgtccaccaggtagtggaacttctgcaagagcagaacattgtaccctatactataatcaaagatatccacgaactctttgtgccggaaaacaaacttgaccacgtccgagctgaggctgaaactctcccttcattatcaattactaagctggatctccagtgggtccaggttttgagcgaaggctgggccactcccctcaaaggtttcatgcgggagaaggagtacttacaggttatgcactttgacaccctgctagatgatggcgtgatcaacatgagcatccccattgtactgcccgtctctgcagaggataagacacggctggaagggtgcagcaagtttgtcctggcacatggtggacggagggtagctatcttacgagacgctgaattctatgaacacagaaaagaggaacgctgttcccgtgtttgggggacaacatgtacaaaacacccccatatcaaaatggtgatggaaagtggggactggctggttggtggagaccttcaggtgctggagaaaataagatggaatgatgggctggaccaataccgtctgacacctctggagctcaaacagaaatgtaaagaaatgaatgctgatgcggtgtttgcattccagttgcgcaatcctgtccacaatggccatgccctgttgatgcaggacactcgccgcaggctcctagagaggggctacaagcacccggtcctcctactacaccctctgggcggctggaccaaggatgacgatgtgcctctagactggcggatgaagcagcacgcggctgtgctcgaggaaggggtcctggatcccaagtcaaccattgttgccatctttccgtctcccatgttatatgctggccccacagaggtccagtggcactgcaggtcccggatgattgcgggtgccaatttctacattgtggggagggaccctgcaggaatgccccatcctgaaaccaagaaggatctgtatgaacccactcatgggggcaaggtcttgagcatggcccctggcctcacctctgtggaaatcattccattccgagtggctgcctacaacaaagccaaaaaagccatggacttctatgatccagcaaggcacaatgagtttgacttcatctcaggaactcgaatgaggaagctcgcccgggaaggagagaatcccccagatggcttcatggcccccaaagcatggaaggtcctgacagattattacaggtccctggagaagaactaagcctttggctccagagtttctttctgaagtgctctttgattaccttttctatttttatgattagatgctttgtattaaattgcttctcaatgatgcattttaatcttttataatgaagtaaaagttgtgtctataattaaaaaaatatatatatatatacacacacacatatacatacaaagtcaaactgaagaccaaatcttagcaggtaaaagcaatattcttatacatttcataataaaattagctctatgtattttctactgcacctgagcaggcaggtcccagatttcttaaggctttgtttgaccatgtgtctagttacttgctgaaaagtgaatatattttccagcatgtcttgacaacctgtactcttccaatgtcatttatcagttgtaaaatatatcagattgtgtcctcttctgtacaattgacaaa

SEQ ID NO: 431961 - DNA, 808 bp, Homo sapiens
tcctttaaactgcaatttattgtgaatagggaggcactggaaagtaaaatccacatagttctgtagaatagtaagatttgagtgttcttgtccggctagcctgtttggagaagagatgaggaaatacaaccttgagttatgagggaggaatcttatctttagagctcctatcctacctaatataacaaagcatgaagagtgcacggagtcttagaacctcagtgattttcttgcaattcttagttgactcacattgctgaattacttttaaagtagaataaaggtgtctccataaaccatgacctacagatttgacccacaatgaccagcatgtcccttatggacattttctaggtccagtggcactgcaggtcccggatgattgcgggtgccaatttctacattgtggggagggaccctgcaggaatgccccatcctgaaaccaagaaggatctgtatgaacccactcatgggggcaaggtcttgagcatggcccctggcctcacctctgtggaaatcattccattccgagtggctgcctacaacaaagccaaaaaagccatggacttctatgatccagcaaggtaggttttcagaggaaaattcttttatcaacatctgtataaaagaaatgatgaggcagaatttgggccctttgaaaaactctccagtgcattgccacatgctcccaagtggactgagtcccttgagagtcaagacgtggtcttataaattttatgtcccctaaaattgtactacagtcttctgcatatagtagatggtccataaatatttatggacaccgtgg

SEQ ID NO: 431962 - DNA, 3703 bp, Homo sapiens
  misc_feature (1)..(1): n is a, c, g, or t
  misc_feature (3)..(3): n is a, c, g, or t
  misc_feature (6)..(6): n is a, c, g, or t
ncncgngggtccggcagccgctgctgctgctgctgctgctgctgccgccgccgccgccgccgtccctgcgtccttcggtctctgctcccgggacccgggctccgccgcagccagccagcatgtcggggatcaagaagcaaaagacggagaaccagcagaaatccaccaatgtagtctatcaggcccaccatgtgagcaggaataagagagggcaagtggttggaacaaggggtgggttccgaggatgtaccgtgtggctaacaggtctctctggtgctggaaaaacaacgataagttttgccctggaggagtaccttgtctcccatgccatcccttgttactccctggatggggacaatgtccgtcatggccttaacagaaatctcggattctctcctggggacagagaggaaaatatccgccggattgctgaggtggctaagctgtttgctgatgctggtctggtctgcattaccagctttatttctccattcgcaaaggatcgtgagaatgcccgcaaaatacatgaatcagcagggctgccattctttgaaatatttgtagatgcacctctaaatatttgtgaaagcagagacgtaaaaggcctctataaaagggccagagctggggagattaaaggatttacaggtattgattctgattatgagaaacctgaaactcctgagcgtgtgcttaaaaccaatttgtccacagtgagtgactgtgtccaccaggtagtggaacttctgcaagagcagaacattgtaccctatactataatcaaagatatccacgaactctttgtgccggaaaacaaacttgaccacgtccgagctgaggctgaaactctcccttcattatcaattactaagctggatctccagtgggtccaggttttgagcgaaggctgggccactcccctcaaaggtttcatgcgggagaaggagtacttacaggttatgcactttgacaccctgctagatgatggcgtgatcaacatgagcatccccattgtactgcccgtctctgcagaggataagacacggctggaagggtgcagcaagtttgtcctggcacatggtggacggagggtagctatcttacgagacgctgaattctatgaacacagaaaagaggaacgctgttcccgtgtttgggggacaacatgtacaaaacacccccatatcaaaatggtgatggaaagtggggactggctggttggtggagaccttcaggtgctggagaaaataagatggaatgatgggctggaccaataccgtctgacacctctggagctcaaacagaaatgtaaagaaatgaatgctgatgcggtgtttgcattccagttgcgcaatcctgtccacaatggccatgccctgttgatgcaggacactcgccgcaggctcctagagaggggctacaagcacccggtcctcctactacaccctctgggcggctggaccaaggatgacgatgtgcctctagactggcggatgaagcagcacgcggctgtgctcgaggaaggggtcctggatcccaagtcaaccattgttgccatctttccgtctcccatgttatatgctggccccacagaggtccagtggcactgcaggtcccggatgattgcgggtgccaatttctacattgtggggagggaccctgcaggaatgccccatcctgaaaccaagaaggatctgtatgaacccactcatgggggcaaggtcttgagcatggcccctggcctcacctctgtggaaatcattccattccgagtggctgcctacaacaaagccaaaaaagccatggacttctatgatccagcaaggcacaatgagtttgacttcatctcaggaactcgaatgaggaagctcgcccgggaaggagagaatcccccagatggcttcatggcccccaaagcatggaaggtcctgacagattattacaggtccctggagaagaactaagcctttggctccagagtttctttctgaagtgctctttgattaccttttctatttttatgattagatgctttgtattaaattgcttctcaatgatgcattttaatcttttataatgaagtaaaagttgtgtctataattaaaaaaatatatatatatatacacacacacatatacatacaaagtcaaactgaagaccaaatcttagcaggtaaaagcaatattcttatacatttcataataaaattagctctatgtattttctactgcacctgagcaggcaggtcccagatttcttaaggctttgtttgaccatgtgtctagttacttgctgaaaagtgaatatattttccagcatgtcttgacaacctgtactcttccaatgtcatttatcagttgtaaaatatatcagattgtgtcctcttctgtacaattgacaaaaaaaaaaatttttttttctcactctaaaagaggtgtggctcacatcaagattcttcctgatattttacctcatgctgtacaaagccttaatgttgtaatcatatcttacgtgttgaagacctgactggagaaacaaaatgtgcaataacgtgaattttatcttagagatctgtgcagcctatttctgtcacaaaagttatattgtctaataagagaagtcttaatggcctctgtgaataatgtaactccagttacacggtgacttttaatagcatacagtgatttgatgaaaggacgtcaaacaatgtggcgatgtcgtggaaagttatctttcccgctctttgctgtggtcattgtgtcttgcagaaaggatggccctgatgcagcagcagcgccagctgtaataaaaaataattcacactatcagactagcaaggcactagaactggaaaagaccacagaaaacaaagaatccaaccctttcatcttacaggtgaacaaactgtgatgatgcacatgtatgtgttttgtaagctgtgagcaccgtaacaaaatgtaaatttgccattattaggaagtgctggtggcagtgaagaagcacccaggccacttgactcccagtctggtgccctgtctacaccagacaacacaggagctgggtcagattcccctcagctgcttaacaaagttcctcgaacagaaagtgcttacaaagctgccttctcggatactgaaaggtcgagttttctgaactgcactgattttattgcagttgaaaaaaaaaaaaaaaaagctattccaaagatttcaagctgttctgagacatcttctgatggctttacttcctgagaggcaatgtttttactttatgcataattcattgttgccaaggaataaagtgaagaaacagcaccttttaatatataggtctctctggaagagacctaaattagaaagagaaaactgtgacaattttcatattctcattcttaaaaaacactaatcttaactaacaaaagttcttttgagaataagttacacacaatggccacagcagtttgtctttaatagtatagtgcctatactcatgtaatcggttactcactactgcctttaaaaaaaaaaaccagcatatttattgaaaacatgagacaggattatagtgccttaaccgatatattttgtgacttaaaaaatacatttaaaactgctcttctgctctagtaccatgcttagtgcaaatgattatttctatgtacaactgatgcttgttcttattttaataaatttatcagagtgaa

SEQ ID NO: 431963 - DNA, 3951 bp, Homo sapiens
  misc_feature (1)..(1): n is a, c, g, or t
  misc_feature (3)..(3): n is a, c, g, or t
  misc_feature (6)..(6): n is a, c, g, or t
ncncgngggtccggcagccgctgctgctgctgctgctgctgctgccgccgccgccgccgccgtccctgcgtccttcggtctctgctcccgggacccgggctccgccgcagccagccagcatgtcggggatcaagaagcaaaagacggagaaccagcagaaatccaccaatgtagtctatcaggcccaccatgtgagcaggaataagagagggcaagtggttggaacaaggggtgggttccgaggatgtaccgtgtggctaacaggtctctctggtgctggaaaaacaacgataagttttgccctggaggagtaccttgtctcccatgccatcccttgttactccctggatggggacaatgtccgtcatggccttaacagaaatctcggattctctcctggggacagagaggaaaatatccgccggattgctgaggtggctaagctgtttgctgatgctggtctggtctgcattaccagctttatttctccattcgcaaaggatcgtgagaatgcccgcaaaatacatgaatcagcagggctgccattctttgaaatatttgtagatgcacctctaaatatttgtgaaagcagagacgtaaaaggcctctataaaagggccagagctggggagattaaaggatttacaggtattgattctgattatgagaaacctgaaactcctgagcgtgtgcttaaaaccaatttgtccacagtgagtgactgtgtccaccaggtagtggaacttctgcaagagcagaacattgtaccctatactataatcaaagatatccacgaactctttgtgccggaaaacaaacttgaccacgtccgagctgaggctgaaactctcccttcattatcaattactaagctggatctccagtgggtccaggttttgagcgaaggctgggccactcccctcaaaggtttcatgcgggagaaggagtacttacaggttatgcactttgacaccctgctagatgatggcgtgatcaacatgagcatccccattgtactgcccgtctctgcagaggataagacacggctggaagggtgcagcaagtttgtcctggcacatggtggacggagggtagctatcttacgagacgctgaattctatgaacacagaaaagaggaacgctgttcccgtgtttgggggacaacatgtacaaaacacccccatatcaaaatggtgatggaaagtggggactggctggttggtggagaccttcaggtgctggagaaaataagatggaatgatgggctggaccaataccgtctgacacctctggagctcaaacagaaatgtaaagaaatgaatgctgatgcggtgtttgcattccagttgcgcaatcctgtccacaatggccatgccctgttgatgcaggacactcgccgcaggctcctagagaggggctacaagcacccggtcctcctactacaccctctgggcggctggaccaaggatgacgatgtgcctctagactggcggatgaagcagcacgcggctgtgctcgaggaaggggtcctggatcccaagtcaaccattgttgccatctttccgtctcccatgttatatgctggccccacagaggtccagtggcactgcaggtcccggatgattgcgggtgccaatttctacattgtggggagggaccctgcaggaatgccccatcctgaaaccaagaaggatctgtatgaacccactcatgggggcaaggtcttgagcatggcccctggcctcacctctgtggaaatcattccattccgagtggctgcctacaacaaagccaaaaaagccatggacttctatgatccagcaaggcacaatgagtttgacttcatctcaggaactcgaatgaggaagctcgcccgggaaggagagaatcccccagatggcttcatggcccccaaagcatggaaggtcctgacagattattacaggtccctggagaagaactaagcctttggctccagagtttctttctgaagtgctctttgattaccttttctatttttatgattagatgctttgtattaaattgcttctcaatgatgcattttaatcttttataatgaagtaaaagttgtgtctataattaaaaaaatatatatatatatacacacacacatatacatacaaagtcaaactgaagaccaaatcttagcaggtaaaagcaatattcttatacatttcataataaaattagctctatgtattttctactgcacctgagcaggcaggtcccagatttcttaaggctttgtttgaccatgtgtctagttacttgctgaaaagtgaatatattttccagcatgtcttgacaacctgtactcttccaatgtcatttatcagttgtaaaatatatcagattgtgtcctcttctgtacaattgacaaaaaaaaaaatttttttttctcactctaaaagaggtgtggctcacatcaagattcttcctgatattttacctcatgctgtacaaagccttaatgttgtaatcatatcttacgtgttgaagacctgactggagaaacaaaatgtgcaataacgtgaattttatcttagagatctgtgcagcctatttctgtcacaaaagttatattgtctaataagagaagtcttaatggcctctgtgaataatgtaactccagttacacggtgacttttaatagcatacagtgatttgatgaaaggacgtcaaacaatgtggcgatgtcgtggaaagttatctttcccgctctttgctgtggtcattgtgtcttgcagaaaggatggccctgatgcagcagcagcgccagctgtaataaaaaataattcacactatcagactagcaaggcactagaactggaaaagaccacagaaaacaaagaatccaaccctttcatcttacaggtgaacaaactgtgatgatgcacatgtatgtgttttgtaagctgtgagcaccgtaacaaaatgtaaatttgccattattaggaagtgctggtggcagtgaagaagcacccaggccacttgactcccagtctggtgccctgtctacaccagacaacacaggagctgggtcagattcccctcagctgcttaacaaagttcctcgaacagaaagtgcttacaaagctgccttctcggatactgaaaggtcgagttttctgaactgcactgattttattgcagttgaaaaaaaaaaaaaaaaagctattccaaagatttcaagctgttctgagacatcttctgatggctttacttcctgagaggcaatgtttttactttatgcataattcattgttgccaaggaataaagtgaagaaacagcaccttttaatatataggtctctctggaagagacctaaattagaaagagaaaactgtgacaattttcatattctcattcttaaaaaacactaatcttaactaacaaaagttcttttgagaataagttacacacaatggccacagcagtttgtctttaatagtatagtgcctatactcatgtaatcggttactcactactgcctttaaaaaaaaaaaccagcatatttattgaaaacatgagacaggattatagtgccttaaccgatatattttgtgacttaaaaaatacatttaaaactgctcttctgctctagtaccatgcttagtgcaaatgattatttctatgtacaactgatgcttgttcttattttaataaatttatcagagtgaaaaaaaacaacaacaaacaaacaaaaaacaaaaaaacttgtggtggggcgcggcctggggccctgagaaaaaggacttttaaaaccatcttggtgggggcgcgcgggggcgccaagtgtggtgattggcaaccgtgtgacactaacgcggggtcgcaaaggggaaaccgcgggcacacaaagtcggggtggtgctcctccccaaataaaaaaacgcgcgggggaaccggaccgctccggagacaatcag

SEQ ID NO: 431964 - DNA, 3780 bp, Homo sapiens
  misc_feature (1)..(1): n is a, c, g, or t
  misc_feature (3)..(3): n is a, c, g, or t
  misc_feature (6)..(6): n is a, c, g, or t
ncncgngggtccggcagccgctgctgctgctgctgctgctgctgccgccgccgccgccgccgtccctgcgtccttcggtctctgctcccgggacccgggctccgccgcagccagccagcatgtcggggatcaagaagcaaaagacggagaaccagcagaaatccaccaatgtagtctatcaggcccaccatgtgagcaggaataagagagggcaagtggttggaacaaggggtgggttccgaggatgtaccgtgtggctaacaggtctctctggtgctggaaaaacaacgataagttttgccctggaggagtaccttgtctcccatgccatcccttgttactccctggatggggacaatgtccgtcatggccttaacagaaatctcggattctctcctggggacagagaggaaaatatccgccggattgctgaggtggctaagctgtttgctgatgctggtctggtctgcattaccagctttatttctccattcgcaaaggatcgtgagaatgcccgcaaaatacatgaatcagcagggctgccattctttgaaatatttgtagatgcacctctaaatatttgtgaaagcagagacgtaaaaggcctctataaaagggccagagctggggagattaaaggatttacaggtattgattctgattatgagaaacctgaaactcctgagcgtgtgcttaaaaccaatttgtccacagtgagtgactgtgtccaccaggtagtggaacttctgcaagagcagaacattgtaccctatactataatcaaagatatccacgaactctttgtgccggaaaacaaacttgaccacgtccgagctgaggctgaaactctcccttcattatcaattactaagctggatctccagtgggtccaggttttgagcgaaggctgggccactcccctcaaaggtttcatgcgggagaaggagtacttacaggttatgcactttgacaccctgctagatgatggcgtgatcaacatgagcatccccattgtactgcccgtctctgcagaggataagacacggctggaagggtgcagcaagtttgtcctggcacatggtggacggagggtagctatcttacgagacgctgaattctatgaacacagaaaagaggaacgctgttcccgtgtttgggggacaacatgtacaaaacacccccatatcaaaatggtgatggaaagtggggactggctggttggtggagaccttcaggtgctggagaaaataagatggaatgatgggctggaccaataccgtctgacacctctggagctcaaacagaaatgtaaagaaatgaatgctgatgcggtgtttgcattccagttgcgcaatcctgtccacaatggccatgccctgttgatgcaggacactcgccgcaggctcctagagaggggctacaagcacccggtcctcctactacaccctctgggcggctggaccaaggatgacgatgtgcctctagactggcggatgaagcagcacgcggctgtgctcgaggaaggggtcctggatcccaagtcaaccattgttgccatctttccgtctcccatgttatatgctggccccacagaggtccagtggcactgcaggtcccggatgattgcgggtgccaatttctacattgtggggagggaccctgcaggaatgccccatcctgaaaccaagaaggatctgtatgaacccactcatgggggcaaggtcttgagcatggcccctggcctcacctctgtggaaatcattccattccgagtggctgcctacaacaaagccaaaaaagccatggacttctatgatccagcaaggcacaatgagtttgacttcatctcaggaactcgaatgaggaagctcgcccgggaaggagagaatcccccagatggcttcatggcccccaaagcatggaaggtcctgacagattattacaggtccctggagaagaactaagcctttggctccagagtttctttctgaagtgctctttgattaccttttctatttttatgattagatgctttgtattaaattgcttctcaatgatgcattttaatcttttataatgaagtaaaagttgtgtctataattaaaaaaatatatatatatatacacacacacatatacatacaaagtcaaactgaagaccaaatcttagcaggtaaaagcaatattcttatacatttcataataaaattagctctatgtattttctactgcacctgagcaggcaggtcccagatttcttaaggctttgtttgaccatgtgtctagttacttgctgaaaagtgaatatattttccagcatgtcttgacaacctgtactcttccaatgtcatttatcagttgtaaaatatatcagattgtgtcctcttctgtacaattgacaaaaaaaaaaatttttttttctcactctaaaagaggtgtggctcacatcaagattcttcctgatattttacctcatgctgtacaaagccttaatgttgtaatcatatcttacgtgttgaagacctgactggagaaacaaaatgtgcaataacgtgaattttatcttagagatctgtgcagcctatttctgtcacaaaagttatattgtctaataagagaagtcttaatggcctctgtgaataatgtaactccagttacacggtgacttttaatagcatacagtgatttgatgaaaggacgtcaaacaatgtggcgatgtcgtggaaagttatctttcccgctctttgctgtggtcattgtgtcttgcagaaaggatggccctgatgcagcagcagcgccagctgtaataaaaaataattcacactatcagactagcaaggcactagaactggaaaagaccacagaaaacaaagaatccaaccctttcatcttacaggtgaacaaactgtgatgatgcacatgtatgtgttttgtaagctgtgagcaccgtaacaaaatgtaaatttgccattattaggaagtgctggtggcagtgaagaagcacccaggccacttgactcccagtctggtgccctgtctacaccagacaacacaggagctgggtcagattcccctcagctgcttaacaaagttcctcgaacagaaagtgcttacaaagctgccttctcggatactgaaaggtcgagttttctgaactgcactgattttattgcagttgaaaaaaaaaaaaaaaaagctattccaaagatttcaagctgttctgagacatcttctgatggctttacttcctgagaggcaatgtttttactttatgcataattcattgttgccaaggaataaagtgaagaaacagcaccttttaatatataggtctctctggaagagacctaaattagaaagagaaaactgtgacaattttcatattctcattcttaaaaaacactaatcttaactaacaaaagttcttttgagaataagttacacacaatggccacagcagtttgtctttaatagtatagtgcctatactcatgtaatcggttactcactactgcctttaaaaaaaaaaaccagcatatttattgaaaacatgagacaggattatagtgccttaaccgatatattttgtgacttaaaaaatacatttaaaactgctcttctgctctagtaccatgcttagtgcaaatgattatttctatgtacaactgatgcttgttcttagaaataatcatttgttctaagcatggtactagagcagaagattatttctatgtacaactgatgcttgttcttattttaataaatttatcagagtgaaaaaa

SEQ ID NO: 431965 - DNA, 3650 bp, Homo sapiens
  misc_feature (1)..(1): n is a, c, g, or t
  misc_feature (3)..(3): n is a, c, g, or t
  misc_feature (6)..(6): n is a, c, g, or t
ncncgngggtccggcagccgctgctgctgctgctgctgctgctgccgccgccgccgccgccgtccctgcgtccttcggtctctgctcccgggacccgggctccgccgcagccagccagcatgtcggggatcaagaagcaaaagacggagaaccagcagaaatccaccaatgtagtctatcaggcccaccatgtgagcaggaataagagagggcaagtggttggaacaaggggtgggttccgaggatgtaccgtgtggctaacaggtctctctggtgctggaaaaacaacgataagttttgccctggaggagtaccttgtctcccatgccatcccttgttactccctggatggggacaatgtccgtcatggccttaacagaaatctcggattctctcctggggacagagaggaaaatatccgccggattgctgaggtggctaagctgtttgctgatgctggtctggtctgcattaccagctttatttctccattcgcaaaggatcgtgagaatgcccgcaaaatacatgaatcagcagggctgccattctttgaaatatttgtagatgcacctctaaatatttgtgaaagcagagacgtaaaaggcctctataaaagggccagagctggggagattaaaggatttacaggtattgattctgattatgagaaacctgaaactcctgagcgtgtgcttaaaaccaatttgtccacagtgagtgactgtgtccaccaggtagtggaacttctgcaagagcagaacattgtaccctatactataatcaaagatatccacgaactctttgtgccggaaaacaaacttgaccacgtccgagctgaggctgaaactctcccttcattatcaattactaagctggatctccagtgggtccaggttttgagcgaaggctgggccactcccctcaaaggtttcatgcgggagaaggagtacttacaggttatgcactttgacaccctgctagatgatggcgtgatcaacatgagcatccccattgtactgcccgtctctgcagaggataagacacggctggaagggtgcagcaagtttgtcctggcacatggtggacggagggtagctatcttacgagacgctgaattctatgaacacagaaaagaggaacgctgttcccgtgtttgggggacaacatgtacaaaacacccccatatcaaaatggtgatggaaagtggggactggctggttggtggagaccttcaggtgctggagaaaataagatggaatgatgggctggaccaataccgtctgacacctctggagctcaaacagaaatgtaaagaaatgaatgctgatgcggtgtttgcattccagttgcgcaatcctgtccacaatggccatgccctgttgatgcaggacactcgccgcaggctcctagagaggggctacaagcacccggtcctcctactacaccctctgggcggctggaccaaggatgacgatgtgcctctagactggcggatgaagcagcacgcggctgtgctcgaggaaggggtcctggatcccaagtcaaccattgttgccatctttccgtctcccatgttatatgctggccccacagaggtccagtggcactgcaggtcccggatgattgcgggtgccaatttctacattgtggggagggaccctgcaggaatgccccatcctgaaaccaagaaggatctgtatgaacccactcatgggggcaaggtcttgagcatggcccctggcctcacctctgtggaaatcattccattccgagtggctgcctacaacaaagccaaaaaagccatggacttctatgatccagcaaggcacaatgagtttgacttcatctcaggaactcgaatgaggaagctcgcccgggaaggagagaatcccccagatggcttcatggcccccaaagcatggaaggtcctgacagattattacaggtccctggagaagaactaagcctttggctccagagtttctttctgaagtgctctttgattaccttttctatttttatgattagatgctttgtattaaattgcttctcaatgatgcattttaatcttttataatgaagtaaaagttgtgtctataattaaaaaaatatatatatatatacacacacacatatacatacaaagtcaaactgaagaccaaatcttagcaggtaaaagcaatattcttatacatttcataataaaattagctctatgtattttctactgcacctgagcaggcaggtcccagatttcttaaggctttgtttgaccatgtgtctagttacttgctgaaaagtgaatatattttccagcatgtcttgacaacctgtactcttccaatgtcatttatcagttgtaaaatatatcagattgtgtcctcttctgtacaattgacaaattcctgatattttacctcatgctgtacaaagccttaatgttgtaatcatatcttacgtgttgaagacctgactggagaaacaaaatgtgcaataacgtgaattttatcttagagatctgtgcagcctatttctgtcacaaaagttatattgtctaataagagaagtcttaatggcctctgtgaataatgtaactccagttacacggtgacttttaatagcatacagtgatttgatgaaaggacgtcaaacaatgtggcgatgtcgtggaaagttatctttcccgctctttgctgtggtcattgtgtcttgcagaaaggatggccctgatgcagcagcagcgccagctgtaataaaaaataattcacactatcagactagcaaggcactagaactggaaaagaccacagaaaacaaagaatccaaccctttcatcttacaggtgaacaaactgtgatgatgcacatgtatgtgttttgtaagctgtgagcaccgtaacaaaatgtaaatttgccattattaggaagtgctggtggcagtgaagaagcacccaggccacttgactcccagtctggtgccctgtctacaccagacaacacaggagctgggtcagattcccctcagctgcttaacaaagttcctcgaacagaaagtgcttacaaagctgccttctcggatactgaaaggtcgagttttctgaactgcactgattttattgcagttgaaaaaaaaaaaaaaaaagctattccaaagatttcaagctgttctgagacatcttctgatggctttacttcctgagaggcaatgtttttactttatgcataattcattgttgccaaggaataaagtgaagaaacagcaccttttaatatataggtctctctggaagagacctaaattagaaagagaaaactgtgacaattttcatattctcattcttaaaaaacactaatcttaactaacaaaagttcttttgagaataagttacacacaatggccacagcagtttgtctttaatagtatagtgcctatactcatgtaatcggttactcactactgcctttaaaaaaaaaaaccagcatatttattgaaaacatgagacaggattatagtgccttaaccgatatattttgtgacttaaaaaatacatttaaaactgctcttctgctctagtaccatgcttagtgcaaatgattatttctatgtacaactgatgcttgttcttattttaataaatttatcagagtgaa

SEQ ID NO: 431966 - DNA, 3649 bp, Homo sapiens
  misc_feature (1)..(1): n is a, c, g, or t
  misc_feature (3)..(3): n is a, c, g, or t
  misc_feature (6)..(6): n is a, c, g, or t
ncncgngggtccggcagccgctgctgctgctgctgctgctgctgccgccgccgccgccgccgtccctgcgtccttcggtctctgctcccgggacccgggctccgccgcagccagccagcatgtcggggatcaagaagcaaaagacggagaaccagcagaaatccaccaatgtagtctatcaggcccaccatgtgagcaggaataagagagggcaagtggttggaacaaggggtgggttccgaggatgtaccgtgtggctaacaggtctctctggtgctggaaaaacaacgataagttttgccctggaggagtaccttgtctcccatgccatcccttgttactccctggatggggacaatgtccgtcatggccttaacagaaatctcggattctctcctggggacagagaggaaaatatccgccggattgctgaggtggctaagctgtttgctgatgctggtctggtctgcattaccagctttatttctccattcgcaaaggatcgtgagaatgcccgcaaaatacatgaatcagcagggctgccattctttgaaatatttgtagatgcacctctaaatatttgtgaaagcagagacgtaaaaggcctctataaaagggccagagctggggagattaaaggatttacaggtattgattctgattatgagaaacctgaaactcctgagcgtgtgcttaaaaccaatttgtccacagtgagtgactgtgtccaccaggtagtggaacttctgcaagagcagaacattgtaccctatactataatcaaagatatccacgaactctttgtgccggaaaacaaacttgaccacgtccgagctgaggctgaaactctcccttcattatcaattactaagctggatctccagtgggtccaggttttgagcgaaggctgggccactcccctcaaaggtttcatgcgggagaaggagtacttacaggttatgcactttgacaccctgctagatgatggcgtgatcaacatgagcatccccattgtactgcccgtctctgcagaggataagacacggctggaagggtgcagcaagtttgtcctggcacatggtggacggagggtagctatcttacgagacgctgaattctatgaacacagaaaagaggaacgctgttcccgtgtttgggggacaacatgtacaaaacacccccatatcaaaatggtgatggaaagtggggactggctggttggtggagaccttcaggtgctggagaaaataagatggaatgatgggctggaccaataccgtctgacacctctggagctcaaacagaaatgtaaagaaatgaatgctgatgcggtgtttgcattccagttgcgcaatcctgtccacaatggccatgccctgttgatgcaggacactcgccgcaggctcctagagaggggctacaagcacccggtcctcctactacaccctctgggcggctggaccaaggatgacgatgtgcctctagactggcggatgaagcagcacgcggctgtgctcgaggaaggggtcctggatcccaagtcaaccattgttgccatctttccgtctcccatgttatatgctggccccacagaggtccagtggcactgcaggtcccggatgattgcgggtgccaatttctacattgtggggagggaccctgcaggaatgccccatcctgaaaccaagaaggatctgtatgaacccactcatgggggcaaggtcttgagcatggcccctggcctcacctctgtggaaatcattccattccgagtggctgcctacaacaaagccaaaaaagccatggacttctatgatccagcaaggcacaatgagtttgacttcatctcaggaactcgaatgaggaagctcgcccgggaaggagagaatcccccagatggcttcatggcccccaaagcatggaaggtcctgacagattattacaggtccctggagaagaactaagcctttggctccagagtttctttctgaagtgctctttgattaccttttctatttttatgattagatgctttgtattaaattgcttctcaatgatgcattttaatcttttataatgaagtaaaagttgtgtctataattaaaaaaatatatatatatatacacacacacatatacatacaaagtcaaactgaagaccaaatcttagcaggtaaaagcaatattcttatacatttcataatttaaggctttgtttgaccatgtgtctagttacttgctgaaaagtgaatatattttccagcatgtcttgacaacctgtactcttccaatgtcatttatcagttgtaaaatatatcagattgtgtcctcttctgtacaattgacaaaaaaaaaaatttttttttctcactctaaaagaggtgtggctcacatcaagattcttcctgatattttacctcatgctgtacaaagccttaatgttgtaatcatatcttacgtgttgaagacctgactggagaaacaaaatgtgcaataacgtgaattttatcttagagatctgtgcagcctatttctgtcacaaaagttatattgtctaataagagaagtcttaatggcctctgtgaataatgtaactccagttacacggtgacttttaatagcatacagtgatttgatgaaaggacgtcaaacaatgtggcgatgtcgtggaaagttatctttcccgctctttgctgtggtcattgtgtcttgcagaaaggatggccctgatgcagcagcagcgccagctgtaataaaaaataattcacactatcagactagcaaggcactagaactggaaaagaccacagaaaacaaagaatccaaccctttcatcttacaggtgaacaaactgtgatgatgcacatgtatgtgttttgtaagctgtgagcaccgtaacaaaatgtaaatttgccattattaggaagtgctggtggcagtgaagaagcacccaggccacttgactcccagtctggtgccctgtctacaccagacaacacaggagctgggtcagattcccctcagctgcttaacaaagttcctcgaacagaaagtgcttacaaagctgccttctcggatactgaaaggtcgagttttctgaactgcactgattttattgcagttgaaaaaaaaaaaaaaaaagctattccaaagatttcaagctgttctgagacatcttctgatggctttacttcctgagaggcaatgtttttactttatgcataattcattgttgccaaggaataaagtgaagaaacagcaccttttaatatataggtctctctggaagagacctaaattagaaagagaaaactgtgacaattttcatattctcattcttaaaaaacactaatcttaactaacaaaagttcttttgagaataagttacacacaatggccacagcagtttgtctttaatagtatagtgcctatactcatgtaatcggttactcactactgcctttaaaaaaaaaaaccagcatatttattgaaaacatgagacaggattatagtgccttaaccgatatattttgtgacttaaaaaatacatttaaaactgctcttctgctctagtaccatgcttagtgcaaatgattatttctatgtacaactgatgcttgttcttattttaataaatttatcagagtgaa

SEQ ID NO: 431967 - DNA, 3636 bp, Homo sapiens
cctgcaagcctcagatgattgtactggttactgaatgggttgacctctctctagtagatagacgtgcaatggacacatagagaaccagcagaaatccaccaatgtagtctatcaggcccaccatgtgagcaggaataagagagggcaagtggttggaacaaggggtgggttccgaggatgtaccgtgtggctaacaggtctctctggtgctggaaaaacaacgataagttttgccctggaggagtaccttgtctcccatgccatcccttgttactccctggatggggacaatgtccgtcatggccttaacagaaatctcggattctctcctggggacagagaggaaaatatccgccggattgctgaggtggctaagctgtttgctgatgctggtctggtctgcattaccagctttatttctccattcgcaaaggatcgtgagaatgcccgcaaaatacatgaatcagcagggctgccattctttgaaatatttgtagatgcacctctaaatatttgtgaaagcagagacgtaaaaggcctctataaaagggccagagctggggagattaaaggatttacaggtattgattctgattatgagaaacctgaaactcctgagcgtgtgcttaaaaccaatttgtccacagtgagtgactgtgtccaccaggtagtggaacttctgcaagagcagaacattgtaccctatactataatcaaagatatccacgaactctttgtgccggaaaacaaacttgaccacgtccgagctgaggctgaaactctcccttcattatcaattactaagctggatctccagtgggtccaggttttgagcgaaggctgggccactcccctcaaaggtttcatgcgggagaaggagtacttacaggttatgcactttgacaccctgctagatgatggcgtgatcaacatgagcatccccattgtactgcccgtctctgcagaggataagacacggctggaagggtgcagcaagtttgtcctggcacatggtggacggagggtagctatcttacgagacgctgaattctatgaacacagaaaagaggaacgctgttcccgtgtttgggggacaacatgtacaaaacacccccatatcaaaatggtgatggaaagtggggactggctggttggtggagaccttcaggtgctggagaaaataagatggaatgatgggctggaccaataccgtctgacacctctggagctcaaacagaaatgtaaagaaatgaatgctgatgcggtgtttgcattccagttgcgcaatcctgtccacaatggccatgccctgttgatgcaggacactcgccgcaggctcctagagaggggctacaagcacccggtcctcctactacaccctctgggcggctggaccaaggatgacgatgtgcctctagactggcggatgaagcagcacgcggctgtgctcgaggaaggggtcctggatcccaagtcaaccattgttgccatctttccgtctcccatgttatatgctggccccacagaggtccagtggcactgcaggtcccggatgattgcgggtgccaatttctacattgtggggagggaccctgcaggaatgccccatcctgaaaccaagaaggatctgtatgaacccactcatgggggcaaggtcttgagcatggcccctggcctcacctctgtggaaatcattccattccgagtggctgcctacaacaaagccaaaaaagccatggacttctatgatccagcaaggcacaatgagtttgacttcatctcaggaactcgaatgaggaagctcgcccgggaaggagagaatcccccagatggcttcatggcccccaaagcatggaaggtcctgacagattattacaggtccctggagaagaactaagcctttggctccagagtttctttctgaagtgctctttgattaccttttctatttttatgattagatgctttgtattaaattgcttctcaatgatgcattttaatcttttataatgaagtaaaagttgtgtctataattaaaaaaatatatatatatatacacacacacatatacatacaaagtcaaactgaagaccaaatcttagcaggtaaaagcaatattcttatacatttcataataaaattagctctatgtattttctactgcacctgagcaggcaggtcccagatttcttaaggctttgtttgaccatgtgtctagttacttgctgaaaagtgaatatattttccagcatgtcttgacaacctgtactcttccaatgtcatttatcagttgtaaaatatatcagattgtgtcctcttctgtacaattgacaaaaaaaaaaatttttttttctcactctaaaagaggtgtggctcacatcaagattcttcctgatattttacctcatgctgtacaaagccttaatgttgtaatcatatcttacgtgttgaagacctgactggagaaacaaaatgtgcaataacgtgaattttatcttagagatctgtgcagcctatttctgtcacaaaagttatattgtctaataagagaagtcttaatggcctctgtgaataatgtaactccagttacacggtgacttttaatagcatacagtgatttgatgaaaggacgtcaaacaatgtggcgatgtcgtggaaagttatctttcccgctctttgctgtggtcattgtgtcttgcagaaaggatggccctgatgcagcagcagcgccagctgtaataaaaaataattcacactatcagactagcaaggcactagaactggaaaagaccacagaaaacaaagaatccaaccctttcatcttacaggtgaacaaactgtgatgatgcacatgtatgtgttttgtaagctgtgagcaccgtaacaaaatgtaaatttgccattattaggaagtgctggtggcagtgaagaagcacccaggccacttgactcccagtctggtgccctgtctacaccagacaacacaggagctgggtcagattcccctcagctgcttaacaaagttcctcgaacagaaagtgcttacaaagctgccttctcggatactgaaaggtcgagttttctgaactgcactgattttattgcagttgaaaaaaaaaaaaaaaaagctattccaaagatttcaagctgttctgagacatcttctgatggctttacttcctgagaggcaatgtttttactttatgcataattcattgttgccaaggaataaagtgaagaaacagcaccttttaatatataggtctctctggaagagacctaaattagaaagagaaaactgtgacaattttcatattctcattcttaaaaaacactaatcttaactaacaaaagttcttttgagaataagttacacacaatggccacagcagtttgtctttaatagtatagtgcctatactcatgtaatcggttactcactactgcctttaaaaaaaaaaaccagcatatttattgaaaacatgagacaggattatagtgccttaaccgatatattttgtgacttaaaaaatacatttaaaactgctcttctgctctagtaccatgcttagtgcaaatgattatttctatgtacaactgatgcttgttcttattttaataaatttatcagagtgaa

SEQ ID NO: 431968 - DNA, 3633 bp, Homo sapiens
tcccaagagctcttccagacccgccttttcttctgtagggtctcggagcagatcgagctgactcccgttctgccaggagaaccagcagaaatccaccaatgtagtctatcaggcccaccatgtgagcaggaataagagagggcaagtggttggaacaaggggtgggttccgaggatgtaccgtgtggctaacaggtctctctggtgctggaaaaacaacgataagttttgccctggaggagtaccttgtctcccatgccatcccttgttactccctggatggggacaatgtccgtcatggccttaacagaaatctcggattctctcctggggacagagaggaaaatatccgccggattgctgaggtggctaagctgtttgctgatgctggtctggtctgcattaccagctttatttctccattcgcaaaggatcgtgagaatgcccgcaaaatacatgaatcagcagggctgccattctttgaaatatttgtagatgcacctctaaatatttgtgaaagcagagacgtaaaaggcctctataaaagggccagagctggggagattaaaggatttacaggtattgattctgattatgagaaacctgaaactcctgagcgtgtgcttaaaaccaatttgtccacagtgagtgactgtgtccaccaggtagtggaacttctgcaagagcagaacattgtaccctatactataatcaaagatatccacgaactctttgtgccggaaaacaaacttgaccacgtccgagctgaggctgaaactctcccttcattatcaattactaagctggatctccagtgggtccaggttttgagcgaaggctgggccactcccctcaaaggtttcatgcgggagaaggagtacttacaggttatgcactttgacaccctgctagatgatggcgtgatcaacatgagcatccccattgtactgcccgtctctgcagaggataagacacggctggaagggtgcagcaagtttgtcctggcacatggtggacggagggtagctatcttacgagacgctgaattctatgaacacagaaaagaggaacgctgttcccgtgtttgggggacaacatgtacaaaacacccccatatcaaaatggtgatggaaagtggggactggctggttggtggagaccttcaggtgctggagaaaataagatggaatgatgggctggaccaataccgtctgacacctctggagctcaaacagaaatgtaaagaaatgaatgctgatgcggtgtttgcattccagttgcgcaatcctgtccacaatggccatgccctgttgatgcaggacactcgccgcaggctcctagagaggggctacaagcacccggtcctcctactacaccctctgggcggctggaccaaggatgacgatgtgcctctagactggcggatgaagcagcacgcggctgtgctcgaggaaggggtcctggatcccaagtcaaccattgttgccatctttccgtctcccatgttatatgctggccccacagaggtccagtggcactgcaggtcccggatgattgcgggtgccaatttctacattgtggggagggaccctgcaggaatgccccatcctgaaaccaagaaggatctgtatgaacccactcatgggggcaaggtcttgagcatggcccctggcctcacctctgtggaaatcattccattccgagtggctgcctacaacaaagccaaaaaagccatggacttctatgatccagcaaggcacaatgagtttgacttcatctcaggaactcgaatgaggaagctcgcccgggaaggagagaatcccccagatggcttcatggcccccaaagcatggaaggtcctgacagattattacaggtccctggagaagaactaagcctttggctccagagtttctttctgaagtgctctttgattaccttttctatttttatgattagatgctttgtattaaattgcttctcaatgatgcattttaatcttttataatgaagtaaaagttgtgtctataattaaaaaaatatatatatatatacacacacacatatacatacaaagtcaaactgaagaccaaatcttagcaggtaaaagcaatattcttatacatttcataataaaattagctctatgtattttctactgcacctgagcaggcaggtcccagatttcttaaggctttgtttgaccatgtgtctagttacttgctgaaaagtgaatatattttccagcatgtcttgacaacctgtactcttccaatgtcatttatcagttgtaaaatatatcagattgtgtcctcttctgtacaattgacaaaaaaaaaaatttttttttctcactctaaaagaggtgtggctcacatcaagattcttcctgatattttacctcatgctgtacaaagccttaatgttgtaatcatatcttacgtgttgaagacctgactggagaaacaaaatgtgcaataacgtgaattttatcttagagatctgtgcagcctatttctgtcacaaaagttatattgtctaataagagaagtcttaatggcctctgtgaataatgtaactccagttacacggtgacttttaatagcatacagtgatttgatgaaaggacgtcaaacaatgtggcgatgtcgtggaaagttatctttcccgctctttgctgtggtcattgtgtcttgcagaaaggatggccctgatgcagcagcagcgccagctgtaataaaaaataattcacactatcagactagcaaggcactagaactggaaaagaccacagaaaacaaagaatccaaccctttcatcttacaggtgaacaaactgtgatgatgcacatgtatgtgttttgtaagctgtgagcaccgtaacaaaatgtaaatttgccattattaggaagtgctggtggcagtgaagaagcacccaggccacttgactcccagtctggtgccctgtctacaccagacaacacaggagctgggtcagattcccctcagctgcttaacaaagttcctcgaacagaaagtgcttacaaagctgccttctcggatactgaaaggtcgagttttctgaactgcactgattttattgcagttgaaaaaaaaaaaaaaaaagctattccaaagatttcaagctgttctgagacatcttctgatggctttacttcctgagaggcaatgtttttactttatgcataattcattgttgccaaggaataaagtgaagaaacagcaccttttaatatataggtctctctggaagagacctaaattagaaagagaaaactgtgacaattttcatattctcattcttaaaaaacactaatcttaactaacaaaagttcttttgagaataagttacacacaatggccacagcagtttgtctttaatagtatagtgcctatactcatgtaatcggttactcactactgcctttaaaaaaaaaaaccagcatatttattgaaaacatgagacaggattatagtgccttaaccgatatattttgtgacttaaaaaatacatttaaaactgctcttctgctctagtaccatgcttagtgcaaatgattatttctatgtacaactgatgcttgttcttattttaataaatttatcagagtgaa

SEQ ID NO: 431969 - DNA, 3649 bp, Homo sapiens
  misc_feature (1)..(1): n is a, c, g, or t
  misc_feature (3)..(3): n is a, c, g, or t
  misc_feature (6)..(6): n is a, c, g, or t
ncncgngggtccggcagccgctgctgctgctgctgctgctgctgccgccgccgccgccgccgtccctgcgtccttcggtctctgctcccgggacccgggctccgccgcagccagccagcatgtcggggatcaagaagcaaaagacggagaaccagcagaaatccaccaatgtagtctatcaggcccaccatgtgagcaggaataagagagggcaagtggttggaacaaggggtgggttccgaggatgtaccgtgtggctaacaggtctctctggtgctggaaaaacaacgataagttttgccctggaggagtaccttgtctcccatgccatcccttgttactccctggatggggacaatgtccgtcatggccttaacagaaatctcggattctctcctggggacagagaggaaaatatccgccggattgctgaggtggctaagctgtttgctgatgctggtctggtctgcattaccagctttatttctccattcgcaaaggatcgtgagaatgcccgcaaaatacatgaatcagcagggctgccattctttgaaatatttgtagatgcacctctaaatatttgtgaaagcagagacgtaaaaggcctctataaaagggccagagctggggagattaaaggatttacaggtattgattctgattatgagaaacctgaaactcctgagcgtgtgcttaaaaccaatttgtccacagtgagtgactgtgtccaccaggtagtggaacttctgcaagagcagaacattgtaccctatactataatcaaagatatccacgaactctttgtgccggaaaacaaacttgaccacgtccgagctgaggctgaaactctcccttcattatcaattactaagctggatctccagtgggtccaggttttgagcgaaggctgggccactcccctcaaaggtttcatgcgggagaaggagtacttacaggttatgcactttgacaccctgctagatgatggcgtgatcaacatgagcatccccattgtactgcccgtctctgcagaggataagacacggctggaagggtgcagcaagtttgtcctggcacatggtggacggagggtagctatcttacgagacgctgaattctatgaacacagaaaagaggaacgctgttcccgtgtttgggggacaacatgtacaaaacacccccatatcaaaatggtgatggaaagtggggactggctggttggtggagaccttcaggtgctggagaaaataagatggaatgatgggctggaccaataccgtctgacacctctggagctcaaacagaaatgtaaagaaatgaatgctgatgcggtgtttgcattccagttgcgcaatcctgtccacaatggccatgccctgttgatgcaggacactcgccgcaggctcctagagaggggctacaagcacccggtcctcctactacaccctctgggcggctggaccaaggatgacgatgtgcctctagactggcggatgaagcagcacgcggctgtgctcgaggaaggggtcctggatcccaagtcaaccattgttgccatctttccgtctcccatgttatatgctggccccacagaggtccagtggcactgcaggtcccggatgattgcgggtgccaatttctacattgtggggagggaccctgcaggaatgccccatcctgaaaccaagaaggatctgtatgaacccactcatgggggcaaggtcttgagcatggcccctggcctcacctctgtggaaatcattccattccgagtggctgcctacaacaaagccaaaagaactcgaatgaggaagctcgcccgggaaggagagaatcccccagatggcttcatggcccccaaagcatggaaggtcctgacagattattacaggtccctggagaagaactaagcctttggctccagagtttctttctgaagtgctctttgattaccttttctatttttatgattagatgctttgtattaaattgcttctcaatgatgcattttaatcttttataatgaagtaaaagttgtgtctataattaaaaaaatatatatatatatacacacacacatatacatacaaagtcaaactgaagaccaaatcttagcaggtaaaagcaatattcttatacatttcataataaaattagctctatgtattttctactgcacctgagcaggcaggtcccagatttcttaaggctttgtttgaccatgtgtctagttacttgctgaaaagtgaatatattttccagcatgtcttgacaacctgtactcttccaatgtcatttatcagttgtaaaatatatcagattgtgtcctcttctgtacaattgacaaaaaaaaaaatttttttttctcactctaaaagaggtgtggctcacatcaagattcttcctgatattttacctcatgctgtacaaagccttaatgttgtaatcatatcttacgtgttgaagacctgactggagaaacaaaatgtgcaataacgtgaattttatcttagagatctgtgcagcctatttctgtcacaaaagttatattgtctaataagagaagtcttaatggcctctgtgaataatgtaactccagttacacggtgacttttaatagcatacagtgatttgatgaaaggacgtcaaacaatgtggcgatgtcgtggaaagttatctttcccgctctttgctgtggtcattgtgtcttgcagaaaggatggccctgatgcagcagcagcgccagctgtaataaaaaataattcacactatcagactagcaaggcactagaactggaaaagaccacagaaaacaaagaatccaaccctttcatcttacaggtgaacaaactgtgatgatgcacatgtatgtgttttgtaagctgtgagcaccgtaacaaaatgtaaatttgccattattaggaagtgctggtggcagtgaagaagcacccaggccacttgactcccagtctggtgccctgtctacaccagacaacacaggagctgggtcagattcccctcagctgcttaacaaagttcctcgaacagaaagtgcttacaaagctgccttctcggatactgaaaggtcgagttttctgaactgcactgattttattgcagttgaaaaaaaaaaaaaaaaagctattccaaagatttcaagctgttctgagacatcttctgatggctttacttcctgagaggcaatgtttttactttatgcataattcattgttgccaaggaataaagtgaagaaacagcaccttttaatatataggtctctctggaagagacctaaattagaaagagaaaactgtgacaattttcatattctcattcttaaaaaacactaatcttaactaacaaaagttcttttgagaataagttacacacaatggccacagcagtttgtctttaatagtatagtgcctatactcatgtaatcggttactcactactgcctttaaaaaaaaaaaccagcatatttattgaaaacatgagacaggattatagtgccttaaccgatatattttgtgacttaaaaaatacatttaaaactgctcttctgctctagtaccatgcttagtgcaaatgattatttctatgtacaactgatgcttgttcttattttaataaatttatcagagtgaa

SEQ ID NO: 431970 - DNA, 2956 bp, Homo sapiens
catgatttaaaactcaacccacttttcacatatgctccacttgctttgggaagcccttcaaggacttgtcattatagaatctagagaaactggtgcagctaacacaactacttggatttgggtcttaatgcttcttgaaggaaatgtttggaaggggcattgtgcacatttgattcatgcttcaaggatggcacaccttatatctagttttcgtgcatcacatggctctttccacagatggcgtgatcaacatgagcatccccattgtactgcccgtctctgcagaggataagacacggctggaagggtgcagcaagtttgtcctggcacatggtggacggagggtagctatcttacgagacgctgaattctatgaacacagaaaagaggaacgctgttcccgtgtttgggggacaacatgtacaaaacacccccatatcaaaatggtgatggaaagtggggactggctggttggtggagaccttcaggtgctggagaaaataagatggaatgatgggctggaccaataccgtctgacacctctggagctcaaacagaaatgtaaagaaatgaatgctgatgcggtgtttgcattccagttgcgcaatcctgtccacaatggccatgccctgttgatgcaggacactcgccgcaggctcctagagaggggctacaagcacccggtcctcctactacaccctctgggcggctggaccaaggatgacgatgtgcctctagactggcggatgaagcagcacgcggctgtgctcgaggaaggggtcctggatcccaagtcaaccattgttgccatctttccgtctcccatgttatatgctggccccacagaggtccagtggcactgcaggtcccggatgattgcgggtgccaatttctacattgtggggagggaccctgcaggaatgccccatcctgaaaccaagaaggatctgtatgaacccactcatgggggcaaggtcttgagcatggcccctggcctcacctctgtggaaatcattccattccgagtggctgcctacaacaaagccaaaaaagccatggacttctatgatccagcaaggcacaatgagtttgacttcatctcaggaactcgaatgaggaagctcgcccgggaaggagagaatcccccagatggcttcatggcccccaaagcatggaaggtcctgacagattattacaggtccctggagaagaactaagcctttggctccagagtttctttctgaagtgctctttgattaccttttctatttttatgattagatgctttgtattaaattgcttctcaatgatgcattttaatcttttataatgaagtaaaagttgtgtctataattaaaaaaatatatatatatatacacacacacatatacatacaaagtcaaactgaagaccaaatcttagcaggtaaaagcaatattcttatacatttcataataaaattagctctatgtattttctactgcacctgagcaggcaggtcccagatttcttaaggctttgtttgaccatgtgtctagttacttgctgaaaagtgaatatattttccagcatgtcttgacaacctgtactcttccaatgtcatttatcagttgtaaaatatatcagattgtgtcctcttctgtacaattgacaaaaaaaaaaatttttttttctcactctaaaagaggtgtggctcacatcaagattcttcctgatattttacctcatgctgtacaaagccttaatgttgtaatcatatcttacgtgttgaagacctgactggagaaacaaaatgtgcaataacgtgaattttatcttagagatctgtgcagcctatttctgtcacaaaagttatattgtctaataagagaagtcttaatggcctctgtgaataatgtaactccagttacacggtgacttttaatagcatacagtgatttgatgaaaggacgtcaaacaatgtggcgatgtcgtggaaagttatctttcccgctctttgctgtggtcattgtgtcttgcagaaaggatggccctgatgcagcagcagcgccagctgtaataaaaaataattcacactatcagactagcaaggcactagaactggaaaagaccacagaaaacaaagaatccaaccctttcatcttacaggtgaacaaactgtgatgatgcacatgtatgtgttttgtaagctgtgagcaccgtaacaaaatgtaaatttgccattattaggaagtgctggtggcagtgaagaagcacccaggccacttgactcccagtctggtgccctgtctacaccagacaacacaggagctgggtcagattcccctcagctgcttaacaaagttcctcgaacagaaagtgcttacaaagctgccttctcggatactgaaaggtcgagttttctgaactgcactgattttattgcagttgaaaaaaaaaaaaaaaaagctattccaaagatttcaagctgttctgagacatcttctgatggctttacttcctgagaggcaatgtttttactttatgcataattcattgttgccaaggaataaagtgaagaaacagcaccttttaatatataggtctctctggaagagacctaaattagaaagagaaaactgtgacaattttcatattctcattcttaaaaaacactaatcttaactaacaaaagttcttttgagaataagttacacacaatggccacagcagtttgtctttaatagtatagtgcctatactcatgtaatcggttactcactactgcctttaaaaaaaaaaaccagcatatttattgaaaacatgagacaggattatagtgccttaaccgatatattttgtgacttaaaaaatacatttaaaactgctcttctgctctagtaccatgcttagtgcaaatgattatttctatgtacaactgatgcttgttcttattttaataaatttatcagagtgaa

SEQ ID NO: 431971 - DNA, 2462 bp, Homo sapiens
tcctttaaactgcaatttattgtgaatagggaggcactggaaagtaaaatccacatagttctgtagaatagtaagatttgagtgttcttgtccggctagcctgtttggagaagagatgaggaaatacaaccttgagttatgagggaggaatcttatctttagagctcctatcctacctaatataacaaagcatgaagagtgcacggagtcttagaacctcagtgattttcttgcaattcttagttgactcacattgctgaattacttttaaagtagaataaaggtgtctccataaaccatgacctacagatttgacccacaatgaccagcatgtcccttatggacattttctaggtccagtggcactgcaggtcccggatgattgcgggtgccaatttctacattgtggggagggaccctgcaggaatgccccatcctgaaaccaagaaggatctgtatgaacccactcatgggggcaaggtcttgagcatggcccctggcctcacctctgtggaaatcattccattccgagtggctgcctacaacaaagccaaaaaagccatggacttctatgatccagcaaggcacaatgagtttgacttcatctcaggaactcgaatgaggaagctcgcccgggaaggagagaatcccccagatggcttcatggcccccaaagcatggaaggtcctgacagattattacaggtccctggagaagaactaagcctttggctccagagtttctttctgaagtgctctttgattaccttttctatttttatgattagatgctttgtattaaattgcttctcaatgatgcattttaatcttttataatgaagtaaaagttgtgtctataattaaaaaaatatatatatatatacacacacacatatacatacaaagtcaaactgaagaccaaatcttagcaggtaaaagcaatattcttatacatttcataataaaattagctctatgtattttctactgcacctgagcaggcaggtcccagatttcttaaggctttgtttgaccatgtgtctagttacttgctgaaaagtgaatatattttccagcatgtcttgacaacctgtactcttccaatgtcatttatcagttgtaaaatatatcagattgtgtcctcttctgtacaattgacaaaaaaaaaaatttttttttctcactctaaaagaggtgtggctcacatcaagattcttcctgatattttacctcatgctgtacaaagccttaatgttgtaatcatatcttacgtgttgaagacctgactggagaaacaaaatgtgcaataacgtgaattttatcttagagatctgtgcagcctatttctgtcacaaaagttatattgtctaataagagaagtcttaatggcctctgtgaataatgtaactccagttacacggtgacttttaatagcatacagtgatttgatgaaaggacgtcaaacaatgtggcgatgtcgtggaaagttatctttcccgctctttgctgtggtcattgtgtcttgcagaaaggatggccctgatgcagcagcagcgccagctgtaataaaaaataattcacactatcagactagcaaggcactagaactggaaaagaccacagaaaacaaagaatccaaccctttcatcttacaggtgaacaaactgtgatgatgcacatgtatgtgttttgtaagctgtgagcaccgtaacaaaatgtaaatttgccattattaggaagtgctggtggcagtgaagaagcacccaggccacttgactcccagtctggtgccctgtctacaccagacaacacaggagctgggtcagattcccctcagctgcttaacaaagttcctcgaacagaaagtgcttacaaagctgccttctcggatactgaaaggtcgagttttctgaactgcactgattttattgcagttgaaaaaaaaaaaaaaaaagctattccaaagatttcaagctgttctgagacatcttctgatggctttacttcctgagaggcaatgtttttactttatgcataattcattgttgccaaggaataaagtgaagaaacagcaccttttaatatataggtctctctggaagagacctaaattagaaagagaaaactgtgacaattttcatattctcattcttaaaaaacactaatcttaactaacaaaagttcttttgagaataagttacacacaatggccacagcagtttgtctttaatagtatagtgcctatactcatgtaatcggttactcactactgcctttaaaaaaaaaaaccagcatatttattgaaaacatgagacaggattatagtgccttaaccgatatattttgtgacttaaaaaatacatttaaaactgctcttctgctctagtaccatgcttagtgcaaatgattatttctatgtacaactgatgcttgttcttattttaataaatttatcagagtgaa

SEQ ID NO: 431972 - DNA, 1147 bp, Homo sapiens
cagttacacggtgacttttaatagcatacagtgtaactggagttacattattcacagaggccattaagacttctcttattagacaatgtaactccagttacacggtgacttttaatagcatacagtgatttgatgaaaggacgtcaaacaatgtggcgatgtcgtggaaagttatctttcccgctctttgctgtggtcattgtgtcttgcagaaaggatggccctgatgcagcagcagcgccagctgtaataaaaaataattcacactatcagactagcaaggcactagaactggaaaagaccacagaaaacaaagaatccaaccctttcatcttacaggtgaacaaactgtgatgatgcacatgtatgtgttttgtaagctgtgagcaccgtaacaaaatgtaaatttgccattattaggaagtgctggtggcagtgaagaagcacccaggccacttgactcccagtctggtgccctgtctacaccagacaacacaggagctgggtcagattcccctcagctgcttaacaaagttcctcgaacagaaagtgcttacaaagctgccttctcggatactgaaaggtcgagttttctgaactgcactgattttattgcagttgaaaaaaaaaaaaaaaaagctattccaaagatttcaagctgttctgagacatcttctgatggctttacttcctgagaggcaatgtttttactttatgcataattcattgttgccaaggaataaagtgaagaaacagcaccttttaatatataggtctctctggaagagacctaaattagaaagagaaaactgtgacaattttcatattctcattcttaaaaaacactaatcttaactaacaaaagttcttttgagaataagttacacacaatggccacagcagtttgtctttaatagtatagtgcctatactcatgtaatcggttactcactactgcctttaaaaaaaaaaaccagcatatttattgaaaacatgagacaggattatagtgccttaaccgatatattttgtgacttaaaaaatacatttaaaactgctcttctgctctagtaccatgcttagtgcaaatgattatttctatgtacaactgatgcttgttcttattttaataaatttatcagagtgaa

SEQ ID NO: 431973 - DNA, 2055 bp, Homo sapiens
  misc_feature (1)..(1): n is a, c, g, or t
  misc_feature (3)..(3): n is a, c, g, or t
  misc_feature (6)..(6): n is a, c, g, or t
ncncgngggtccggcagccgctgctgctgctgctgctgctgctgccgccgccgccgccgccgtccctgcgtccttcggtctctgctcccgggacccgggctccgccgcagccagccagcatgtcggggatcaagaagcaaaagacggagaaccagcagaaatccaccaatgtagtctatcaggcccaccatgtgagcaggaataagagagggcaagtggttggaacaaggggtgggttccgaggatgtaccgtgtggctaacaggtctctctggtgctggaaaaacaacgataagttttgccctggaggagtaccttgtctcccatgccatcccttgttactccctggatggggacaatgtccgtcatggccttaacagaaatctcggattctctcctggggacagagaggaaaatatccgccggattgctgaggtggctaagctgtttgctgatgctggtctggtctgcattaccagctttatttctccattcgcaaaggatcgtgagaatgcccgcaaaatacatgaatcagcagggctgccattctttgaaatatttgtagatgcacctctaaatatttgtgaaagcagagacgtaaaaggcctctataaaagggccagagctggggagattaaaggatttacaggtattgattctgattatgagaaacctgaaactcctgagcgtgtgcttaaaaccaatttgtccacagtgagtgactgtgtccaccaggtagtggaacttctgcaagagcagaacattgtaccctatactataatcaaagatatccacgaactctttgtgccggaaaacaaacttgaccacgtccgagctgaggctgaaactctcccttcattatcaattactaagctggatctccagtgggtccaggttttgagcgaaggctgggccactcccctcaaaggtttcatgcgggagaaggagtacttacaggttatgcactttgacaccctgctagatgatggcgtgatcaacatgagcatccccattgtactgcccgtctctgcagaggataagacacggctggaagggtgcagcaagtttgtcctggcacatggtggacggagggtagctatcttacgagacgctgaattctatgaacacagaaaagaggaacgctgttcccgtgtttgggggacaacatgtacaaaacacccccatatcaaaatggtgatggaaagtggggactggctggttggtggagaccttcaggtgctggagaaaataagatggaatgatgggctggaccaataccgtctgacacctctggagctcaaacagaaatgtaaagaaatgaatgctgatgcggtgtttgcattccagttgcgcaatcctgtccacaatggccatgccctgttgatgcaggacactcgccgcaggctcctagagaggggctacaagcacccggtcctcctactacaccctctgggcggctggaccaaggatgacgatgtgcctctagactggcggatgaagcagcacgcggctgtgctcgaggaaggggtcctggatcccaagtcaaccattgttgccatctttccgtctcccatgttatatgctggccccacagaggtgagcaattcccagagctgggctttgagactcaggaattcagactcagactttacatagaagagtaaatgagtctctgggatcctttctgtttcctcatgagcagattctggaatgttctggtgtctcttctttatctagcttaattatgtttccacttagtatttgaaaagtgctagaaggccaggcgcagtggctgtcacctgtaatcccagcactttgggaggccgaggtgggcagatcacaaggtcaggagttcgaggccacctgaccaacatgatgaaaccctgtctctactaaaaatacaaaaattagctgggcatagtggcatgcccctgtaatcccagctactcgggaagctgaggcaggagaatcgcttgaacctgggaggtggaggttgcagtgagccgagatcatgccactgcactccagcctgggcaacagagcgagacttcgtctc

SEQ ID NO: 431974 - DNA, 4211 bp, Homo sapiens
  misc_feature (3790)..(3790): n is a, c, g, or t
gcttcccatacggcagtggctgggggagagtgatggagagaaaggctaagctaaggtcaaagaaagtggaggaaggctggcttgtcccgctggacttgacggcggagctgctgcaatctcgcgggctgggcccttgccccgggtggacccgagtgcctgcggggaggcgggtgtggctcccccgggaggtgacagctggcggggcccgtaaggagctggtctgctccggctcccctctcgtagccggcgccctgggaccagcgcgtgagcacgtctcggaggagtccgatgcgctgggcagggccgggtggtcacccccgcccagcttccaggggtgactgtgcctctgacgtcagacggcttttgggtcattccctggcacggggactttattttcataacagcatgaagtgccgtggaactggaataggcgtgtcctctccctcgaccctccccctccttgtccctctgctcacccctcgctcgttccctccctccggcgagggccgcctttataacaactgctcagagtgcgagggcgggatagctgtccaaggtctcccccagcactgaggagctcgcctgctgccctcttgcgcgcgggaagcagcaccaagttcacggccaacgccttggcactagggtccagaatggctacaacagtccctgatggttgccgcaatggcctgaaatccaagtactacagactttgtgataaggctgaagcttggggcatcgtcctagaaacggtggccacagccggggttgtgacctcggtggccttcatgctcactctcccgatcctcgtctgcaaggtgcaggactccaacaggcgaaaaatgctgcctactcagtttctcttcctcctgggtgtgttgggcatctttggcctcaccttcgccttcatcatcggactggacgggagcacagggcccacacgcttcttcctctttgggatcctcttttccatctgcttctcctgcctgctggctcatgctgtcagtctgaccaagctcgtccgggggaggaagcccctttccctgttggtgattctgggtctggccgtgggcttcagcctagtccaggatgttatcgctattgaatatattgtcctgaccatgaataggaccaacgtcaatgtcttttctgagctttccgctcctcgtcgcaatgaagactttgtcctcctgctcacctacgtcctcttcttgatggcgctgaccttcctcatgtcctccttcaccttctgtggttccttcacgggctggaagagacatggggcccacatctacctcacgatgctcctctccattgccatctgggtggcctggatcaccctgctcatgcttcctgactttgaccgcaggtgggatgacaccatcctcagctccgccttggctgccaatggctgggtgttcctgttggcttatgttagtcccgagttttggctgctcacaaagcaacgaaaccccatggattatcctgttgaggatgctttctgtaaacctcaactcgtgaagaagagctatggtgtggagaacagagcctactctcaagaggaaatcactcaaggttttgaagagacaggggacacgctctatgccccctattccacacattttcagctgcagaaccagcctccccaaaaggaattctccatcccacgggcccacgcttggccgagcccttacaaagactatgaagtaaagaaagagggcagctaactctgtcctgaagagtgggacaaatgcagccgggcggcagatctagcgggagctcaaagggatgtgggcgaaatcttgagtcttctgagaaaactgtacaagacactacgggaacagtttgcctccctcccagcctcaaccacaattcttccatgctggggctgatgtgggctagtaagactccagttcttagaggcgctgtagtatttttttttttttgtctcatccttaggatacttcttttaagtgggagtctcaggcaactcaagtttagacccttactctttttgtttgttttttgaaacaggatcttgctctgtcacccaggcttgagtgcagtggtgcgatcacagcccagtgcagcctcgaccacctgtgctcaagcaatcctcccatctccatctcccaaagtgctgggatgacaggcgtgagccacagctcccagcctaggcccttaatcttgctgttattttccatggactaaaggtctggtcatctgagctcacgctggctcacacagctctaggggcctgctcctctaactcacagtgggttttgtgaggctctgtggcccagagcagacctgcatatctgagcaaaaatagcaaaagcctctctcagcccactggcctgaatctacactggaagccaacttgctggcacccccgctccccaacccttcttgcctgggtaggagaggctaaagatcaccctaaatttactcatctctctagtgctgcctcacattgggcctcagcagctccccagcaccaattcacaggtcacccctctcttcttgcactgtccccaaacttgctgtcaattccgagatctaatctccccctacgctctgccaggaattctttcagacctcactagcacaagcccggttgctccttgtcaggagaatttgtagatcattctcacttcaaattcctggggctgatacttctctcatcttgcaccccaacctctgtaaatagatttaccgcatttacggctgcattctgtaagtgggcatggtctcctaatggaggagtgttcattgtataataagttattcacctgagtatgcaataaagatgtggtggccactctttcatggtggtggcagcagttaccagtaatgagcattagactctgggggatagaacacgggctgccctgagagcttcatgttggagctgaagttcaaggttcacttcctttgggtttgtacttgacccttcttcatgtgtctctcccgttccctctaaaacaagtgtgtttcccctcatttttgaggctgtcaatggtgtgagagccaggatcatcacggggcctgaggttttactccagaaaagcagaggagtggcaaccttggcttggggtttggcagcccaggaaaggcagggaggagagctcaaagccggtttcatgtttcacccaaggtctaattgtgggagaggacaaatccagatcccctgtttgacagaattagttcacaaatgtctcttggcaaaaacatgtgacacctaaccatgataattgacttaatccaagaaagagctctgtagggcagagcaataggaaatctctctttcgttatggaaaaaaaataatccctctacatagaaactgagtgacatgtaaaaatgtgtagctaagtcagggagttacttcctaagagcctgacgctctgcttttcatcaaaaggaaaaaccagcgtgaggcagaggcgagggaggtggaggtgagtggatgatgtgctgagttagggatgtttatatgccgcaaaggtttggttggtaggcttcgcgctaagattagcctggctttgtactgaaaagggggaaggacacatagtgacacagatccttctggtctttcccaggaggtgtgacctaatgaggtttgttgtgagaataaagcaatgtggtttcacatatattatctatcataggctagggactcaagaaatgcatattccccccccactttctttctctctttccttccttccttcctttcttctttctttctttctttctttctttctttctttctttctttctttctttctttcnctctctctctctctctctctctctttctttctttttgagatagagtctcactctgtcatccaggctggagtgcagtggcatgatctcagctcactgcagcctccgcatcctgggttcaagcgattttcgtgcctcggccttctgagtagctgggattacaggcgtgcgtgcgccaccacgcctggctaatttttgtatttttagtacagacgaggtttcaccatgttgaccaggctggtcttgaactcctgatcttaagtgatctgcccgccttggcctcccaaagtgctgggattacgggtgggaatcaccatgcccagcctcctttccatcttttctttccttctctggtcttcatactaccaaccaagcaagggaggaggagtaaaaggtaaaatcacaaaatactccggatccgcat

SEQ ID NO: 431975 - DNA, 2830 bp, Homo sapiens
gcttcccatacggcagtggctgggggagagtgatggagagaaaggctaagctaaggtcaaagaaagtggaggaaggctggcttgtcccgctggacttgacggcggagctgctgcaatctcgcgggctgggcccttgccccgggtggacccgagtgcctgcggggaggcgggtgtggctcccccgggaggtgacagctggcggggcccgtaaggagctggtctgctccggctcccctctcgtagccggcgccctgggaccagcgcgtgagcacgtctcggaggagtccgatgcgctgggcagggccgggtggtcacccccgcccagcttccaggggtgactgtgcctctgacgtcagacggcttttgggtcattccctggcacggggactttattttcataacagcatgaagtgccgtggaactggaataggcgtgtcctctccctcgaccctccccctccttgtccctctgctcacccctcgctcgttccctccctccggcgagggccgcctttataacaactgctcagagtgcgagggcgggatagctgtccaaggtctcccccagcactgaggagctcgcctgctgccctcttgcgcgcgggaagcagcaccaagttcacggccaacgccttggcactagggtccagaatggctacaacagtccctgatggttgccgcaatggcctgaaatccaagtactacagactttgtgataaggctgaagcttggggcatcgtcctagaaacggtggccacagccggggttgtgacctcggtggccttcatgctcactctcccgatcctcgtctgcaaggtgcaggactccaacaggcgaaaaatgctgcctactcagtttctcttcctcctgggtgtgttgggcatctttggcctcaccttcgccttcatcatcggactggacgggagcacagggcccacacgcttcttcctctttgggatcctcttttccatctgcttctcctgcctgctggctcatgctgtcagtctgaccaagctcgtccgggggaggaagcccctttccctgttggtgattctgggtctggccgtgggcttcagcctagtccaggatgttatcgctattgaatatattgtcctgaccatgaataggaccaacgtcaatgtcttttctgagctttccgctcctcgtcgcaatgaagactttgtcctcctgctcacctacgtcctcttcttgatggcgctgaccttcctcatgtcctccttcaccttctgtggttccttcacgggctggaagagacatggggcccacatctacctcacgatgctcctctccattgccatctgggtggcctggatcaccctgctcatgcttcctgactttgaccgcaggtgggatgacaccatcctcagctccgccttggctgccaatggctgggtgttcctgttggcttatgttagtcccgagttttggctgctcacaaagcaacgaaaccccatggattatcctgttgaggatgctttctgtaaacctcaactcgtgaagaagagctatggtgtggagaacagagcctactctcaagaggaaatcactcaaggttttgaagagacaggggacacgctctatgccccctattccacacattttcagctgcagaaccagcctccccaaaaggaattctccatcccacgggcccacgcttggccgagcccttacaaagactatgaagtaaagaaagagggcagctaactctgtcctgaagagtgggacaaatgcagccgggcggcagatctagcgggagctcaaagggatgtgggcgaaatcttgagtcttctgagaaaactgtacaagacactacgggaacagtttgcctccctcccagcctcaaccacaattcttccatgctggggctgatgtgggctagtaagactccagttcttagaggcgctgtagtatttttttttttttgtctcatccttaggatacttcttttaagtgggagtctcaggcaactcaagtttagacccttactctttttgtttgttttttgaaacaggatcttgctctgtcacccaggcttgagtgcagtggtgcgatcacagcccagtgcagcctcgaccacctgtgctcaagcaatcctcccatctccatctcccaaagtgctgggatgacaggcgtgagccacagctcccagcctaggcccttaatcttgctgttattttccatggactaaaggtctggtcatctgagctcacgctggctcacacagctctaggggcctgctcctctaactcacagtgggttttgtgaggctctgtggcccagagcagacctgcatatctgagcaaaaatagcaaaagcctctctcagcccactggcctgaatctacactggaagccaacttgctggcacccccgctccccaacccttcttgcctgggtaggagaggctaaagatcaccctaaatttactcatctctctagtgctgcctcacattgggcctcagcagctccccagcaccaattcacaggtcacccctctcttcttgcactgtccccaaacttgctgtcaattccgagatctaatctccccctacgctctgccaggaattctttcagacctcactagcacaagcccggttgctccttgtcaggagaatttgtagatcattctcacttcaaattcctggggctgatacttctctcatcttgcaccccaacctctgtaaatagatttaccgcatttacggctgcattctgtaagtgggcatggtctcctaatggaggagtgttcattgtataataagttattcacctgagtatgcaataaagatgtggtggccactctttcatggt

SEQ ID NO: 431976 - DNA, 4515 bp, Homo sapiens
  misc_feature (4094)..(4094): n is a, c, g, or t
gcttcccatacggcagtggctgggggagagtgatggagagaaaggctaagctaaggtcaaagaaagtggaggaaggctggcttgtcccgctggacttgacggcggagctgctgcaatctcgcgggctgggcccttgccccgggtggacccgagtgcctgcggggaggcgggtgtggctcccccgggaggtgacagctggcggggcccgtaaggagctggtctgctccggctcccctctcgtagccggcgccctgggaccagcgcgtgagcacgtctcggaggagtccgatgcgctgggcagggccgggtggtcacccccgcccagcttccaggggtgactgtgcctctgacgtcagacggcttttgggtcattccctggcacggggactttattttcataacagcatgaagtgccgtggaactggaataggcgtgtcctctccctcgaccctccccctccttgtccctctgctcacccctcgctcgttccctccctccggcgagggccgcctttataacaactgctcagagtgcgagggcgggatagctgtccaaggtctcccccagcactgaggagctcgcctgctgccctcttgcgcgcgggaagcagcaccaagttcacggccaacgccttggcactagggtccagaatggctacaacagtccctgatggttgccgcaatggcctgaaatccaagtactacagactttgtgataaggctgaagcttggggcatcgtcctagaaacggtggccacagccggggttgtgacctcggtggccttcatgctcactctcccgatcctcgtctgcaaggtgcaggactccaacaggcgaaaaatgctgcctactcagtttctcttcctcctgggtgtgttgggcatctttggcctcaccttcgccttcatcatcggactggacgggagcacagggcccacacgcttcttcctctttgggatcctcttttccatctgcttctcctgcctgctggctcatgctgtcagtctgaccaagctcgtccgggggaggaagcccctttccctgttggtgattctgggtctggccgtgggcttcagcctagtccaggatgttatcgctattgaatatattgtcctgaccatgaataggaccaacgtcaatgtcttttctgagctttccgctcctcgtcgcaatgaagactttgtcctcctgctcacctacgtcctcttcttgatggcgctgaccttcctcatgtcctccttcaccttctgtggttccttcacgggctggaagagacatggggcccacatctacctcacgatgctcctctccattgccatctgggtggcctggatcaccctgctcatgcttcctgactttgaccgcaggtgggatgacaccatcctcagctccgccttggctgccaatggctgggtgttcctgttggcttatgttagtcccgagttttggctgctcacaaagcaacgaaaccccatggattatcctgttgaggatgctttctgtaaacctcaactcgtgaagaagagctatggtgtggagaacagagcctactctcaagaggaaatcactcaaggttttgaagagacaggggacacgctctatgccccctattccacacattttcagctgcaggtaagtgatttttttctccctcttcatcaaaggcattagcacctcaggaacactgatcctttggaaacagacgatgttacctttctcatggcccctagatggccacttgaaggaatgatgggtcttctttcctctaagcggcctcacggggttagtgggtaagaatgagtgcttggcatagagaggacttgggggtgggaggcctgggagaaagggaaggaaatgagacttctgcccagactggagacctgttgaaatggcaggaactggagtgggtttcacgatatgactgtttccttttcagaaccagcctccccaaaaggaattctccatcccacgggcccacgcttggccgagcccttacaaagactatgaagtaaagaaagagggcagctaactctgtcctgaagagtgggacaaatgcagccgggcggcagatctagcgggagctcaaagggatgtgggcgaaatcttgagtcttctgagaaaactgtacaagacactacgggaacagtttgcctccctcccagcctcaaccacaattcttccatgctggggctgatgtgggctagtaagactccagttcttagaggcgctgtagtatttttttttttttgtctcatccttaggatacttcttttaagtgggagtctcaggcaactcaagtttagacccttactctttttgtttgttttttgaaacaggatcttgctctgtcacccaggcttgagtgcagtggtgcgatcacagcccagtgcagcctcgaccacctgtgctcaagcaatcctcccatctccatctcccaaagtgctgggatgacaggcgtgagccacagctcccagcctaggcccttaatcttgctgttattttccatggactaaaggtctggtcatctgagctcacgctggctcacacagctctaggggcctgctcctctaactcacagtgggttttgtgaggctctgtggcccagagcagacctgcatatctgagcaaaaatagcaaaagcctctctcagcccactggcctgaatctacactggaagccaacttgctggcacccccgctccccaacccttcttgcctgggtaggagaggctaaagatcaccctaaatttactcatctctctagtgctgcctcacattgggcctcagcagctccccagcaccaattcacaggtcacccctctcttcttgcactgtccccaaacttgctgtcaattccgagatctaatctccccctacgctctgccaggaattctttcagacctcactagcacaagcccggttgctccttgtcaggagaatttgtagatcattctcacttcaaattcctggggctgatacttctctcatcttgcaccccaacctctgtaaatagatttaccgcatttacggctgcattctgtaagtgggcatggtctcctaatggaggagtgttcattgtataataagttattcacctgagtatgcaataaagatgtggtggccactctttcatggtggtggcagcagttaccagtaatgagcattagactctgggggatagaacacgggctgccctgagagcttcatgttggagctgaagttcaaggttcacttcctttgggtttgtacttgacccttcttcatgtgtctctcccgttccctctaaaacaagtgtgtttcccctcatttttgaggctgtcaatggtgtgagagccaggatcatcacggggcctgaggttttactccagaaaagcagaggagtggcaaccttggcttggggtttggcagcccaggaaaggcagggaggagagctcaaagccggtttcatgtttcacccaaggtctaattgtgggagaggacaaatccagatcccctgtttgacagaattagttcacaaatgtctcttggcaaaaacatgtgacacctaaccatgataattgacttaatccaagaaagagctctgtagggcagagcaataggaaatctctctttcgttatggaaaaaaaataatccctctacatagaaactgagtgacatgtaaaaatgtgtagctaagtcagggagttacttcctaagagcctgacgctctgcttttcatcaaaaggaaaaaccagcgtgaggcagaggcgagggaggtggaggtgagtggatgatgtgctgagttagggatgtttatatgccgcaaaggtttggttggtaggcttcgcgctaagattagcctggctttgtactgaaaagggggaaggacacatagtgacacagatccttctggtctttcccaggaggtgtgacctaatgaggtttgttgtgagaataaagcaatgtggtttcacatatattatctatcataggctagggactcaagaaatgcatattccccccccactttctttctctctttccttccttccttcctttcttctttctttctttctttctttctttctttctttctttctttctttctttctttcnctctctctctctctctctctctctttctttctttttgagatagagtctcactctgtcatccaggctggagtgcagtggcatgatctcagctcactgcagcctccgcatcctgggttcaagcgattttcgtgcctcggccttctgagtagctgggattacaggcgtgcgtgcgccaccacgcctggctaatttttgtatttttagtacagacgaggtttcaccatgttgaccaggctggtcttgaactcctgatcttaagtgatctgcccgccttggcctcccaaagtgctgggattacgggtgggaatcaccatgcccagcctcctttccatcttttctttccttctctggtcttcatactaccaaccaagcaagggaggaggagtaaaaggtaaaatcacaaaatactccggatccgcat

SEQ ID NO: 431977 - DNA, 3727 bp, Homo sapiens
  misc_feature (3306)..(3306): n is a, c, g, or t
ttgtgcatgtgtttccttccccaagagagctataaacagcaaaaattctgctgtaagcttccctgtgtcctctctgcgtttggcactgaggagctcgcctgctgccctcttgcgcgcgggaagcagcaccaagttcacggccaacgccttggcactagggtccagaatggctacaacagtccctgatggttgccgcaatggcctgaaatccaagtactacagactttgtgataaggctgaagcttggggcatcgtcctagaaacggtggccacagccggggttgtgacctcggtggccttcatgctcactctcccgatcctcgtctgcaaggtgcaggactccaacaggcgaaaaatgctgcctactcagtttctcttcctcctgggtgtgttgggcatctttggcctcaccttcgccttcatcatcggactggacgggagcacagggcccacacgcttcttcctctttgggatcctcttttccatctgcttctcctgcctgctggctcatgctgtcagtctgaccaagctcgtccgggggaggaagcccctttccctgttggtgattctgggtctggccgtgggcttcagcctagtccaggatgttatcgctattgaatatattgtcctgaccatgaataggaccaacgtcaatgtcttttctgagctttccgctcctcgtcgcaatgaagactttgtcctcctgctcacctacgtcctcttcttgatggcgctgaccttcctcatgtcctccttcaccttctgtggttccttcacgggctggaagagacatggggcccacatctacctcacgatgctcctctccattgccatctgggtggcctggatcaccctgctcatgcttcctgactttgaccgcaggtgggatgacaccatcctcagctccgccttggctgccaatggctgggtgttcctgttggcttatgttagtcccgagttttggctgctcacaaagcaacgaaaccccatggattatcctgttgaggatgctttctgtaaacctcaactcgtgaagaagagctatggtgtggagaacagagcctactctcaagaggaaatcactcaaggttttgaagagacaggggacacgctctatgccccctattccacacattttcagctgcagaaccagcctccccaaaaggaattctccatcccacgggcccacgcttggccgagcccttacaaagactatgaagtaaagaaagagggcagctaactctgtcctgaagagtgggacaaatgcagccgggcggcagatctagcgggagctcaaagggatgtgggcgaaatcttgagtcttctgagaaaactgtacaagacactacgggaacagtttgcctccctcccagcctcaaccacaattcttccatgctggggctgatgtgggctagtaagactccagttcttagaggcgctgtagtatttttttttttttgtctcatccttaggatacttcttttaagtgggagtctcaggcaactcaagtttagacccttactctttttgtttgttttttgaaacaggatcttgctctgtcacccaggcttgagtgcagtggtgcgatcacagcccagtgcagcctcgaccacctgtgctcaagcaatcctcccatctccatctcccaaagtgctgggatgacaggcgtgagccacagctcccagcctaggcccttaatcttgctgttattttccatggactaaaggtctggtcatctgagctcacgctggctcacacagctctaggggcctgctcctctaactcacagtgggttttgtgaggctctgtggcccagagcagacctgcatatctgagcaaaaatagcaaaagcctctctcagcccactggcctgaatctacactggaagccaacttgctggcacccccgctccccaacccttcttgcctgggtaggagaggctaaagatcaccctaaatttactcatctctctagtgctgcctcacattgggcctcagcagctccccagcaccaattcacaggtcacccctctcttcttgcactgtccccaaacttgctgtcaattccgagatctaatctccccctacgctctgccaggaattctttcagacctcactagcacaagcccggttgctccttgtcaggagaatttgtagatcattctcacttcaaattcctggggctgatacttctctcatcttgcaccccaacctctgtaaatagatttaccgcatttacggctgcattctgtaagtgggcatggtctcctaatggaggagtgttcattgtataataagttattcacctgagtatgcaataaagatgtggtggccactctttcatggtggtggcagcagttaccagtaatgagcattagactctgggggatagaacacgggctgccctgagagcttcatgttggagctgaagttcaaggttcacttcctttgggtttgtacttgacccttcttcatgtgtctctcccgttccctctaaaacaagtgtgtttcccctcatttttgaggctgtcaatggtgtgagagccaggatcatcacggggcctgaggttttactccagaaaagcagaggagtggcaaccttggcttggggtttggcagcccaggaaaggcagggaggagagctcaaagccggtttcatgtttcacccaaggtctaattgtgggagaggacaaatccagatcccctgtttgacagaattagttcacaaatgtctcttggcaaaaacatgtgacacctaaccatgataattgacttaatccaagaaagagctctgtagggcagagcaataggaaatctctctttcgttatggaaaaaaaataatccctctacatagaaactgagtgacatgtaaaaatgtgtagctaagtcagggagttacttcctaagagcctgacgctctgcttttcatcaaaaggaaaaaccagcgtgaggcagaggcgagggaggtggaggtgagtggatgatgtgctgagttagggatgtttatatgccgcaaaggtttggttggtaggcttcgcgctaagattagcctggctttgtactgaaaagggggaaggacacatagtgacacagatccttctggtctttcccaggaggtgtgacctaatgaggtttgttgtgagaataaagcaatgtggtttcacatatattatctatcataggctagggactcaagaaatgcatattccccccccactttctttctctctttccttccttccttcctttcttctttctttctttctttctttctttctttctttctttctttctttctttctttcnctctctctctctctctctctctctttctttctttttgagatagagtctcactctgtcatccaggctggagtgcagtggcatgatctcagctcactgcagcctccgcatcctgggttcaagcgattttcgtgcctcggccttctgagtagctgggattacaggcgtgcgtgcgccaccacgcctggctaatttttgtatttttagtacagacgaggtttcaccatgttgaccaggctggtcttgaactcctgatcttaagtgatctgcccgccttggcctcccaaagtgctgggattacgggtgggaatcaccatgcccagcctcctttccatcttttctttccttctctggtcttcatactaccaaccaagcaagggaggaggagtaaaaggtaaaatcacaaaatactccggatccgcat

SEQ ID NO: 431978 - DNA, 2757 bp, Homo sapiens
gcttcccatacggcagtggctgggggagagtgatggagagaaaggctaagctaaggtcaaagaaagtggaggaaggctggcttgtcccgctggacttgacggcggagctgctgcaatctcgcgggctgggcccttgccccgggtggacccgagtgcctgcggggaggcgggtgtggctcccccgggaggtgacagctggcggggcccgtaaggagctggtctgctccggctcccctctcgtagccggcgccctgggaccagcgcgtgagcacgtctcggaggagtccgatgcgctgggcagggccgggtggtcacccccgcccagcttccaggggtgactgtgcctctgacgtcagacggcttttgggtcattccctggcacggggactttattttcataacagcatgaagtgccgtggaactggaataggcgtgtcctctccctcgaccctccccctccttgtccctctgctcacccctcgctcgttccctccctccggcgagggccgcctttataacaactgctcagagtgcgagggcgggatagctgtccaaggtctcccccagcactgaggagctcgcctgctgccctcttgcgcgcgggaagcagcaccaagttcacggccaacgccttggcactagggtccagaatggctacaacagtccctgatggttgccgcaatggcctgaaatccaagtactacagactttgtgataaggctgaagcttggggcatcgtcctagaaacggtggccacagccggggttgtgacctcggtggccttcatgctcactctcccgatcctcgtctgcaaggtgcaggactccaacaggcgaaaaatgctgcctactcagtttctcttcctcctgggtgtgttgggcatctttggcctcaccttcgccttcatcatcggactggacgggagcacagggcccacacgcttcttcctctttgggatcctcttttccatctgcttctcctgcctgctggctcatgctgtcagtctgaccaagctcgtccgggggaggaagcccctttccctgttggtgattctgggtctggccgtgggcttcagcctagtccaggatgttatcgctattgaatatattgtcctgaccatgaataggaccaacgtcaatgtcttttctgagctttccgctcctcgtcgcaatgaagactttgtcctcctgctcacctacgtcctcttcttgatggcgctgaccttcctcatgtcctccttcaccttctgtggttccttcacgggctggaagagacatggggcccacatctacctcacgatgctcctctccattgccatctgggtggcctggatcaccctgctcatgcttcctgactttgaccgcaggtgggatgacaccatcctcagctccgccttggctgccaatggctgggtgttcctgttggcttatgttagtcccgagttttggctgctcacaaagcaacgaaaccccatggattatcctgttgaggatgctttctgtaaacctcaactcgtgaagaagagctatggtgtggagaacagagcctactctcaagaggaaatcactcaaggttttgaagagacaggggacacgctctatgccccctattccacacattttcagctgcagaaccagcctccccaaaaggaattctccatcccacgggcccacgcttggccgagcccttacaaagactatgaagtaaagaaagagggcagctaactctgtcctgaagagtgggacaaatgcagccgggcggcagatctagcgggagctcaaagggatgtgggcgaaatcttgagtcttctgagaaaactgtacaagacactacgggaacagtttgcctccctcccagcctcaaccacaattcttccatgctggggctgatgtgggctagtaagactccagttcttagaggcgctgtagtatttttttttttttgtctcatccttaggatacttcttttaagtgggagtctcaggcaactcaagtttagacccttactctttttgtttgttttttgaaacaggatcttgctctgtcacccaggcttgagtgcagtggtgcgatcacagcccagtgcagcctcgaccacctgtgctcaagcaatcctcccatctccatctcccaaagtgctgggatgacaggcgtgagccacagctcccagcctaggcccttaatcttgctgttattttccatggactaaaggtctggtcatctgagctcacgctggctcacacagctctaggggcctgctcctctaactcacagtgggttttgtgaggctctgtggcccagagcagacctgcatatctgagcaaaaatagcaaaagcctctctcagcccactggcctgaatctacactggaagccaacttgctggcacccccgctccccaacccttcttgcctgggtaggagaggctaaagatcaccctaaatttactcatctctctagtgctgcctcacattgggcctcagcagctccccagcaccaattcacaggtcacccctctcttcttgcactgtccccaaacttgctgtcaattccgagatctaatctccccctacgctctgccaggaattctttcagacctcactagcacaagcccggttgctccttgtcaggagaatttgtagatcattctcacttcaaattcctggggctgatacttctctcatcttgcaccccaacctctgtaaatagatttaccgcatttacggctgcggagagatttagagtcctggaggcagcct

SEQ ID NO: 431979 - DNA, 2826 bp, Homo sapiens
gcttcccatacggcagtggctgggggagagtgatggagagaaaggctaagctaaggtcaaagaaagtggaggaaggctggcttgtcccgctggacttgacggcggagctgctgcaatctcgcgggctgggcccttgccccgggtggacccgagtgcctgcggggaggcgggtgtggctcccccgggaggtgacagctggcggggcccgtaaggagctggtctgctccggctcccctctcgtagccggcgccctgggaccagcgcgtgagcacgtctcggaggagtccgatgcgctgggcagggccgggtggtcacccccgcccagcttccaggggtgactgtgcctctgacgtcagacggcttttgggtcattccctggcacggggactttattttcataacagcatgaagtgccgtggaactggaataggcgtgtcctctccctcgaccctccccctccttgtccctctgctcacccctcgctcgttccctccctccggcgagggccgcctttataacaactgctcagagtgcgagggcgggatagctgtccaaggtctcccccagcactgaggagctcgcctgctgccctcttgcgcgcgggaagcagcaccaagttcacggccaacgccttggcactagggtccagaatggctacaacagtccctgatggttgccgcaatggcctgaaatccaagtactacagactttgtgataaggctgaagcttggggcatcgtcctagaaacggtggccacagccggggttgtgacctcggtggccttcatgctcactctcccgatcctcgtctgcaaggtgcaggactccaacaggcgaaaaatgctgcctactcagtttctcttcctcctgggtgtgttgggcatctttggcctcaccttcgccttcatcatcggactggacgggagcacagggcccacacgcttcttcctctttgggatcctcttttccatctgcttctcctgcctgctggctcatgctgtcagtctgaccaagctcgtccgggggaggaagcccctttccctgttggtgattctgggtctggccgtgggcttcagcctagtccaggatgttatcgctattgaatatattgtcctgaccatgaataggaccaacgtcaatgtcttttctgagctttccgctcctcgtcgcaatgaagactttgtcctcctgctcacctacgtcctcttcttgatggcgctgaccttcctcatgtcctccttcaccttctgtggttccttcacgggctggaagagacatggggcccacatctacctcacgatgctcctctccattgccatctgggtggcctggatcaccctgctcatgcttcctgactttgaccgcaggtgggatgacaccatcctcagctccgccttggctgccaatggctgggtgttcctgttggcttatgttagtcccgagttttggctgctcacaaagcaacgaaaccccatggattatcctgttgaggatgctttctgtaaacctcaactcgtgaagaagagctatggtgtggagaacagagcctactctcaagaggaaatcactcaaggttttgaagagacaggggacacgctctatgccccctattccacacattttcagctgcagaaccagcctccccaaaaggaattctccatcccacgggcccacgcttggccgagcccttacaaagactatgaagtaaagaaagagggcagctaactctgtcctgaagagtgggacaaatgcagccgggcggcagatctagcgggagctcaaagggatgtgggcgaaatcttgagtcttctgagaaaactgtacaagacactacgggaacagtttgcctccctcccagcctcaaccacaattcttccatgctggggctgatgtgggctagtaagactccagttcttagaggcgctgtagtatttttttttttttgtctcatccttaggatacttcttttaagtgggagtctcaggcaactcaagtttagacccttactctttttgtttgttttttgaaacaggatcttgctctgtcacccaggcttgagtgcagtggtgcgatcacagcccagtgcagcctcgaccacctgtgctcaagcaatcctcccatctccatctcccaaagtgctgggatgacaggcgtgagccacagctcccagcctaggcccttaatcttgctgttattttccatggactaaaggtctggtcatctgagctcacgctggctcacacagctctaggggcctgctcctctaactcacagtgggttttgtgaggctctgtggcccagagcagacctgcatatctgagcaaaaatagcaaaagcctctctcagcccactggcctgaatctacactggaagccaacttgctggcacccccgctccccaacccttcttgcctgggtaggagaggctaaagatcaccctaaatttactcatctctctagtgctgcctcacattgggcctcagcagctccccagcaccaattcacaggtcacccctctcttcttgcactgtccccaaacttgctgtcaattccgagatctaatctccccctacgctctgccaggaattctttcagacctgagcaagccaggcctggcttgctcaggtctccaggtctgcctgtttgaagatgaaaaataatacccatttaaaatttgccctactcaatttccttctcagtcacattttaacttttaaacagctaatcactcccatctacagattaaggtgtatatcgcccccaaaccttttgccaccttaaaaatttccttcaaggttaaactaccgcatttctcatcatgattcgat

SEQ ID NO: 431980 - DNA, 3637 bp, Homo sapiens
  misc_feature (3216)..(3216): n is a, c, g, or t
gaggtgagcagctctgggatcactctgcaggaaaagaatagagggagaaagatctcagaggacccgaaggtccagaatggctacaacagtccctgatggttgccgcaatggcctgaaatccaagtactacagactttgtgataaggctgaagcttggggcatcgtcctagaaacggtggccacagccggggttgtgacctcggtggccttcatgctcactctcccgatcctcgtctgcaaggtgcaggactccaacaggcgaaaaatgctgcctactcagtttctcttcctcctgggtgtgttgggcatctttggcctcaccttcgccttcatcatcggactggacgggagcacagggcccacacgcttcttcctctttgggatcctcttttccatctgcttctcctgcctgctggctcatgctgtcagtctgaccaagctcgtccgggggaggaagcccctttccctgttggtgattctgggtctggccgtgggcttcagcctagtccaggatgttatcgctattgaatatattgtcctgaccatgaataggaccaacgtcaatgtcttttctgagctttccgctcctcgtcgcaatgaagactttgtcctcctgctcacctacgtcctcttcttgatggcgctgaccttcctcatgtcctccttcaccttctgtggttccttcacgggctggaagagacatggggcccacatctacctcacgatgctcctctccattgccatctgggtggcctggatcaccctgctcatgcttcctgactttgaccgcaggtgggatgacaccatcctcagctccgccttggctgccaatggctgggtgttcctgttggcttatgttagtcccgagttttggctgctcacaaagcaacgaaaccccatggattatcctgttgaggatgctttctgtaaacctcaactcgtgaagaagagctatggtgtggagaacagagcctactctcaagaggaaatcactcaaggttttgaagagacaggggacacgctctatgccccctattccacacattttcagctgcagaaccagcctccccaaaaggaattctccatcccacgggcccacgcttggccgagcccttacaaagactatgaagtaaagaaagagggcagctaactctgtcctgaagagtgggacaaatgcagccgggcggcagatctagcgggagctcaaagggatgtgggcgaaatcttgagtcttctgagaaaactgtacaagacactacgggaacagtttgcctccctcccagcctcaaccacaattcttccatgctggggctgatgtgggctagtaagactccagttcttagaggcgctgtagtatttttttttttttgtctcatccttaggatacttcttttaagtgggagtctcaggcaactcaagtttagacccttactctttttgtttgttttttgaaacaggatcttgctctgtcacccaggcttgagtgcagtggtgcgatcacagcccagtgcagcctcgaccacctgtgctcaagcaatcctcccatctccatctcccaaagtgctgggatgacaggcgtgagccacagctcccagcctaggcccttaatcttgctgttattttccatggactaaaggtctggtcatctgagctcacgctggctcacacagctctaggggcctgctcctctaactcacagtgggttttgtgaggctctgtggcccagagcagacctgcatatctgagcaaaaatagcaaaagcctctctcagcccactggcctgaatctacactggaagccaacttgctggcacccccgctccccaacccttcttgcctgggtaggagaggctaaagatcaccctaaatttactcatctctctagtgctgcctcacattgggcctcagcagctccccagcaccaattcacaggtcacccctctcttcttgcactgtccccaaacttgctgtcaattccgagatctaatctccccctacgctctgccaggaattctttcagacctcactagcacaagcccggttgctccttgtcaggagaatttgtagatcattctcacttcaaattcctggggctgatacttctctcatcttgcaccccaacctctgtaaatagatttaccgcatttacggctgcattctgtaagtgggcatggtctcctaatggaggagtgttcattgtataataagttattcacctgagtatgcaataaagatgtggtggccactctttcatggtggtggcagcagttaccagtaatgagcattagactctgggggatagaacacgggctgccctgagagcttcatgttggagctgaagttcaaggttcacttcctttgggtttgtacttgacccttcttcatgtgtctctcccgttccctctaaaacaagtgtgtttcccctcatttttgaggctgtcaatggtgtgagagccaggatcatcacggggcctgaggttttactccagaaaagcagaggagtggcaaccttggcttggggtttggcagcccaggaaaggcagggaggagagctcaaagccggtttcatgtttcacccaaggtctaattgtgggagaggacaaatccagatcccctgtttgacagaattagttcacaaatgtctcttggcaaaaacatgtgacacctaaccatgataattgacttaatccaagaaagagctctgtagggcagagcaataggaaatctctctttcgttatggaaaaaaaataatccctctacatagaaactgagtgacatgtaaaaatgtgtagctaagtcagggagttacttcctaagagcctgacgctctgcttttcatcaaaaggaaaaaccagcgtgaggcagaggcgagggaggtggaggtgagtggatgatgtgctgagttagggatgtttatatgccgcaaaggtttggttggtaggcttcgcgctaagattagcctggctttgtactgaaaagggggaaggacacatagtgacacagatccttctggtctttcccaggaggtgtgacctaatgaggtttgttgtgagaataaagcaatgtggtttcacatatattatctatcataggctagggactcaagaaatgcatattccccccccactttctttctctctttccttccttccttcctttcttctttctttctttctttctttctttctttctttctttctttctttctttctttcnctctctctctctctctctctctctttctttctttttgagatagagtctcactctgtcatccaggctggagtgcagtggcatgatctcagctcactgcagcctccgcatcctgggttcaagcgattttcgtgcctcggccttctgagtagctgggattacaggcgtgcgtgcgccaccacgcctggctaatttttgtatttttagtacagacgaggtttcaccatgttgaccaggctggtcttgaactcctgatcttaagtgatctgcccgccttggcctcccaaagtgctgggattacgggtgggaatcaccatgcccagcctcctttccatcttttctttccttctctggtcttcatactaccaaccaagcaagggaggaggagtaaaaggtaaaatcacaaaatactccggatccgcat

SEQ ID NO: 431981 - DNA, 2944 bp, Homo sapiens
  misc_feature (2523)..(2523): n is a, c, g, or t
tgcccagcccatgacttttcaaatgtgcttttgaagtggtcctaggatgaggtggggctctggtgaagttctgaaaaggggcgtccctagtcatcatagttattcattcattcaaccaatattgtgtttgctttgtgcctggtcctaggcttgaggacctagtctctgtccctccaagaaacttaaggtctgctggagagacaggcaattaaatgggcaagatgtcacactgtgataagtgatacaatggggtgaacataggtgggggccccagtggtttaatttctcctgttcctccatttcaggttttgaagagacaggggacacgctctatgccccctattccacacattttcagctgcagaaccagcctccccaaaaggaattctccatcccacgggcccacgcttggccgagcccttacaaagactatgaagtaaagaaagagggcagctaactctgtcctgaagagtgggacaaatgcagccgggcggcagatctagcgggagctcaaagggatgtgggcgaaatcttgagtcttctgagaaaactgtacaagacactacgggaacagtttgcctccctcccagcctcaaccacaattcttccatgctggggctgatgtgggctagtaagactccagttcttagaggcgctgtagtatttttttttttttgtctcatccttaggatacttcttttaagtgggagtctcaggcaactcaagtttagacccttactctttttgtttgttttttgaaacaggatcttgctctgtcacccaggcttgagtgcagtggtgcgatcacagcccagtgcagcctcgaccacctgtgctcaagcaatcctcccatctccatctcccaaagtgctgggatgacaggcgtgagccacagctcccagcctaggcccttaatcttgctgttattttccatggactaaaggtctggtcatctgagctcacgctggctcacacagctctaggggcctgctcctctaactcacagtgggttttgtgaggctctgtggcccagagcagacctgcatatctgagcaaaaatagcaaaagcctctctcagcccactggcctgaatctacactggaagccaacttgctggcacccccgctccccaacccttcttgcctgggtaggagaggctaaagatcaccctaaatttactcatctctctagtgctgcctcacattgggcctcagcagctccccagcaccaattcacaggtcacccctctcttcttgcactgtccccaaacttgctgtcaattccgagatctaatctccccctacgctctgccaggaattctttcagacctcactagcacaagcccggttgctccttgtcaggagaatttgtagatcattctcacttcaaattcctggggctgatacttctctcatcttgcaccccaacctctgtaaatagatttaccgcatttacggctgcattctgtaagtgggcatggtctcctaatggaggagtgttcattgtataataagttattcacctgagtatgcaataaagatgtggtggccactctttcatggtggtggcagcagttaccagtaatgagcattagactctgggggatagaacacgggctgccctgagagcttcatgttggagctgaagttcaaggttcacttcctttgggtttgtacttgacccttcttcatgtgtctctcccgttccctctaaaacaagtgtgtttcccctcatttttgaggctgtcaatggtgtgagagccaggatcatcacggggcctgaggttttactccagaaaagcagaggagtggcaaccttggcttggggtttggcagcccaggaaaggcagggaggagagctcaaagccggtttcatgtttcacccaaggtctaattgtgggagaggacaaatccagatcccctgtttgacagaattagttcacaaatgtctcttggcaaaaacatgtgacacctaaccatgataattgacttaatccaagaaagagctctgtagggcagagcaataggaaatctctctttcgttatggaaaaaaaataatccctctacatagaaactgagtgacatgtaaaaatgtgtagctaagtcagggagttacttcctaagagcctgacgctctgcttttcatcaaaaggaaaaaccagcgtgaggcagaggcgagggaggtggaggtgagtggatgatgtgctgagttagggatgtttatatgccgcaaaggtttggttggtaggcttcgcgctaagattagcctggctttgtactgaaaagggggaaggacacatagtgacacagatccttctggtctttcccaggaggtgtgacctaatgaggtttgttgtgagaataaagcaatgtggtttcacatatattatctatcataggctagggactcaagaaatgcatattccccccccactttctttctctctttccttccttccttcctttcttctttctttctttctttctttctttctttctttctttctttctttctttctttcnctctctctctctctctctctctctttctttctttttgagatagagtctcactctgtcatccaggctggagtgcagtggcatgatctcagctcactgcagcctccgcatcctgggttcaagcgattttcgtgcctcggccttctgagtagctgggattacaggcgtgcgtgcgccaccacgcctggctaatttttgtatttttagtacagacgaggtttcaccatgttgaccaggctggtcttgaactcctgatcttaagtgatctgcccgccttggcctcccaaagtgctgggattacgggtgggaatcaccatgcccagcctcctttccatcttttctttccttctctggtcttcatactaccaaccaagcaagggaggaggagtaaaaggtaaaatcacaaaatactccggatccgcat

SEQ ID NO: 431982 - DNA, 1931 bp, Homo sapiens
gcttcccatacggcagtggctgggggagagtgatggagagaaaggctaagctaaggtcaaagaaagtggaggaaggctggcttgtcccgctggacttgacggcggagctgctgcaatctcgcgggctgggcccttgccccgggtggacccgagtgcctgcggggaggcgggtgtggctcccccgggaggtgacagctggcggggcccgtaaggagctggtctgctccggctcccctctcgtagccggcgccctgggaccagcgcgtgagcacgtctcggaggagtccgatgcgctgggcagggccgggtggtcacccccgcccagcttccaggggtgactgtgcctctgacgtcagacggcttttgggtcattccctggcacggggactttattttcataacagcatgaagtgccgtggaactggaataggcgtgtcctctccctcgaccctccccctccttgtccctctgctcacccctcgctcgttccctccctccggcgagggccgcctttataacaactgctcagagtgcgagggcgggatagctgtccaaggtctcccccagcactgaggagctcgcctgctgccctcttgcgcgcgggaagcagcaccaagttcacggccaacgccttggcactagggtccagaatggctacaacagtccctgatggttgccgcaatggcctgaaatccaagtactacagactttgtgataaggctgaagcttggggcatcgtcctagaaacggtggccacagccggggttgtgacctcggtggccttcatgctcactctcccgatcctcgtctgcaaggtgcaggactccaacaggcgaaaaatgctgcctactcagtttctcttcctcctgggtgtgttgggcatctttggcctcaccttcgccttcatcatcggactggacgggagcacagggcccacacgcttcttcctctttgggatcctcttttccatctgcttctcctgcctgctggctcatgctgtcagtctgaccaagctcgtccgggggaggaagcccctttccctgttggtgattctgggtctggccgtgggcttcagcctagtccaggatgttatcgctattgaatatattgtcctgaccatgaataggaccaacgtcaatgtcttttctgagctttccgctcctcgtcgcaatgaagactttgtcctcctgctcacctacgtcctcttcttgatggcgctgaccttcctcatgtcctccttcaccttctgtggttccttcacgggctggaagagacatggggcccacatctacctcacgatgctcctctccattgccatctgggtggcctggatcaccctgctcatgcttcctgactttgaccgcaggtgggatgacaccatcctcagctccgccttggctgccaatggctgggtgttcctgttggcttatgttagtcccgagttttggctgctcacaaagcaacgaaaccccatggattatcctgttgaggatgctttctgtaaacctcaactcgtgaagaagagctatggtgtggagaacagagcctactctcaagaggaaatcactcaaggttttgaagagacaggggacacgctctatgccccctattccacacattttcagctgcagaaccagcctccccaaaaggaattctccatcccacgggcccacgcttggccgagcccttacaaagactatgaagtaaagaaagagggcagctaactctgtcctgaagagtgggacaaatgcagccgggcggcagatctagcgggagctcaaagggatgtgggcgaaatcttgagtcttctgagaaaactgtacaagacactacgggaacagtttgcctccctcccagcctcaaccacaattcttccatgctggggctgatgtgggctagtaagactccagttgtgcaacccgggccggcca

SEQ ID NO: 431983 - DNA, 3248 bp, Homo sapiens
  misc_feature (2827)..(2827): n is a, c, g, or t
tgcccagcccatgacttttcaaatgtgcttttgaagtggtcctaggatgaggtggggctctggtgaagttctgaaaaggggcgtccctagtcatcatagttattcattcattcaaccaatattgtgtttgctttgtgcctggtcctaggcttgaggacctagtctctgtccctccaagaaacttaaggtctgctggagagacaggcaattaaatgggcaagatgtcacactgtgataagtgatacaatggggtgaacataggtgggggccccagtggtttaatttctcctgttcctccatttcaggttttgaagagacaggggacacgctctatgccccctattccacacattttcagctgcaggtaagtgatttttttctccctcttcatcaaaggcattagcacctcaggaacactgatcctttggaaacagacgatgttacctttctcatggcccctagatggccacttgaaggaatgatgggtcttctttcctctaagcggcctcacggggttagtgggtaagaatgagtgcttggcatagagaggacttgggggtgggaggcctgggagaaagggaaggaaatgagacttctgcccagactggagacctgttgaaatggcaggaactggagtgggtttcacgatatgactgtttccttttcagaaccagcctccccaaaaggaattctccatcccacgggcccacgcttggccgagcccttacaaagactatgaagtaaagaaagagggcagctaactctgtcctgaagagtgggacaaatgcagccgggcggcagatctagcgggagctcaaagggatgtgggcgaaatcttgagtcttctgagaaaactgtacaagacactacgggaacagtttgcctccctcccagcctcaaccacaattcttccatgctggggctgatgtgggctagtaagactccagttcttagaggcgctgtagtatttttttttttttgtctcatccttaggatacttcttttaagtgggagtctcaggcaactcaagtttagacccttactctttttgtttgttttttgaaacaggatcttgctctgtcacccaggcttgagtgcagtggtgcgatcacagcccagtgcagcctcgaccacctgtgctcaagcaatcctcccatctccatctcccaaagtgctgggatgacaggcgtgagccacagctcccagcctaggcccttaatcttgctgttattttccatggactaaaggtctggtcatctgagctcacgctggctcacacagctctaggggcctgctcctctaactcacagtgggttttgtgaggctctgtggcccagagcagacctgcatatctgagcaaaaatagcaaaagcctctctcagcccactggcctgaatctacactggaagccaacttgctggcacccccgctccccaacccttcttgcctgggtaggagaggctaaagatcaccctaaatttactcatctctctagtgctgcctcacattgggcctcagcagctccccagcaccaattcacaggtcacccctctcttcttgcactgtccccaaacttgctgtcaattccgagatctaatctccccctacgctctgccaggaattctttcagacctcactagcacaagcccggttgctccttgtcaggagaatttgtagatcattctcacttcaaattcctggggctgatacttctctcatcttgcaccccaacctctgtaaatagatttaccgcatttacggctgcattctgtaagtgggcatggtctcctaatggaggagtgttcattgtataataagttattcacctgagtatgcaataaagatgtggtggccactctttcatggtggtggcagcagttaccagtaatgagcattagactctgggggatagaacacgggctgccctgagagcttcatgttggagctgaagttcaaggttcacttcctttgggtttgtacttgacccttcttcatgtgtctctcccgttccctctaaaacaagtgtgtttcccctcatttttgaggctgtcaatggtgtgagagccaggatcatcacggggcctgaggttttactccagaaaagcagaggagtggcaaccttggcttggggtttggcagcccaggaaaggcagggaggagagctcaaagccggtttcatgtttcacccaaggtctaattgtgggagaggacaaatccagatcccctgtttgacagaattagttcacaaatgtctcttggcaaaaacatgtgacacctaaccatgataattgacttaatccaagaaagagctctgtagggcagagcaataggaaatctctctttcgttatggaaaaaaaataatccctctacatagaaactgagtgacatgtaaaaatgtgtagctaagtcagggagttacttcctaagagcctgacgctctgcttttcatcaaaaggaaaaaccagcgtgaggcagaggcgagggaggtggaggtgagtggatgatgtgctgagttagggatgtttatatgccgcaaaggtttggttggtaggcttcgcgctaagattagcctggctttgtactgaaaagggggaaggacacatagtgacacagatccttctggtctttcccaggaggtgtgacctaatgaggtttgttgtgagaataaagcaatgtggtttcacatatattatctatcataggctagggactcaagaaatgcatattccccccccactttctttctctctttccttccttccttcctttcttctttctttctttctttctttctttctttctttctttctttctttctttctttcnctctctctctctctctctctctctttctttctttttgagatagagtctcactctgtcatccaggctggagtgcagtggcatgatctcagctcactgcagcctccgcatcctgggttcaagcgattttcgtgcctcggccttctgagtagctgggattacaggcgtgcgtgcgccaccacgcctggctaatttttgtatttttagtacagacgaggtttcaccatgttgaccaggctggtcttgaactcctgatcttaagtgatctgcccgccttggcctcccaaagtgctgggattacgggtgggaatcaccatgcccagcctcctttccatcttttctttccttctctggtcttcatactaccaaccaagcaagggaggaggagtaaaaggtaaaatcacaaaatactccggatccgcat

SEQ ID NO: 431984 - DNA, 2347 bp, Homo sapiens
gcttcccatacggcagtggctgggggagagtgatggagagaaaggctaagctaaggtcaaagaaagtggaggaaggctggcttgtcccgctggacttgacggcggagctgctgcaatctcgcgggctgggcccttgccccgggtggacccgagtgcctgcggggaggcgggtgtggctcccccgggaggtgacagctggcggggcccgtaaggagctggtctgctccggctcccctctcgtagccggcgccctgggaccagcgcgtgagcacgtctcggaggagtccgatgcgctgggcagggccgggtggtcacccccgcccagcttccaggggtgactgtgcctctgacgtcagacggcttttgggtcattccctggcacggggactttattttcataacagcatgaagtgccgtggaactggaataggcgtgtcctctccctcgaccctccccctccttgtccctctgctcacccctcgctcgttccctccctccggcgagggccgcctttataacaactgctcagagtgcgagggcgggatagctgtccaaggtctcccccagcactgaggagctcgcctgctgccctcttgcgcgcgggaagcagcaccaagttcacggccaacgccttggcactagggtccagaatggctacaacagtccctgatggttgccgcaatggcctgaaatccaagtactacagactttgtgataaggctgaagcttggggcatcgtcctagaaacggtggccacagccggggttgtgacctcggtggccttcatgctcactctcccgatcctcgtctgcaaggtgcaggactccaacaggcgaaaaatgctgcctactcagtttctcttcctcctgggtgtgttgggcatctttggcctcaccttcgccttcatcatcggactggacgggagcacagggcccacacgcttcttcctctttgggatcctcttttccatctgcttctcctgcctgctggctcatgctgtcagtctgaccaagctcgtccgggggaggaagcccctttccctgttggtgattctgggtctggccgtgggcttcagcctagtccaggatgttatcgctattgaatatattgtcctgaccatgaataggaccaacgtcaatgtcttttctgagctttccgctcctcgtcgcaatgaagactttgtcctcctgctcacctacgtcctcttcttgatggcgctgaccttcctcatgtcctccttcaccttctgtggttccttcacgggctggaagagacatggggcccacatctacctcacgatgctcctctccattgccatctgggtggcctggatcaccctgctcatgcttcctgactttgaccgcaggtgggatgacaccatcctcagctccgccttggctgccaatggctgggtgttcctgttggcttatgttagtcccgagttttggctgctcacaaagcaacgaaaccccatggattatcctgttgaggatgctttctgtaaacctcaactcgtgaagaagagctatggtgtggagaacagagcctactctcaagaggaaatcactcaaggtacagatgcagcctggctaggcagagaatcccttgtagaaaggtgggggagaatcataggatattataactgtaaggaacatgcaagattttccagattatacccttgatagaatagataagttccttaaggctcagatcttgcttaaagtcgtccagcctgttagagacaagtagaacacgaagctggcctctggagtctttattgagtactttgtacaattggtgtagactgggagagccctcctcacttcccctttcttgtgctgtaatttcctgtggggcagaacacctcagaggtttctgtgcatcaaaataagatgcagcaaagacatggaaaaaggataacgagacaaattcccagcaataagtagatgaggttgtgttttttataaaagataacgaggcattccttccagaaatgtggagcctttgtagatttcagtgcataaaaccaagccatgatttcctgcagtgatcacagagcagagaagggagaaagcccttttatcacaaaccagcaggaagtctctgtaaaattggtaaggattctggtttagtgtgaagaaccacattttttgtgtatgtttctgggcccatgggaaggaacagatcatatttgacatacaagaatcaaatgattcaggccaggcatggtggctcactcctgtaatcctagccctctgggaggctgaggtgggaggattgcttgagcccagaagtttgagaccagcttgggcaaaatagcaagacttcatctctatttaaaaaaaaa

SEQ ID NO: 431985 - DNA, 1411 bp, Homo sapiens
aattctctgtctgtccctcggctctggggagaaagggggggctgtggcgtgggggctgaggaggggctaaggcgggaggggcgcctcatcccttcaccctcccttttcgccatgtgggggccctgagcgccgccccagaagaggtcgagggaatgttgtgggctggggcacaccagcacggcagaaactggagaaagcgagagacgtcgccagggacccagggacctctccctccagttccccgggcccgcccggccctgatggccactcacgctatagcgcccactctgtcctgggccatcccgcgccagcagtgtagcccccagcccgggcgcctgaatgctctccctccggatcgctgctcgggtccccactttggcgaccgtgcccccgagtcctgcttccccggggcctgctctgtatcaggcgcctgcgccttcaagggtacccggcccgcctgccctccccaagagccgagtttgcgctcctcccggaatcgtttgagagaaggacaaacttttggcaggatggaaatctagatgagcctgtccggagcagaacacccctgattagccaggcccaccgccatccacatctgctcggcaaagaaggaaggcagcttgttccagaccttggtgagcagctgcagactgcctgcctagaacagcctccttactccagcctggcagggaaggaaggaacctgacttgcttcgcaggatctggaagctcagccggcagagctgagagccgcagttgcatcctggagcctgatgctagaagcagcttccgtctttgggttcttgctgcctcggcctctgctctgttcagtttgctgttgtgtttttctcccccatgttggggtggtggggtacagggaaataaaatgctttctcccaggcccctaatccttccccatgcctccatcagcctcaaagctgctgacagtcatgaactgcaccttccagccctgcccataagctactcaaagcaaattcaaattctcttctggccaggaggaagggcagatgctccctccttcctcaagcctccctggctcattgatccattttgagggcatttgggggtcaaagttgagaccagattgcttcagtttgtataaaattagcatttcttatcacaccaaggccacacctgttctctggcctcacaaaccagtgaggatgtaaaggtttgttgaggtggaggaacagaagtgaaatgagcaatctgctccatttagaagtcagtcgcttcggctgttcattccactaatatttatctagtacctattctgtgccaagcattgtctctacctcagtttgccacaaatatgaaaaaaaaaaattcttggaactgtgaggcttcaatgtgttgtggaccaatatacaaataaaccaatggaaaagaaa

SEQ ID NO: 431986 - DNA, 1618 bp, Homo sapiens
aattctctgtctgtccctcggctctggggagaaagggggggctgtggcgtgggggctgaggaggggctaaggcgggaggggcgcctcatcccttcaccctcccttttcgccatgtgggggccctgagcgccgccccagaagaggtcgagggaatgttgtgggctggggcacaccagcacggcagaaactggagaaagcgagagacgtcgccagggacccagggacctctccctccagttccccgggcccgcccggccctgatggccactcacgctatagcgcccactctgtcctgggccatcccgcgccagcagtgtagcccccagcccgggcgcctgaatgctctccctccggatcgctgctcgggtccccactttggcgaccgtgcccccgagtcctgcttccccggggcctgctctgtatcaggcgcctgcgccttcaagggtacccggcccgcctgccctccccaagagccgagtttgcgctcctcccggaatcgtttgagagaaggacaaacttttggcaggatggaaatctagatgagcctgtccggagcagtcgggaccgattaccagcctagaaaaacccagccgcgtcccaaacccgctcaccccagcaggcccttagagacgcttggagatccccagacacgccccgcggaaagacaattcttccccactcccagccatctgcaaaccacagtcagcctgtccctgctcccaaaaatggaattgctgatgccctcaaggctgttactctcccaggaacacccctgattagccaggcccaccgccatccacatctgctcggcaaagaaggaaggcagcttgttccagaccttggtgagcagctgcagactgcctgcctagaacagcctccttactccagcctggcagggaaggaaggaacctgacttgcttcgcaggatctggaagctcagccggcagagctgagagccgcagttgcatcctggagcctgatgctagaagcagcttccgtctttgggttcttgctgcctcggcctctgctctgttcagtttgctgttgtgtttttctcccccatgttggggtggtggggtacagggaaataaaatgctttctcccaggcccctaatccttccccatgcctccatcagcctcaaagctgctgacagtcatgaactgcaccttccagccctgcccataagctactcaaagcaaattcaaattctcttctggccaggaggaagggcagatgctccctccttcctcaagcctccctggctcattgatccattttgagggcatttgggggtcaaagttgagaccagattgcttcagtttgtataaaattagcatttcttatcacaccaaggccacacctgttctctggcctcacaaaccagtgaggatgtaaaggtttgttgaggtggaggaacagaagtgaaatgagcaatctgctccatttagaagtcagtcgcttcggctgttcattccactaatatttatctagtacctattctgtgccaagcattgtctctacctcagtttgccacaaatatgaaaaaaaaaaattcttggaactgtgaggcttcaatgtgttgtggaccaatatacaaataaaccaatggaaaagaaa

SEQ ID NO: 431987 - DNA, 675 bp, Homo sapiens
ccgagaacaatctgtctctccccgtcccggtctctccctccccttacccctgtttcccctgcaggctgacatattaatctgccttcccccgggagaaatttgggctggggttgggcttctgtcagatgcatggggtcagagcagctttcctccccgagtttagggactaaggtggtagctggcaggggagggggagggttgcttccgaaactgaggattgaggggagggttaggggccgagaaacccagagtctgagggagacgacttctttcctcaaacgcaacttgggggaacttcggaaaagttttttgaggggagatggagaagggagcggagttggggtttcgagggctaaagtgggagagagggtgctccgcttcccgtactgaaggaaggatgtgtgtgcttattccccagtcgggaccgattaccagcctagaaaaacccagccgcgtcccaaacccgctcaccccagcaggcccttagagacgcttggagatccccagacacgccccgcggaaagggaaggaaatgccagcccgagttgccgactctgccgggacggggcgggggatccgcccagagcggtcccctgctgtcctgggcccttacgttgattctaagttaggagtgatctgagagagggaataactcccaaaaatcttttttttttt

SEQ ID NO: 431988 - DNA, 3105 bp, Homo sapiens
gttgaagtggcgagagcgctcagatacgcgacgcgtagcaggcggggaccgaacgggtgcctcagtgtccttcccctcccctcgcctggcctcgccgtcctctccccgcagccggaccggaactatgtgatcccggaagttccggggcctttgctgtgtgggataaacagtaatggcggaggctgcaactcccggaacaacagccacaacatcaggagcaggagcggcagcggcgacggcggcagcagcctcccccaccccgatccccacagtcaccgccccgtccctgggggcgggcggagggggcggcggcagcgacggcagcggcggcggctggactaaacaggtcacctgcaggtattttatgcatggggtttgtaaggaaggagacaactgtcgctactcgcatgacctctctgacagtccgtatagtgtagtgtgcaagtattttcagcgagggtactgtatttatggagaccgctgcagatatgaacatagcaaaccattgaaacaggaagaagcaactgctacagagctaactacaaagtcatcccttgctgcttcctcaagtctctcatcgatagttggaccacttgttgaaatgaatacaggcgaagctgagtcaagaaattcaaactttgcaactgtaggagcaggttcagaggactgggtgaatgctattgagtttgttcctgggcaaccctactgtggccgtactgcgccttcctgcactgaagcacccctgcagggctcagtgaccaaggaagaatcagagaaagagcaaaccgccgtggagacaaagaagcagctgtgcccctatgctgcagtgggagagtgccgatacggggagaactgtgtgtatctccacggagattcttgtgacatgtgtgggctgcaggtcctgcatccaatggatgctgcccagagatcgcagcatatcaaatcgtgcattgaggcccatgagaaggacatggagctctcatttgccgtgcagcgcagcaaggacatggtgtgtgggatctgcatggaggtggtctatgagaaagccaaccccagtgagcgccgcttcgggatcctctccaactgcaaccacacctactgtctcaagtgcattcgcaagtggaggagtgctaagcaatttgagagcaagatcataaagtcctgcccagaatgccggatcacatctaactttgtcattccaagtgagtactgggtggaggagaaagaagagaagcagaaactcattctgaaatacaaggaggcaatgagcaacaaggcgtgcaggtattttgatgaaggacgtgggagctgcccatttggagggaactgtttttacaagcatgcgtaccctgatggccgtagagaggagccacagagacagaaagtgggaacatcaagcagataccgggcccaacgaaggaaccacttctgggaactcattgaggaaagagagaacagcaacccctttgacaacgatgaagaagaggttgtcacctttgagctgggcgagatgttgcttatgcttttggctgcaggtggggacgacgaactaacagactctgaagatgagtgggacttgtttcatgatgagctggaagatttttatgacttggatctatagcaaccttgcgtggcgtgtgaactggtctgctgacctcagacagcagctgtcccctgtggtggtgtggcagtgcctgtgttctctcctaggcaggcctctcaactccaggtgctgtcctaagaatttttacccagggcctgtcttctcaacccctcacctttccctgaggagtgtgttgttttccctgttgaaaaaagttacaaaaataaatcttaaagttagttttttgtaacacgaatttaactgtcagacagttagtgtaggtgtgttgcgtcatctgttttcaaccagattgcatttatggacttttcacacactcattttgaggaccccaggttcaaaagtaaaagcagtggccctgctttggggtccaagaataggagtgatgggtgaagggacctaagctggccaatagccctctgccccagacatgggatgtggatccttgaggtttctggtgaaatctgcacatctgtgtttttatatctgttccctaccctgtaatccctaccacgtgcacttgttctgtggttttggtctcttgtttaattgcacacaagtaatactactgggtaaccagaatcaggtgtgaatgtgttgagattttttactgttttgcatgataggaaaattgagaaagaatacgtataaaagatagagaggcataacatcaatgcagagttggaagttggctcccaagggctgacatggtgtgagtgtgtgggtgtgtgataagcttctcatccctgcatagatgcagtattcttagccttagtagaaaaacctggtttagtggtttaagccttgtgtggcagatagatcttaaagggcaaagcagtatattggtagttgtcaatatagcagtgctagctctgtctatataaatagagaaatggggttagccatagaggttaaaactacctggttatcccatataataacacaaactgggtcttggatacacagttgtatttaatgttttacgatctagcctttccagtacaggcactttctgagaaacctttgtcctcacttgaggcattttgttgtcgggtttttgtgtttgtttttgtgggtatttgcctcattccacccctgagctttcaggtagacagacgtgattcaaaactctgttctaaggtgtttattgtagtggagtaatgggtttgcagtgataagtcatacttttccaccgaaagggagggcttgggaatccctgagattagctaaagttaagttgttggaagaattccttgattggaaattgtacctttgtgttttgttgctctgtttcctgaaaataactcggggatgctcctggtttgtccatctactgctttgattccttggatcccacccattctttcactttaagaaaaaacaaataattgttgcagaggtctctgtattttgcagctgcccttttgtaagaagcacttttcccaaataaaacaattaaaaaaaaagttggctgttctgtgtaa

SEQ ID NO: 431989 - DNA, 1616 bp, Homo sapiens
gttgaagtggcgagagcgctcagatacgcgacgcgtagcaggcggggaccgaacgggtgcctcagtgtccttcccctcccctcgcctggcctcgccgtcctctccccgcagccggaccggaactatgtgatcccggaagttccggggcctttgctgtgtgggataaacagtaatggcggaggctgcaactcccggaacaacagccacaacatcaggagcaggagcggcagcggcgacggcggcagcagcctcccccaccccgatccccacagtcaccgccccgtccctgggggcgggcggagggggcggcggcagcgacggcagcggcggcggctggactaaacaggtcacctgcaggtattttatgcatggggtttgtaaggaaggagacaactgtcgctactcgcatgacctctctgacagtccgtatagtgtagtgtgcaagtattttcagcgagggtactgtatttatggagaccgctgcagatatgaacatagcaaaccattgaaacaggaagaagcaactgctacagagctaactacaaagtcatcccttgctgcttcctcaagtctctcatcgatagttggaccacttgttgaaatgaatacaggcgaagctgagtcaagaaattcaaactttgcaactgtaggagcaggttcagaggactgggtgaatgctattgagtttgttcctgggcaaccctactgtggccgtactgcgccttcctgcactgaagcacccctgcagggctcagtgaccaaggaagaatcagagaaagagcaaaccgccgtggagacaaagaagcagctgtgcccctatgctgcagtgggagagtgccgatacggggagaactgtgtgtatctccacggagattcttgtgacatgtgtgggctgcaggtcctgcatccaatggatgctgcccagagatcgcagcatatcaaatcgtgcattgaggcccatgagaaggacatggagctctcatttgccgtgcagcgcagcaaggacatggtgtgtgggatctgcatggaggtggtctatgagaaagccaaccccagtgagcgccgcttcgggatcctctccaactgcaaccacacctactgtctcaagtgcattcgcaagtggaggagtgctaagcaatttgagagcaagatcataaagtgagactcctccccagtcttcatttgtgctttctcttttggggaagaatttagtaacttgtgccaactttcaaccagatggaccgcatttaaatgcatgcattttatcttgaaactgggatattctaatggggatttcttctttgtatttcagctagcttctaggttagttggtctatctacttttatttgaatgaggaaaccctgtgtatcagttagaatcttcgtgctttttctgaggagattgtgtttaatggattattagccagtttaggctcagtgaacaaactgatctagctctgaatgtatgtttcctgacgttttacatttccactttcctattccattcattaagctagccaacaatccaccatcctttaaagattgttctcataactgaacaaaaaccacataatctaaacagagcaaagctacaagaaataaatttatttaaacga

SEQ ID NO: 431990 - DNA, 1407 bp, Homo sapiens
gttgaagtggcgagagcgctcagatacgcgacgcgtagcaggcggggaccgaacgggtgcctcagtgtccttcccctcccctcgcctggcctcgccgtcctctccccgcagccggaccggaactatgtgatcccggaagttccggggcctttgctgtgtgggataaacagtaatggcggaggctgcaactcccggaacaacagccacaacatcaggagcaggagcggcagcggcgacggcggcagcagcctcccccaccccgatccccacagtcaccgccccgtccctgggggcgggcggagggggcggcggcagcgacggcagcggcggcggctggactaaacaggtcacctgcaggtattttatgcatggggtttgtaaggaaggagacaactgtcgctactcgcatgacctctctgacagtccgtatagtgtagtgtgcaagtattttcagcgagggtactgtatttatggagaccgctgcagatatgaacatagcaaaccattgaaacaggaagaagcaactgctacagagctaactacaaagtcatcccttgctgcttcctcaagtctctcatcgatagttggaccacttgttgaaatgaatacaggcgaagctgagtcaagaaattcaaactttgcaactgtaggagcaggttcagaggactgggtgaatgctattgagtttgttcctgggcaaccctactgtggccgtactgcgccttcctgcactgaagcacccctgcagggctcagtgaccaaggaagaatcagagaaagagcaaaccgccgtggagacaaagaagcagctgtgcccctatgctgcagtgggagaaagccaaccccagtgagcgccgcttcgggatcctctccaactgcaaccacacctactgtctcaagtgcattcgcaagtggaggagtgctaagcaatttgagagcaagatcataaagtgagactcctccccagtcttcatttgtgctttctcttttggggaagaatttagtaacttgtgccaactttcaaccagatggaccgcatttaaatgcatgcattttatcttgaaactgggatattctaatggggatttcttctttgtatttcagctagcttctaggttagttggtctatctacttttatttgaatgaggaaaccctgtgtatcagttagaatcttcgtgctttttctgaggagattgtgtttaatggattattagccagtttaggctcagtgaacaaactgatctagctctgaatgtatgtttcctgacgttttacatttccactttcctattccattcattaagctagccaacaatccaccatcctttaaagattgttctcataactgaacaaaaaccacataatctaaacagagcaaagctacaagaaataaatttatttaaacga

SEQ ID NO: 431991 - DNA, 960 bp, Homo sapiens
agcggcagtcactgcgtcaacccccgctgggccgcggagccctcagcgctgtccgcggaggcctggcggtgcgcgattactgcggagccgcggggctgcaccgccgcttacacttccctgagcgctgcctgagctggctgcgagcgcatcggggagaggtattttatgcatggggtttgtaaggaaggagacaactgtcgctactcgcatgacctctctgacagtccgtatagtgtagtgtgcaagtattttcagcgagggtactgtatttatggagaccgctgcagtcgtgcattgaggcccatgagaaggacatggagctctcatttgccgtgcagcgcagcaaggacatggtgtgtgggatctgcatggaggtggtctatgagaaagccaaccccagtgagcgccgcttcgggatcctctccaactgcaaccacacctactgtctcaagtgcattcgcaagtggaggagtgctaagcaatttgagagcaagatcataaagtgagactcctccccagtcttcatttgtgctttctcttttggggaagaatttagtaacttgtgccaactttcaaccagatggaccgcatttaaatgcatgcattttatcttgaaactgggatattctaatggggatttcttctttgtatttcagctagcttctaggttagttggtctatctacttttatttgaatgaggaaaccctgtgtatcagttagaatcttcgtgctttttctgaggagattgtgtttaatggattattagccagtttaggctcagtgaacaaactgatctagctctgaatgtatgtttcctgacgttttacatttccactttcctattccattcattaagctagccaacaatccaccatcctttaaagattgttctcataactgaacaaaaaccacataatctaaacagagcaaagctacaagaaataaatttatttaaacga

SEQ ID NO: 431992 - DNA, 550 bp, Homo sapiens
gttgaagtggcgagagcgctcagatacgcgacgcgtagcaggcggggaccgaacgggtgcctcagtgtccttcccctcccctcgcctggcctcgccgtcctctccccgcagccggaccggaactatgtgatcccggaagttccggggcctttgctgtgtgggataaacagtaatggcggaggctgcaactcccggaacaacagccacaacatcaggagcaggagcggcagcggcgacggcggcagcagcctcccccaccccgatccccacagtcaccgccccgtccctgggggcgggcggagggggcggcggcagcgacggcagcggcggcggctggactaaacaggtcacctgcaggtattttatgcatggggtttgtaaggaaggagacaactgtcgctactcgcatgacctctctgacagtccgtatagtgtagtgtgcaagtattttcagcgagggcagaggtctctgtattttgcagctgcccttttgtaagaagcacttttcccaaataaaacaattaaaaaaaaagttggctgttctgtgtaa

SEQ ID NO: 431993 - DNA, 3855 bp, Homo sapiens
gttgaagtggcgagagcgctcagatacgcgacgcgtagcaggcggggaccgaacgggtgcctcagtgtccttcccctcccctcgcctggcctcgccgtcctctccccgcagccggaccggaactatgtgatcccggaagttccggggcctttgctgtgtgggataaacagtaatggcggaggctgcaactcccggaacaacagccacaacatcaggagcaggagcggcagcggcgacggcggcagcagcctcccccaccccgatccccacagtcaccgccccgtccctgggggcgggcggagggggcggcggcagcgacggcagcggcggcggctggactaaacaggtcacctgcaggtattttatgcatggggtttgtaaggaaggagacaactgtcgctactcgcatgacctctctgacagtccgtatagtgtagtgtgcaagtattttcagcgagggtactgtatttatggagaccgctgcagatatgaacatagcaaaccattgaaacaggaagaagcaactgctacagagctaactacaaagtcatcccttgctgcttcctcaagtctctcatcgatagttggaccacttgttgaaatgaatacaggcgaagctgagtcaagaaattcaaactttgcaactgtaggagcaggttcagaggactgggtgaatgctattgagtttgttcctgggcaaccctactgtggccgtactgcgccttcctgcactgaagcacccctgcagggctcagtgaccaaggaagaatcagagaaagagcaaaccgccgtggagacaaagaagcagctgtgcccctatgctgcagtgggagagtgccgatacggggagaactgtgtgtatctccacggagattcttgtgacatgtgtgggctgcaggtcctgcatccaatggatgctgcccagagatcgcagcatatcaaatcgtgcattgaggcccatgagaaggacatggagctctcatttgccgtgcagcgcagcaaggacatggtgtgtgggatctgcatggaggtggtctatgagaaagccaaccccagtgagcgccgcttcgggatcctctccaactgcaaccacacctactgtctcaagtgcattcgcaagtggaggagtgctaagcaatttgagagcaagatcataaagtgagactcctccccagtcttcatttgtgctttctcttttggggaagaatttagtaacttgtgccaactttcaaccagatggaccgcatttaaatgcatgcattttatcttgaaactgggatattctaatggggatttcttctttgtatttcagctagcttctaggttagttggtctatctacttttatttgaatgaggaaaccctgtgtatcagttagaatcttcgtgctttttctgaggagattgtgtttaatggattattagccagtttaggctcagtgaacaaactgatctagctctgaatgtatgtttcctgacgttttacatttccactttcctattccattcattaagctagccaacaatccaccatcctttaaagattgttctcataactgaacaaaaaccacataatctaaacagagcaaagctacaagaaataaatttatttaaacgaaagaaaaaggagtctgtgtgaaatgtcttcttttgtttttgttttttacctaagttatatttttcaaaaaaaaaaaaaagaactggctagcccttgagttggatttataaaggaggttgccttgcttgaaagaaatggtcagttgtgtgacagtatgtggaaccctttcaggaaatgcccacgtgcctttcagttaagtctttaagtctggaggcgacacaccagggtgtgtccttgaagagtgggcctgtaaaaggggaatttgcattgcagcctgttcattgtttcccaggtcctgcccagaatgccggatcacatctaactttgtcattccaagtgagtactgggtggaggagaaagaagagaagcagaaactcattctgaaatacaaggaggcaatgagcaacaaggcgtgcaggtattttgatgaaggacgtgggagctgcccatttggagggaactgtttttacaagcatgcgtaccctgatggccgtagagaggagccacagagacagaaagtgggaacatcaagcagataccgggcccaacgaaggaaccacttctgggaactcattgaggaaagagagaacagcaacccctttgacaacgatgaagaagaggttgtcacctttgagctgggcgagatgttgcttatgcttttggctgcaggtggggacgacgaactaacagactctgaagatgagtgggacttgtttcatgatgagctggaagatttttatgacttggatctatagcaaccttgcgtggcgtgtgaactggtctgctgacctcagacagcagctgtcccctgtggtggtgtggcagtgcctgtgttctctcctaggcaggcctctcaactccaggtgctgtcctaagaatttttacccagggcctgtcttctcaacccctcacctttccctgaggagtgtgttgttttccctgttgaaaaaagttacaaaaataaatcttaaagttagttttttgtaacacgaatttaactgtcagacagttagtgtaggtgtgttgcgtcatctgttttcaaccagattgcatttatggacttttcacacactcattttgaggaccccaggttcaaaagtaaaagcagtggccctgctttggggtccaagaataggagtgatgggtgaagggacctaagctggccaatagccctctgccccagacatgggatgtggatccttgaggtttctggtgaaatctgcacatctgtgtttttatatctgttccctaccctgtaatccctaccacgtgcacttgttctgtggttttggtctcttgtttaattgcacacaagtaatactactgggtaaccagaatcaggtgtgaatgtgttgagattttttactgttttgcatgataggaaaattgagaaagaatacgtataaaagatagagaggcataacatcaatgcagagttggaagttggctcccaagggctgacatggtgtgagtgtgtgggtgtgtgataagcttctcatccctgcatagatgcagtattcttagccttagtagaaaaacctggtttagtggtttaagccttgtgtggcagatagatcttaaagggcaaagcagtatattggtagttgtcaatatagcagtgctagctctgtctatataaatagagaaatggggttagccatagaggttaaaactacctggttatcccatataataacacaaactgggtcttggatacacagttgtatttaatgttttacgatctagcctttccagtacaggcactttctgagaaacctttgtcctcacttgaggcattttgttgtcgggtttttgtgtttgtttttgtgggtatttgcctcattccacccctgagctttcaggtagacagacgtgattcaaaactctgttctaaggtgtttattgtagtggagtaatgggtttgcagtgataagtcatacttttccaccgaaagggagggcttgggaatccctgagattagctaaagttaagttgttggaagaattccttgattggaaattgtacctttgtgttttgttgctctgtttcctgaaaataactcggggatgctcctggtttgtccatctactgctttgattccttggatcccacccattctttcactttaagaaaaaacaaataattgttgcagaggtctctgtattttgcagctgcccttttgtaagaagcacttttcccaaataaaacaattaaaaaaaaagttggctgttctgtgtaa

SEQ ID NO: 431994 - DNA, 3038 bp, Homo sapiens
gttgaagtggcgagagcgctcagatacgcgacgcgtagcaggcggggaccgaacgggtgcctcagtgtccttcccctcccctcgcctggcctcgccgtcctctccccgcagccggaccggaactatgtgatcccggaagttccggggcctttgctgtgtgggataaacagtaatggcggaggctgcaactcccggaacaacagccacaacatcaggagcaggagcggcagcggcgacggcggcagcagcgacggcagcggcggcggctggactaaacaggtcacctgcaggtattttatgcatggggtttgtaaggaaggagacaactgtcgctactcgcatgacctctctgacagtccgtatagtgtagtgtgcaagtattttcagcgagggtactgtatttatggagaccgctgcagatatgaacatagcaaaccattgaaacaggaagaagcaactgctacagagctaactacaaagtcatcccttgctgcttcctcaagtctctcatcgatagttggaccacttgttgaaatgaatacaggcgaagctgagtcaagaaattcaaactttgcaactgtaggagcaggttcagaggactgggtgaatgctattgagtttgttcctgggcaaccctactgtggccgtactgcgccttcctgcactgaagcacccctgcagggctcagtgaccaaggaagaatcagagaaagagcaaaccgccgtggagacaaagaagcagctgtgcccctatgctgcagtgggagagtgccgatacggggagaactgtgtgtatctccacggagattcttgtgacatgtgtgggctgcaggtcctgcatccaatggatgctgcccagagatcgcagcatatcaaatcgtgcattgaggcccatgagaaggacatggagctctcatttgccgtgcagcgcagcaaggacatggtgtgtgggatctgcatggaggtggtctatgagaaagccaaccccagtgagcgccgcttcgggatcctctccaactgcaaccacacctactgtctcaagtgcattcgcaagtggaggagtgctaagcaatttgagagcaagatcataaagtcctgcccagaatgccggatcacatctaactttgtcattccaagtgagtactgggtggaggagaaagaagagaagcagaaactcattctgaaatacaaggaggcaatgagcaacaaggcgtgcaggtattttgatgaaggacgtgggagctgcccatttggagggaactgtttttacaagcatgcgtaccctgatggccgtagagaggagccacagagacagaaagtgggaacatcaagcagataccgggcccaacgaaggaaccacttctgggaactcattgaggaaagagagaacagcaacccctttgacaacgatgaagaagaggttgtcacctttgagctgggcgagatgttgcttatgcttttggctgcaggtggggacgacgaactaacagactctgaagatgagtgggacttgtttcatgatgagctggaagatttttatgacttggatctatagcaaccttgcgtggcgtgtgaactggtctgctgacctcagacagcagctgtcccctgtggtggtgtggcagtgcctgtgttctctcctaggcaggcctctcaactccaggtgctgtcctaagaatttttacccagggcctgtcttctcaacccctcacctttccctgaggagtgtgttgttttccctgttgaaaaaagttacaaaaataaatcttaaagttagttttttgtaacacgaatttaactgtcagacagttagtgtaggtgtgttgcgtcatctgttttcaaccagattgcatttatggacttttcacacactcattttgaggaccccaggttcaaaagtaaaagcagtggccctgctttggggtccaagaataggagtgatgggtgaagggacctaagctggccaatagccctctgccccagacatgggatgtggatccttgaggtttctggtgaaatctgcacatctgtgtttttatatctgttccctaccctgtaatccctaccacgtgcacttgttctgtggttttggtctcttgtttaattgcacacaagtaatactactgggtaaccagaatcaggtgtgaatgtgttgagattttttactgttttgcatgataggaaaattgagaaagaatacgtataaaagatagagaggcataacatcaatgcagagttggaagttggctcccaagggctgacatggtgtgagtgtgtgggtgtgtgataagcttctcatccctgcatagatgcagtattcttagccttagtagaaaaacctggtttagtggtttaagccttgtgtggcagatagatcttaaagggcaaagcagtatattggtagttgtcaatatagcagtgctagctctgtctatataaatagagaaatggggttagccatagaggttaaaactacctggttatcccatataataacacaaactgggtcttggatacacagttgtatttaatgttttacgatctagcctttccagtacaggcactttctgagaaacctttgtcctcacttgaggcattttgttgtcgggtttttgtgtttgtttttgtgggtatttgcctcattccacccctgagctttcaggtagacagacgtgattcaaaactctgttctaaggtgtttattgtagtggagtaatgggtttgcagtgataagtcatacttttccaccgaaagggagggcttgggaatccctgagattagctaaagttaagttgttggaagaattccttgattggaaattgtacctttgtgttttgttgctctgtttcctgaaaataactcggggatgctcctggtttgtccatctactgctttgattccttggatcccacccattctttcactttaagaaaaaacaaataattgttgcagaggtctctgtattttgcagctgcccttttgtaagaagcacttttcccaaataaaacaattaaaaaaaaagttggctgttctgtgtaa

SEQ ID NO: 431995 - DNA, 2994 bp, Homo sapiens
gttgaagtggcgagagcgctcagatacgcgacgcgtagcaggcggggaccgaacgggtgcctcagtgtccttcccctcccctcgcctggcctcgccgtcctctccccgcagccggaccggaactatgtgatcccggaagttccggggcctttgctgtgtgggataaacagtaatggcggaggctgcaactcccggaacaacagccacaacatcaggagcaggagcggcagcggcgacggcggcagcagcctcccccaccccgatccccacagtcaccgccccgtccctgggggcgggcggagggggcggcggcagcgacggcagcggcggcggctggactaaacaggtcacctgcaggtattttatgcatggggtttgtaaggaaggagacaactgtcgctactcgcatgacctctctgacagtccgtatagtgtagtgtgcaagtattttcagcgagggtactgtatttatggagaccgctgcagatatgaacatagcaaaccattgaaacaggaagaagcaactgctacagagctaactacaaagtcatcccttgctgcttcctcaagtctctcatcgatagttggaccacttgttgaaatgaatacaggcgaagctgagtcaagaaattcaaactttgcaactgtaggagcaggttcagaggactgggtgaatgctattgagtttgttcctgggcaaccctactgtggccgtactgcgccttcctgcactgaagcacccctgcagggctcagtgaccaaggaagaatcagagaaagagcaaaccgccgtggagacaaagaagcagctgtgcccctatgctgcagtgggagagtgccgatacggggagaactgtgtgtatctccacggagattcttgtgacatgtgtgggctgcaggtcctgcatccaatggatgctgcccagagatcgcagcatatcaaatcgtgcattgaggcccatgagaaggacatggagctctcatttgccgtgcagcgcagcaaggacatggtgtgtgggatctgcatggaggtggtctatgagaaagccaaccccagtgagcgccgcttcgggatcctctccaactgcaaccacacctactgtctcaagtgcattcgcaagtggaggagtgctaagcaatttgagagcaagatcataaacaacaaggcgtgcaggtattttgatgaaggacgtgggagctgcccatttggagggaactgtttttacaagcatgcgtaccctgatggccgtagagaggagccacagagacagaaagtgggaacatcaagcagataccgggcccaacgaaggaaccacttctgggaactcattgaggaaagagagaacagcaacccctttgacaacgatgaagaagaggttgtcacctttgagctgggcgagatgttgcttatgcttttggctgcaggtggggacgacgaactaacagactctgaagatgagtgggacttgtttcatgatgagctggaagatttttatgacttggatctatagcaaccttgcgtggcgtgtgaactggtctgctgacctcagacagcagctgtcccctgtggtggtgtggcagtgcctgtgttctctcctaggcaggcctctcaactccaggtgctgtcctaagaatttttacccagggcctgtcttctcaacccctcacctttccctgaggagtgtgttgttttccctgttgaaaaaagttacaaaaataaatcttaaagttagttttttgtaacacgaatttaactgtcagacagttagtgtaggtgtgttgcgtcatctgttttcaaccagattgcatttatggacttttcacacactcattttgaggaccccaggttcaaaagtaaaagcagtggccctgctttggggtccaagaataggagtgatgggtgaagggacctaagctggccaatagccctctgccccagacatgggatgtggatccttgaggtttctggtgaaatctgcacatctgtgtttttatatctgttccctaccctgtaatccctaccacgtgcacttgttctgtggttttggtctcttgtttaattgcacacaagtaatactactgggtaaccagaatcaggtgtgaatgtgttgagattttttactgttttgcatgataggaaaattgagaaagaatacgtataaaagatagagaggcataacatcaatgcagagttggaagttggctcccaagggctgacatggtgtgagtgtgtgggtgtgtgataagcttctcatccctgcatagatgcagtattcttagccttagtagaaaaacctggtttagtggtttaagccttgtgtggcagatagatcttaaagggcaaagcagtatattggtagttgtcaatatagcagtgctagctctgtctatataaatagagaaatggggttagccatagaggttaaaactacctggttatcccatataataacacaaactgggtcttggatacacagttgtatttaatgttttacgatctagcctttccagtacaggcactttctgagaaacctttgtcctcacttgaggcattttgttgtcgggtttttgtgtttgtttttgtgggtatttgcctcattccacccctgagctttcaggtagacagacgtgattcaaaactctgttctaaggtgtttattgtagtggagtaatgggtttgcagtgataagtcatacttttccaccgaaagggagggcttgggaatccctgagattagctaaagttaagttgttggaagaattccttgattggaaattgtacctttgtgttttgttgctctgtttcctgaaaataactcggggatgctcctggtttgtccatctactgctttgattccttggatcccacccattctttcactttaagaaaaaacaaataattgttgcagaggtctctgtattttgcagctgcccttttgtaagaagcacttttcccaaataaaacaattaaaaaaaaagttggctgttctgtgtaa

SEQ ID NO: 431996 - DNA, 3143 bp, Homo sapiens
agcggcagtcactgcgtcaacccccgctgggccgcggagccctcagcgctgtccgcggaggcctggcggtgcgcgattactgcggagccgcggggctgcaccgccgcttacacttccctgagcgctgcctgagctggctgcgagcgcatcggggagaggtgggctggctcctcccctgccgctggaaggatgcccccgccgctgcctccggctcccggggctcgggaggtggtcacttgaggccggtctcccagcgatcctctccgggcctagacaccccgccgagggccccagcgagcttgcctggctcccggccctctcctctctccgtgccatccgtttgtaacgtcttttcacgtccctccgtccctccgccccccatcctccgcccaactgtattttatgcatggggtttgtaaggaaggagacaactgtcgctactcgcatgacctctctgacagtccgtatagtgtagtgtgcaagtattttcagcgagggtactgtatttatggagaccgctgcagatatgaacatagcaaaccattgaaacaggaagaagcaactgctacagagctaactacaaagtcatcccttgctgcttcctcaagtctctcatcgatagttggaccacttgttgaaatgaatacaggcgaagctgagtcaagaaattcaaactttgcaactgtaggagcaggttcagaggactgggtgaatgctattgagtttgttcctgggcaaccctactgtggccgtactgcgccttcctgcactgaagcacccctgcagggctcagtgaccaaggaagaatcagagaaagagcaaaccgccgtggagacaaagaagcagctgtgcccctatgctgcagtgggagagtgccgatacggggagaactgtgtgtatctccacggagattcttgtgacatgtgtgggctgcaggtcctgcatccaatggatgctgcccagagatcgcagcatatcaaatcgtgcattgaggcccatgagaaggacatggagctctcatttgccgtgcagcgcagcaaggacatggtgtgtgggatctgcatggaggtggtctatgagaaagccaaccccagtgagcgccgcttcgggatcctctccaactgcaaccacacctactgtctcaagtgcattcgcaagtggaggagtgctaagcaatttgagagcaagatcataaagtcctgcccagaatgccggatcacatctaactttgtcattccaagtgagtactgggtggaggagaaagaagagaagcagaaactcattctgaaatacaaggaggcaatgagcaacaaggcgtgcaggtattttgatgaaggacgtgggagctgcccatttggagggaactgtttttacaagcatgcgtaccctgatggccgtagagaggagccacagagacagaaagtgggaacatcaagcagataccgggcccaacgaaggaaccacttctgggaactcattgaggaaagagagaacagcaacccctttgacaacgatgaagaagaggttgtcacctttgagctgggcgagatgttgcttatgcttttggctgcaggtggggacgacgaactaacagactctgaagatgagtgggacttgtttcatgatgagctggaagatttttatgacttggatctatagcaaccttgcgtggcgtgtgaactggtctgctgacctcagacagcagctgtcccctgtggtggtgtggcagtgcctgtgttctctcctaggcaggcctctcaactccaggtgctgtcctaagaatttttacccagggcctgtcttctcaacccctcacctttccctgaggagtgtgttgttttccctgttgaaaaaagttacaaaaataaatcttaaagttagttttttgtaacacgaatttaactgtcagacagttagtgtaggtgtgttgcgtcatctgttttcaaccagattgcatttatggacttttcacacactcattttgaggaccccaggttcaaaagtaaaagcagtggccctgctttggggtccaagaataggagtgatgggtgaagggacctaagctggccaatagccctctgccccagacatgggatgtggatccttgaggtttctggtgaaatctgcacatctgtgtttttatatctgttccctaccctgtaatccctaccacgtgcacttgttctgtggttttggtctcttgtttaattgcacacaagtaatactactgggtaaccagaatcaggtgtgaatgtgttgagattttttactgttttgcatgataggaaaattgagaaagaatacgtataaaagatagagaggcataacatcaatgcagagttggaagttggctcccaagggctgacatggtgtgagtgtgtgggtgtgtgataagcttctcatccctgcatagatgcagtattcttagccttagtagaaaaacctggtttagtggtttaagccttgtgtggcagatagatcttaaagggcaaagcagtatattggtagttgtcaatatagcagtgctagctctgtctatataaatagagaaatggggttagccatagaggttaaaactacctggttatcccatataataacacaaactgggtcttggatacacagttgtatttaatgttttacgatctagcctttccagtacaggcactttctgagaaacctttgtcctcacttgaggcattttgttgtcgggtttttgtgtttgtttttgtgggtatttgcctcattccacccctgagctttcaggtagacagacgtgattcaaaactctgttctaaggtgtttattgtagtggagtaatgggtttgcagtgataagtcatacttttccaccgaaagggagggcttgggaatccctgagattagctaaagttaagttgttggaagaattccttgattggaaattgtacctttgtgttttgttgctctgtttcctgaaaataactcggggatgctcctggtttgtccatctactgctttgattccttggatcccacccattctttcactttaagaaaaaacaaataattgttgcagaggtctctgtattttgcagctgcccttttgtaagaagcacttttcccaaataaaacaattaaaaaaaaagttggctgttctgtgtaa

SEQ ID NO: 431997 - DNA, 2906 bp, Homo sapiens
agcggcagtcactgcgtcaacccccgctgggccgcggagccctcagcgctgtccgcggaggcctggcggtgcgcgattactgcggagccgcggggctgcaccgccgcttacacttccctgagcgctgcctgagctggctgcgagcgcatcggggagaggtattttatgcatggggtttgtaaggaaggagacaactgtcgctactcgcatgacctctctgacagtccgtatagtgtagtgtgcaagtattttcagcgagggtactgtatttatggagaccgctgcagatatgaacatagcaaaccattgaaacaggaagaagcaactgctacagagctaactacaaagtcatcccttgctgcttcctcaagtctctcatcgatagttggaccacttgttgaaatgaatacaggcgaagctgagtcaagaaattcaaactttgcaactgtaggagcaggttcagaggactgggtgaatgctattgagtttgttcctgggcaaccctactgtggccgtactgcgccttcctgcactgaagcacccctgcagggctcagtgaccaaggaagaatcagagaaagagcaaaccgccgtggagacaaagaagcagctgtgcccctatgctgcagtgggagagtgccgatacggggagaactgtgtgtatctccacggagattcttgtgacatgtgtgggctgcaggtcctgcatccaatggatgctgcccagagatcgcagcatatcaaatcgtgcattgaggcccatgagaaggacatggagctctcatttgccgtgcagcgcagcaaggacatggtgtgtgggatctgcatggaggtggtctatgagaaagccaaccccagtgagcgccgcttcgggatcctctccaactgcaaccacacctactgtctcaagtgcattcgcaagtggaggagtgctaagcaatttgagagcaagatcataaagtcctgcccagaatgccggatcacatctaactttgtcattccaagtgagtactgggtggaggagaaagaagagaagcagaaactcattctgaaatacaaggaggcaatgagcaacaaggcgtgcaggtattttgatgaaggacgtgggagctgcccatttggagggaactgtttttacaagcatgcgtaccctgatggccgtagagaggagccacagagacagaaagtgggaacatcaagcagataccgggcccaacgaaggaaccacttctgggaactcattgaggaaagagagaacagcaacccctttgacaacgatgaagaagaggttgtcacctttgagctgggcgagatgttgcttatgcttttggctgcaggtggggacgacgaactaacagactctgaagatgagtgggacttgtttcatgatgagctggaagatttttatgacttggatctatagcaaccttgcgtggcgtgtgaactggtctgctgacctcagacagcagctgtcccctgtggtggtgtggcagtgcctgtgttctctcctaggcaggcctctcaactccaggtgctgtcctaagaatttttacccagggcctgtcttctcaacccctcacctttccctgaggagtgtgttgttttccctgttgaaaaaagttacaaaaataaatcttaaagttagttttttgtaacacgaatttaactgtcagacagttagtgtaggtgtgttgcgtcatctgttttcaaccagattgcatttatggacttttcacacactcattttgaggaccccaggttcaaaagtaaaagcagtggccctgctttggggtccaagaataggagtgatgggtgaagggacctaagctggccaatagccctctgccccagacatgggatgtggatccttgaggtttctggtgaaatctgcacatctgtgtttttatatctgttccctaccctgtaatccctaccacgtgcacttgttctgtggttttggtctcttgtttaattgcacacaagtaatactactgggtaaccagaatcaggtgtgaatgtgttgagattttttactgttttgcatgataggaaaattgagaaagaatacgtataaaagatagagaggcataacatcaatgcagagttggaagttggctcccaagggctgacatggtgtgagtgtgtgggtgtgtgataagcttctcatccctgcatagatgcagtattcttagccttagtagaaaaacctggtttagtggtttaagccttgtgtggcagatagatcttaaagggcaaagcagtatattggtagttgtcaatatagcagtgctagctctgtctatataaatagagaaatggggttagccatagaggttaaaactacctggttatcccatataataacacaaactgggtcttggatacacagttgtatttaatgttttacgatctagcctttccagtacaggcactttctgagaaacctttgtcctcacttgaggcattttgttgtcgggtttttgtgtttgtttttgtgggtatttgcctcattccacccctgagctttcaggtagacagacgtgattcaaaactctgttctaaggtgtttattgtagtggagtaatgggtttgcagtgataagtcatacttttccaccgaaagggagggcttgggaatccctgagattagctaaagttaagttgttggaagaattccttgattggaaattgtacctttgtgttttgttgctctgtttcctgaaaataactcggggatgctcctggtttgtccatctactgctttgattccttggatcccacccattctttcactttaagaaaaaacaaataattgttgcagaggtctctgtattttgcagctgcccttttgtaagaagcacttttcccaaataaaacaattaaaaaaaaagttggctgttctgtgtaa

SEQ ID NO: 431998 - DNA, 3801 bp, Homo sapiens
gttgaagtggcgagagcgctcagatacgcgacgcgtagcaggcggggaccgaacgggtgcctcagtgtccttcccctcccctcgcctggcctcgccgtcctctccccgcagccggaccggaactatgtgatcccggaagttccggggcctttgctgtgtgggataaacagtaatggcggaggctgcaactcccggaacaacagccacaacatcaggagcaggagcggcagcggcgacggcggcagcagcctcccccaccccgatccccacagtcaccgccccgtccctgggggcgggcggagggggcggcggcagcgacggcagcggcggcggctggactaaacaggtcacctgcaggtattttatgcatggggtttgtaaggaaggagacaactgtcgctactcgcatgacctctctgacagtccgtatagtgtagtgtgcaagtattttcagcgagggtactgtatttatggagaccgctgcagatatgaacatagcaaaccattgaaacaggaagaagcaactgctacagagctaactacaaagtcatcccttgctgcttcctcaagtctctcatcgatagttggaccacttgttgaaatgaatacaggcgaagctgagtcaagaaattcaaactttgcaactgtaggagcaggttcagaggactgggtgaatgctattgagtttgttcctgggcaaccctactgtggccgtactgcgccttcctgcactgaagcacccctgcagggctcagtgaccaaggaagaatcagagaaagagcaaaccgccgtggagacaaagaagcagctgtgcccctatgctgcagtgggagagtgccgatacggggagaactgtgtgtatctccacggagattcttgtgacatgtgtgggctgcaggtcctgcatccaatggatgctgcccagagatcgcagcatatcaaatcgtgcattgaggcccatgagaaggacatggagctctcatttgccgtgcagcgcagcaaggacatggtgtgtgggatctgcatggaggtggtctatgagaaagccaaccccagtgagcgccgcttcgggatcctctccaactgcaaccacacctactgtctcaagtgcattcgcaagtggaggagtgctaagcaatttgagagcaagatcataaagtgagactcctccccagtcttcatttgtgctttctcttttggggaagaatttagtaacttgtgccaactttcaaccagatggaccgcatttaaatgcatgcattttatcttgaaactgggatattctaatggggatttcttctttgtatttcagctagcttctaggttagttggtctatctacttttatttgaatgaggaaaccctgtgtatcagttagaatcttcgtgctttttctgaggagattgtgtttaatggattattagccagtttaggctcagtgaacaaactgatctagctctgaatgtatgtttcctgacgttttacatttccactttcctattccattcattaagctagccaacaatccaccatcctttaaagattgttctcataactgaacaaaaaccacataatctaaacagagcaaagctacaagaaataaatttatttaaacgaaagaaaaaggagtctgtgtgaaatgtcttcttttgtttttgttttttacctaagttatatttttcaaaaaaaaaaaaaagaactggctagcccttgagttggatttataaaggaggttgccttgcttgaaagaaatggtcagttgtgtgacagtatgtggaaccctttcaggaaatgcccacgtgcctttcagttaagtctttaagtctggaggcgacacaccagggtgtgtccttgaagagtgggcctgtaaaaggggaatttgcattgcagcctgttcattgtttcccaggtcctgcccagaatgccggatcacatctaactttgtcattccaagtgagtactgggtggaggagaaagaagagaagcagaaactcattctgaaatacaaggaggcaatgagcaacaaggcgtgcaggtattttgatgaaggacgtgggagctgcccatttggagggaactgtttttacaagcatgcgtaccctgatggccgtagagaggagccacagagacagaaagtgggaacatcaagcagataccgggcccaacgaaggaaccacttctgggaactcattgaggaaagagagaacagcaacccctttgacaacgatgaagaagaggttgtcacctttgagctgggcgagatgttgcttatgcttttggctgcaggtggggacgacgaactaacagactctgaagatgagtgggacttgtttcatgatgagctggaagatttttatgacttggatctatagcaaccttgcgtggcgtgtgaactggtctgctgacctcagacagcagctgtcccctgtggtggtgtggcagtgcctgtgttctctcctaggcaggcctctcaactccaggtgctgtcctaagaatttttacccagggcctgtcttctcaacccctcacctttccctgaggagtgtgttgttttccctgttgaaaaaagttacaaaaataaatcttaaagttagttttttgtaacacgaatttaactgtcagacagttagtgtaggtgtgttgcgtcatctgttttcaaccagattgcatttatggacttttcacacactcattttgaggaccccaggttcaaaagtaaaagcagtggccctgctttggggtccaagaataggagtgatgggtgaagggacctaagctggccaatagccctctgccccagacatgggatgtggatccttgaggtttctggtgaaatctgcacatctgtgtttttatatctgttccctaccctgtaatccctaccacgtgcacttgttctgtggttttggtctcttgtttaattgcacacaagtaatactactgggtaaccagaatcaggtgtgaatgtgttgagattttttactgttttgcatgataggaaaattgagaaagaatacgtataaaagatagagaggcataacatcaatgcagagttggaagttggctcccaagggctgacatggtgtgagtgtgtgggtgtgtgataagcttctcatccctgcatagatgcagtattcttagccttagtagaaaaacctggtttagtggtttaagccttgtgtggcagatagatcttaaagggcaaagcagtatattggtagttgtcaatatagcagtgctagctctgtctatataaatagagaaatggggttagccatagaggttaaaactacctggttatcgatctagcctttccagtacaggcactttctgagaaacctttgtcctcacttgaggcattttgttgtcgggtttttgtgtttgtttttgtgggtatttgcctcattccacccctgagctttcaggtagacagacgtgattcaaaactctgttctaaggtgtttattgtagtggagtaatgggtttgcagtgataagtcatacttttccaccgaaagggagggcttgggaatccctgagattagctaaagttaagttgttggaagaattccttgattggaaattgtacctttgtgttttgttgctctgtttcctgaaaataactcggggatgctcctggtttgtccatctactgctttgattccttggatcccacccattctttcactttaagaaaaaacaaataattgttgcagaggtctctgtattttgcagctgcccttttgtaagaagcacttttcccaaataaaacaattaaaaaaaaagttggctgttctgtgtaa

SEQ ID NO: 431999 - DNA, 3818 bp, Homo sapiens
gttgaagtggcgagagcgctcagatacgcgacgcgtagcaggcggggaccgaacgggtgcctcagtgtccttcccctcccctcgcctggcctcgccgtcctctccccgcagccggaccggaactatgtgatcccggaagttccggggcctttgctgtgtgggataaacagtaatggcggaggctgcaactcccggaacaacagccacaacatcaggagcaggagcggcagcggcgacggcggcagcagcctcccccaccccgatccccacagtcaccgccccgtccctgggggcgggcggagggggcggcggcagcgacggcagcggcggcggctggactaaacaggtcacctgcaggtattttatgcatggggtttgtaaggaaggagacaactgtcgctactcgcatgacctctctgacagtccgtatagtgtagtgtgcaagtattttcagcgagggtactgtatttatggagaccgctgcagatatgaacatagcaaaccattgaaacaggaagaagcaactgctacagagctaactacaaagtcatcccttgctgcttcctcaagtctctcatcgatagttggaccacttgttgaaatgaatacaggcgaagctgagtcaagaaattcaaactttgcaactgtaggagcaggttcagaggactgggtgaatgctattgagtttgttcctgggcaaccctactgtggccgtactgcgccttcctgcactgaagcacccctgcagggctcagtgaccaaggaagaatcagagaaagagcaaaccgccgtggagagtgccgatacggggagaactgtgtgtatctccacggagattcttgtgacatgtgtgggctgcaggtcctgcatccaatggatgctgcccagagatcgcagcatatcaaatcgtgcattgaggcccatgagaaggacatggagctctcatttgccgtgcagcgcagcaaggacatggtgtgtgggatctgcatggaggtggtctatgagaaagccaaccccagtgagcgccgcttcgggatcctctccaactgcaaccacacctactgtctcaagtgcattcgcaagtggaggagtgctaagcaatttgagagcaagatcataaagtgagactcctccccagtcttcatttgtgctttctcttttggggaagaatttagtaacttgtgccaactttcaaccagatggaccgcatttaaatgcatgcattttatcttgaaactgggatattctaatggggatttcttctttgtatttcagctagcttctaggttagttggtctatctacttttatttgaatgaggaaaccctgtgtatcagttagaatcttcgtgctttttctgaggagattgtgtttaatggattattagccagtttaggctcagtgaacaaactgatctagctctgaatgtatgtttcctgacgttttacatttccactttcctattccattcattaagctagccaacaatccaccatcctttaaagattgttctcataactgaacaaaaaccacataatctaaacagagcaaagctacaagaaataaatttatttaaacgaaagaaaaaggagtctgtgtgaaatgtcttcttttgtttttgttttttacctaagttatatttttcaaaaaaaaaaaaaagaactggctagcccttgagttggatttataaaggaggttgccttgcttgaaagaaatggtcagttgtgtgacagtatgtggaaccctttcaggaaatgcccacgtgcctttcagttaagtctttaagtctggaggcgacacaccagggtgtgtccttgaagagtgggcctgtaaaaggggaatttgcattgcagcctgttcattgtttcccaggtcctgcccagaatgccggatcacatctaactttgtcattccaagtgagtactgggtggaggagaaagaagagaagcagaaactcattctgaaatacaaggaggcaatgagcaacaaggcgtgcaggtattttgatgaaggacgtgggagctgcccatttggagggaactgtttttacaagcatgcgtaccctgatggccgtagagaggagccacagagacagaaagtgggaacatcaagcagataccgggcccaacgaaggaaccacttctgggaactcattgaggaaagagagaacagcaacccctttgacaacgatgaagaagaggttgtcacctttgagctgggcgagatgttgcttatgcttttggctgcaggtggggacgacgaactaacagactctgaagatgagtgggacttgtttcatgatgagctggaagatttttatgacttggatctatagcaaccttgcgtggcgtgtgaactggtctgctgacctcagacagcagctgtcccctgtggtggtgtggcagtgcctgtgttctctcctaggcaggcctctcaactccaggtgctgtcctaagaatttttacccagggcctgtcttctcaacccctcacctttccctgaggagtgtgttgttttccctgttgaaaaaagttacaaaaataaatcttaaagttagttttttgtaacacgaatttaactgtcagacagttagtgtaggtgtgttgcgtcatctgttttcaaccagattgcatttatggacttttcacacactcattttgaggaccccaggttcaaaagtaaaagcagtggccctgctttggggtccaagaataggagtgatgggtgaagggacctaagctggccaatagccctctgccccagacatgggatgtggatccttgaggtttctggtgaaatctgcacatctgtgtttttatatctgttccctaccctgtaatccctaccacgtgcacttgttctgtggttttggtctcttgtttaattgcacacaagtaatactactgggtaaccagaatcaggtgtgaatgtgttgagattttttactgttttgcatgataggaaaattgagaaagaatacgtataaaagatagagaggcataacatcaatgcagagttggaagttggctcccaagggctgacatggtgtgagtgtgtgggtgtgtgataagcttctcatccctgcatagatgcagtattcttagccttagtagaaaaacctggtttagtggtttaagccttgtgtggcagatagatcttaaagggcaaagcagtatattggtagttgtcaatatagcagtgctagctctgtctatataaatagagaaatggggttagccatagaggttaaaactacctggttatcccatataataacacaaactgggtcttggatacacagttgtatttaatgttttacgatctagcctttccagtacaggcactttctgagaaacctttgtcctcacttgaggcattttgttgtcgggtttttgtgtttgtttttgtgggtatttgcctcattccacccctgagctttcaggtagacagacgtgattcaaaactctgttctaaggtgtttattgtagtggagtaatgggtttgcagtgataagtcatacttttccaccgaaagggagggcttgggaatccctgagattagctaaagttaagttgttggaagaattccttgattggaaattgtacctttgtgttttgttgctctgtttcctgaaaataactcggggatgctcctggtttgtccatctactgctttgattccttggatcccacccattctttcactttaagaaaaaacaaataattgttgcagaggtctctgtattttgcagctgcccttttgtaagaagcacttttcccaaataaaacaattaaaaaaaaagttggctgttctgtgtaa

SEQ ID NO: 432000 - DNA, 3871 bp, Homo sapiens
gttgaagtggcgagagcgctcagatacgcgacgcgtagcaggcggggaccgaacgggtgcctcagtgtccttcccctcccctcgcctggcctcgccgtcctctccccgcagccggaccggaactatgtgatcccggaagttccggggcctttgctgtgtgggataaacagtaatggcggaggctgcaactcccggaacaacagccacaacatcaggagcaggagcggcagcggcgacggcggcagcagcctcccccaccccgatccccacagtcaccgccccgtccctgggggcgggcggagggggcggcggcagcgacggcagcggcggcggctggactaaacaggtcacctgcaggtattttatgcatggggtttgtaaggaaggagacaactgtcgctactcgcatgacctctctgacagtccgtatagtgtagtgtgcaagtattttcagcgagggtactgtatttatggagaccgctgcagatatgaacatagcaaaccattgaaacaggaagaagcaactgctacagagctaactacaaagtcatcccttgctgcttcctcaagtctctcatcgatagttggaccacttgttgaaatgaatacaggcgaagctgagtcaagaaattcaaactttgcaactgtaggagcaggttcagaggactgggtgaatgctattgagtttgttcctgggcaaccctactgtggccgtactgcgccttcctgcactgaagcacccctgcagggctcagtgaccaaggaagaatcagagaaagagcaaaccgccgtggagacaaagaagcagctgtgcccctatgctgcagtgggagagtgccgatacggggagaactgtgtgtatctccacggagattcttgtgacatgtgtgggctgcaggtcctgcatccaatggatgctgcccagagatcgcagcatatcaaatcgtgcattgaggcccatgagaaggacatggagctctcatttgccgtgcagcgcagcaaggacatggtgtgtgggatctgcatggaggtggtctatgagaaagccaaccccagtgagcgccgcttcgggatcctctccaactgcaaccacacctactgtctcaagtgcattcgcaagtggaggagtgctaagcaatttgagagcaagatcataaagtgagactcctccccagtcttcatttgtgctttctcttttggggaagaatttagtaacttgtgccaactttcaaccagatggaccgcatttaaatgcatgcattttatcttgaaactgggatattctaatggggatttcttctttgtatttcagctagcttctaggttagttggtctatctacttttatttgaatgaggaaaccctgtgtatcagttagaatcttcgtgctttttctgaggagattgtgtttaatggattattagccagtttaggctcagtgaacaaactgatctagctctgaatgtatgtttcctgacgttttacatttccactttcctattccattcattaagctagccaacaatccaccatcctttaaagattgttctcataactgaacaaaaaccacataatctaaacagagcaaagctacaagaaataaatttatttaaacgaaagaaaaaggagtctgtgtgaaatgtcttcttttgtttttgttttttacctaagttatatttttcaaaaaaaaaaaaaagaactggctagcccttgagttggatttataaaggaggttgccttgcttgaaagaaatggtcagttgtgtgacagtatgtggaaccctttcaggaaatgcccacgtgcctttcagttaagtctttaagtctggaggcgacacaccagggtgtgtccttgaagagtgggcctgtaaaaggggaatttgcattgcagcctgttcattgtttcccaggtcctgcccagaatgccggatcacatctaactttgtcattccaagtgagtactgggtggaggagaaagaagagaagcagaaactcattctgaaatacaaggaggcaatgagcaacaaggcgtgcaggtattttgatgaaggacgtgggagctgcccatttggagggaactgtttttacaagcatgcgtaccctgatggccgtagagaggagccacagagacagaaagtgggaacatcaagcagataccgggcccaacgaaggaaccacttctgggaactcattgaggaaagagagaacagcaacccctttgacaacgatgaagaagaggttgtcacctttgagctgggcgagatgttgcttatgcttttggctgcaggtggggacgacgaactaacagactctgaagatgagtgggacttgtttcatgatgagctggaagatttttatgacttggatctatagcaaccttgcgtggcgtgtgaactggtctgctgacctcagacagcagctgtcccctgtggtggtgtggcagtgcctgtgttctctcctaggcaggcctctcaactccaggtgctgtcctaagaatttttacccagggcctgtcttctcaacccctcacctttccctgaggagtgtgttgttttccctgttgaaaaaagttacaaaaataaatcttaaagttagttttttgtaacacgaatttaactgtcagacagttagtgtaggtgtgttgcgtcatctgttttcaaccagattgcatttatggacttttcacacactcattttgaggaccccaggttcaaaagtaaaagcagtggccctgctttggggtccaagaataggagtgatgggtgaagggacctaagctggccaatagccctctgccccagacatgggatgtggatccttgaggtttctggtgaaatctgcacatctgtgtttttatatctgttccctaccctgtaatccctaccacgtgcacttgttctgtggttttggtctcttgtttaattgcacacaagtaatactactgggtaaccagaatcaggtgtgaatgtgttgagattttttactgttttgcatgataggaaaattgagaaagaatacgtataaaagatagagaggcataacatcaatgcagagttggaagttggctcccaagggctgacatggtgtgagtgtgtgggtgtgtgataagcttctcatccctgcatagatgcagtattcttagccttagtagaaaaacctggtttagtggtttaagccttgtgtggcagatagatcttaaagggcaaagcagtatattggtagttgtcaatatagcagtgctagctctgtctatataaatagagaaatggggttagccatagaggttaaaactacctggttatcccatataataacacaaactgggtcttggatacacagttgtatttaatgttttacgatctagcctttccagtacaggcactttctgagaaacctttgtcctcacttgaggcattttgttgtcgggtttttgtgtttgtttttgtgggtatttgcctcattccacccctgagctttcaggtagacagacgtgattcaaaactctgttctaaggtgtttattgtagtggagtaatgggtttgcagtgataagtcatacttttccaccgaaagggagggcttgggaatccctgagattagctaaagttaagttgttggaagaattccttgattggaaattgtacctttgtgttttgttgctctgtttcctgaaaataactcggggatgctcctggtttgtccatctactgctttgattccttggatcccacccattctttcactttaagaaaaaacaaataattgttgcagaggtctctgtattttgcagctgcccttttgtaagaactcttgcaaactagatatagaaggtaactttcttaacctggtaaagagcatgtattaagaaaaaaaa

SEQ ID NO: 432001 - DNA, 3801 bp, Homo sapiens
gttgaagtggcgagagcgctcagatacgcgacgcgtagcaggcggggaccgaacgggtgcctcagtgtccttcccctcccctcgcctggcctcgccgtcctctccccgcagccggaccggaactatgtgatcccggaagttccggggcctttgctgtgtgggataaacagtaatggcggaggctgcaactcccggaacaacagccacaacatcaggagcaggagcggcagcggcgacggcggcagcagcctcccccaccccgatccccacagtcaccgccccgtccctgggggcgggcggagggggcggcggcagcgacggcagcggcggcggctggactaaacaggtcacctgcaggtattttatgcatggggtttgtaaggaaggagacaactgtcgctactcgcatgacctctctgacagtccgtatagtgtagtgtgcaagtattttcagcgagggtactgtatttatggagaccgctgcagatatgaacatagcaaaccattgaaacaggaagaagcaactgctacagagctaactacaaagtcatcccttgctgcttcctcaagtctctcatcgatagttggaccacttgttgaaatgaatacaggcgaagctgagtcaagaaattcaaactttgcaactgtaggagcaggttcagaggactgggtgaatgctattgagtttgttcctgggcaaccctactgtggccgtactgcgccttcctgcactgaagcacccctgcagggctcagtgaccaaggaagaatcagagaaagagcaaaccgccgtggagacaaagaagcagctgtgcccctatgctgcagtgggagagtgccgatacggggagaactgtgtgtatctccacggagattcttgtgacatgtgtgggctgcaggtcctgcatccaatggatgctgcccagagatcgcagcatatcaaatcgtgcattgaggcccatgagaaggacatggagctctcatttgccgtgcagcgcagcaaggacatggtgtgtgggatctgcatggaggtggtctatgagaaagccaaccccagtgagcgccgcttcgggatcctctccaactgcaaccacacctactgtctcaagtgcattcgcaagtggaggagtgctaagcaatttgagagcaagatcataaagtgagactcctccccagtcttcatttgtgctttctcttttggggaagaatttagtaacttgtgccaactttcaaccagatggaccgcatttaaatgcatgcattttatcttgaaactgggatattctaatggggatttcttctttgtatttcagctagcttctaggttagttggtctatctacttttatttgaatgaggaaaccctgtgtatcagttagaatcttcgtgctttttctgaggagattgtgtttaatggattattagccagtttaggctcagtgaacaaactgatctagctctgaatgtatgtttcctgacgttttacatttccactttcctattccattcattaagctagccaacaatccaccatcctttaaagattgttctcataactgaacaaaaaccacataatctaaacagagcaaagctacaagaaataaatttatttaaacgaaagaaaaaggagtctgtgtgaaatgtcttcttttgtttttgttttttacctaagttatatttttcaaaaaaaaaaaaaagaactggctagcccttgagttggatttataaaggaggttgccttgcttgaaagaaatggtcagttgtgtgacagtatgtggaaccctttcaggaaatgcccacgtgcctttcagttaagtctttaagtctggaggcgacacaccagggtgtgtccttgaagagtgggcctgtaaaaggggaatttgcattgcagcctgttcattgtttcccaggtcctgcccagaatgccggatcacatctaactttgtcattccaagtgagtactgggtggaggagaaagaagagaagcagaaactcattctgaaatacaaggaggcaatgagcaacaaggcgtgcaggtattttgatgaaggacgtgggagctgcccatttggagggaactgtttttacaagcatgcgtaccctgatggccgtagagaggagccacagagacagaaagtgggaacatcaagcagataccgggcccaacgaaggaaccacttctgggaactcattgaggaaagagagaacagcaacccctttgacaacgatgaagaagaggttgtcacctttgagctgggcgagatgttgcttatgcttttggctgcaggtggggacgacgaactaacagactctgaagatgagtgggacttgtttcatgatgagctggaagatttttatgacttggatctatagcaaccttgcgtggcgtgtgaactggtctgctgacctcagacagcagctgtcccctgtggtggtgtggcagtgcctgtgttctctcctaggcaggcctctcaactccaggtgctgtcctaagaatttttacccagggcctgtcttctcaacccctcacctttccctgaggagtgtgttgttttccctgttgaaaaaagttacaaaaataaatcttaaagttagttttttgtaacacgaatttaactgtcagacagttagtgtaggtgtgttgcgtcatctgttttcaaccagattgcatttatggacttttcacacactcattttgaggaccccaggttcaaaagtaaaagcagtggccctgctttggggtccaagaataggagtgatgggtgaagggacctaagctggccaatagccctctgccccagacatgggatgtggatccttgaggtttctggtgaaatctgcacatctgtgtttttatatctgttccctaccctgtaatccctaccacgtgcacttgttctgtggttttggtctcttgtttaattgcacacaagtaatactactgggtaaccagaatcaggtgtgaatgtgttgagattttttactgttttgcatgataggaaaattgagaaagaatacgtataaaagatagagaggcataacatcaatgcagagttggaagttggctcccaagggctgacatggtgtgagtgtgtgggtgtgtgataagcttctcatccctgcatagatgcagtattcttagccttagtagaaaaacctggtttagtggtttaagccttgtgtggcagatagatcttaaagggcaaagcagtatattggtagttgtcaatatagcagtgctagctctgtctatataaatagagaaatggggttagccatagaggttaaaactacctggttatcccatataataacacaaactgggtcttggatacacagttgtatttaatgttttacgatctagcctttccagtacaggcactttctgagaaacctttgtcctcacttgaggcattttgttgtcgggtttttgtgtttgtttttgtgggtatttgcctcattccacccctgagctttcaggtagacagacgtgattcatcatacttttccaccgaaagggagggcttgggaatccctgagattagctaaagttaagttgttggaagaattccttgattggaaattgtacctttgtgttttgttgctctgtttcctgaaaataactcggggatgctcctggtttgtccatctactgctttgattccttggatcccacccattctttcactttaagaaaaaacaaataattgttgcagaggtctctgtattttgcagctgcccttttgtaagaagcacttttcccaaataaaacaattaaaaaaaaagttggctgttctgtgtaa

SEQ ID NO: 432002 - DNA, 2522 bp, Homo sapiens
gttgaagtggcgagagcgctcagatacgcgacgcgtagcaggcggggaccgaacgggtgcctcagtgtccttcccctcccctcgcctggcctcgccgtcctctccccgcagccggaccggaactatgtgatcccggaagttccggggcctttgctgtgtgggataaacagtaatggcggaggctgcaactcccggaacaacagccacaacatcaggagcaggagcggcagcggcgacggcggcagcagcctcccccaccccgatccccacagtcaccgccccgtccctgggggcgggcggagggggcggcggcagcgacggcagcggcggcggctggactaaacaggtcacctgcaggtattttatgcatggggtttgtaaggaaggagacaactgtcgctactcgcatgacctctctgacagtccgtatagtgtagtgtgcaagtattttcagcgagggtactgtatttatggagaccgctgcagatatgaacatagcaaaccattgaaacaggaagaagcaactgctacagagctaactacaaagtcatcccttgctgcttcctcaagtctctcatcgatagttggaccacttgttgaaatgaatacaggcgaagctgagtcaagaaattcaaactttgcaactgtaggagcaggttcagaggactgggtgaatgctattgagtttgttcctgggcaaccctactgtggccgtactgcgccttcctgcactgaagcacccctgcagggctcagtgaccaaggaagaatcagagaaagagcaaaccgccgtggagacaaagaagcagctgtgcccctatgctgcagtgggagagtgccgatacggggagaactgtgtgtatctccacggagattcttgtgacatgtgtgggctgcaggtcctgcatccaatggatgctgcccagagatcgcagcatatcaaatcgtgcattgaggcccatgagaaggacatggagctctcatttgccgtgcagcgcagcaaggacatggtgtgtgggatctgcatggaggtggtctatgagaaagccaaccccagtgagcgccgcttcgggatcctctccaactgcaaccacacctactgtctcaagtgcattcgcaagtggaggagtgctaagcaatttgagagcaagatcataaagtgagactcctccccagtcttcatttgtgctttctcttttggggaagaatttagtaacttgtgccaactttcaaccagatggaccgcatttaaatgcatgcattttatcttgaaactgggatattctaatggggatttcttctttgtatttcagctagcttctaggttagttggtctatctacttttatttgaatgaggaaaccctgtgtatcagttagaatcttcgtgctttttctgaggagattgtgtttaatggattattagccagtttaggctcagtgaacaaactgatctagctctgaatgtatgtttcctgacgttttacatttccactttcctattccattcattaagctagccaacaatccaccatcctttaaagattgttctcataactgaacaaaaaccacataatctaaacagagcaaagctacaagaaataaatttatttaaacgaaagaaaaaggagtctgtgtgaaatgtcttcttttgtttttgttttttacctaagttatatttttcaaaaaaaaaaaaaagaactggctagcccttgagttggatttataaaggaggttgccttgcttgaaagaaatggtcagttgtgtgacagtatgtggaaccctttcaggaaatgcccacgtgcctttcagttaagtctttaagtctggaggcgacacaccagggtgtgtccttgaagagtgggcctgtaaaaggggaatttgcattgcagcctgttcattgtttcccaggtcctgcccagaatgccggatcacatctaactttgtcattccaagtgagtactgggtggaggagaaagaagagaagcagaaactcattctgaaatacaaggaggcaatgaggtatgagcactgcagccttttctcaagcgaagagcccaacagagcttgggttcactttgaaaagaatggtgctgcattatacactcctacctccttcctacccttctttgacttcccaggacagtttattttgtcaccctgataacatccagtatatatcttgctataacacagtccttggggtccatgccaagggactgtgttataaagaggtctctactgttgacaagtaaggccccatgagtggggttctaccttattctgaatccgtgtcatagctgtcctatgttctcatgtgttggctttctagaagattttctctctatggcatctgcttgtactagagctattaaccagcatagacttgaacagagttaccggtttctagttagtgtttcttgcattggcacacacatgtttataagaacacatcttggggagggctgtaagctgacatactggttctatccctacctgtttaaagaaaccccggatgatagtca

SEQ ID NO: 432003 - DNA, 1652 bp, Homo sapiens
gttgaagtggcgagagcgctcagatacgcgacgcgtagcaggcggggaccgaacgggtgcctcagtgtccttcccctcccctcgcctggcctcgccgtcctctccccgcagccggaccggaactatgtgatcccggaagttccggggcctttgctgtgtgggataaacagtaatggcggaggctgcaactcccggaacaacagccacaacatcaggagcaggagcggcagcggcgacggcggcagcagcctcccccaccccgatccccacagtcaccgccccgtccctgggggcgggcggagggggcggcggcagcgacggcagcggcggcggctggactaaacaggtcacctgcaggtattttatgcatggggtttgtaaggaaggagacaactgtcgctactcgcatgacctctctgacagtccgtatagtgtagtgtgcaagtattttcagcgagggtactgtatttatggagaccgctgcagatatgaacatagcaaaccattgaaacaggaagaagcaactgctacagagctaactacaaagtcatcccttgctgcttcctcaagtctctcatcgatagttggaccacttgttgaaatgaatacaggcgaagctgagtcaagaaattcaaactttgcaactgtaggagcaggttcagaggactgggtgaatgctattgagtttgttcctgggcaaccctactgtggccgtactgcgccttcctgcactgaagcacccctgcagggctcagtgaccaaggaagaatcagagaaagagcaaaccgccgtggagacaaagaagcagctgtgcccctatgctgcagtgggagagtgccgatacggggagaactgtgtgtatctccacggagattcttgtgacatgtgtgggctgcaggtcctgcatccaatggatgctgcccagagatcgcagcatatcaaatcgtgcattgaggcccatgagaaggacatggagctctcatttgccgtgcagcgcagcaaggacatggtgtgtgggatctgcatggaggtggtctatgagaaagccaaccccagtgagcgccgcttcgggatcctctccaactgcaaccacacctactgtctcaagtgcattcgcaagtggaggagtgctaagcaatttgagagcaagatcataaagtgagactcctccccagtcttcatttgtgctttctcttttggggaagaatttagtaacttgtgccaactttcaaccagatggaccgcatttaaatgcatgcattttatcttgaaactgggatattctaatggggatttcttctttgtatttcagctagcttctaggttagttggtctatctacttttatttgaatgaggaaaccctgtgtatcagttagaatcttcgtgctttttctgaggagattgtgtttaatggattattagccagtttaggctcagtgaacaaactgatctagctctgaatgtatgtttcctgacgttttacatttccactttcctattccattcattaagctagccaacaatccaccatcctttaaagattgttctcataactgaacaaaaaccaaatttaaggagaaagtcagaataatttttagaggaaagggtggggaaggcccctgggttgggtcccaagtctttttcccaaaaa

SEQ ID NO: 432004 - DNA, 1772 bp, Homo sapiens
gttgaagtggcgagagcgctcagatacgcgacgcgtagcaggcggggaccgaacgggtgcctcagtgtccttcccctcccctcgcctggcctcgccgtcctctccccgcagccggaccggaactatgtgatcccggaagttccggggcctttgctgtgtgggataaacagtaatggcggaggctgcaactcccggaacaacagccacaacatcaggagcaggagcggcagcggcgacggcggcagcagcctcccccaccccgatccccacagtcaccgccccgtccctgggggcgggcggagggggcggcggcagcgacggcagcggcggcggctggactaaacaggtcacctgcaggtattttatgcatggggtttgtaaggaaggagacaactgtcgctactcgcatgacctctctgacagtccgtatagtgtagtgtgcaagtattttcagcgagggtactgtatttatggagaccgctgcagatatgaacatagcaaaccattgaaacaggaagaagcaactgctacagagctaactacaaagtcatcccttgctgcttcctcaagtctctcatcgatagttggaccacttgttgaaatgaatacaggcgaagctgagtcaagaaattcaaactttgcaactgtaggagcaggttcagaggactgggtgaatgctattgagtttgttcctgggcaaccctactgtggccgtactgcgccttcctgcactgaagcacccctgcagggctcagtgaccaaggaagaatcagagaaagagcaaaccgccgtggagacaaagaagcagctgtgcccctatgctgcagtgggagagtgccgatacggggagaactgtgtgtatctccacggagattcttgtgacatgtgtgggctgcaggtcctgcatccaatggatgctgcccagagatcgcagcatatcaaatcgtgcattgaggcccatgagaaggacatggagctctcatttgccgtgcagcgcagcaaggacatggtgtgtgggatctgcatggaggtggtctatgagaaagccaaccccagtgagcgccgcttcgggatcctctccaactgcaaccacacctactgtctcaagtgcattcgcaagtggaggagtgctaagcaatttgagagcaagatcataaagtcctgcccagaatgccggatcacatctaactttgtcattccaagtgagtactgggtggaggagaaagaagagaagcagaaactcattctgaaatacaaggaggcaatgaggtatgagcactgcagccttttctcaagcgaagagcccaacagagcttgggttcactttgaaaagaatggtgctgcattatacactcctacctccttcctacccttctttgacttcccaggacagtttattttgtcaccctgataacatccagtatatatcttgctataacacagtccttggggtccatgccaagggactgtgttataaagaggtctctactgttgacaagtaaggccccatgagtggggttctaccttattctgaatccgtgtcatagctgtcctatgttctcatgtgttggctttctagaagattttctctctatggcatctgcttgtactagagctattaaccagcatagacttgaacagagttaccggtttctagttagtgtttcttgcattggcacacacatgtttataagaacacatcttggggagggctgtaagctgacatactggttctatccctacctgtttaaagaaaccccggatgatagtca

SEQ ID NO: 432005 - DNA, 1438 bp, Homo sapiens
gttgaagtggcgagagcgctcagatacgcgacgcgtagcaggcggggaccgaacgggtgcctcagtgtccttcccctcccctcgcctggcctcgccgtcctctccccgcagccggaccggaactatgtgatcccggaagttccggggcctttgctgtgtgggataaacagtaatggcggaggctgcaactcccggaacaacagccacaacatcaggagcaggagcggcagcggcgacggcggcagcagcctcccccaccccgatccccacagtcaccgccccgtccctgggggcgggcggagggggcggcggcagcgacggcagcggcggcggctggactaaacaggtcacctgcaggtattttatgcatggggtttgtaaggaaggagacaactgtcgctactcgcatgacctctctgacagtccgtatagtgtagtgtgcaagtattttcagcgagggtactgtatttatggagaccgctgcagatatgaacatagcaaaccattgaaacaggaagaagcaactgctacagagctaactacaaagtcatcccttgctgcttcctcaagtctctcatcgatagttggaccacttgttgaaatgaatacaggcgaagctgagtcaagaaattcaaactttgcaactgtaggagcaggttcagaggactgggtgaatgctattgagtttgttcctgggcaaccctactgtggccgtactgcgccttcctgcactgaagcacccctgcagggctcagtgaccaaggaagaatcagagaaagagcaaaccgccgtggagacaaagaagcagctgtgcccctatgctgcagtgggagagtgccgatacggggagaactgtgtgtatctccacggagattcttgtgacatgtgtgggctgcaggtcctgcatccaatggatgctgcccagagatcgcagcatatcaaatcgtgcattgaggcccatgagaaggacatggagctctcatttgccgtgcagcgcagcaaggacatggtgtgtgggatctgcatggaggtggtctatgagaaagccaaccccagtgagcgccgcttcgggatcctctccaactgcaaccacacctactgtctcaagtgcattcgcaagtggaggagtgctaagcaatttgagagcaagatcataaagtcctgcccagaatgccggatcacatctaactttgtcattccaagtgagtactgggtggaggagaaagaagagaagcagaaactcattctggattcgcgggcctggcacagctcgcggctctgctgcccgctgcggcgccccttgcgcacgttctcccctcttccgcagcccacgcgccccacccccccgcccccctccgcccccgcccctggccctgccagaccccctcccatccgcccccgctctccgcccgcgctcccccccccccccctccccccc

SEQ ID NO: 432006 - DNA, 1338 bp, Homo sapiens
gttgaagtggcgagagcgctcagatacgcgacgcgtagcaggcggggaccgaacgggtgcctcagtgtccttcccctcccctcgcctggcctcgccgtcctctccccgcagccggaccggaactatgtgatcccggaagttccggggcctttgctgtgtgggataaacagtaatggcggaggctgcaactcccggaacaacagccacaacatcaggagcaggagcggcagcggcgacggcggcagcagcctcccccaccccgatccccacagtcaccgccccgtccctgggggcgggcggagggggcggcggcagcgacggcagcggcggcggctggactaaacaggtcacctgcaggtattttatgcatggggtttgtaaggaaggagacaactgtcgctactcgcatgacctctctgacagtccgtatagtgtagtgtgcaagtattttcagcgagggtactgtatttatggagaccgctgcagatatgaacatagcaaaccattgaaacaggaagaagcaactgctacagagctaactacaaagtcatcccttgctgcttcctcaagtctctcatcgatagttggaccacttgttgaaatgaatacaggcgaagctgagtcaagaaattcaaactttgcaactgtaggagcaggttcagaggactgggtgaatgctattgagtttgttcctgggcaaccctactgtggccgtactgcgccttcctgcactgaagcacccctgcagggctcagtgaccaaggaagaatcagagaaagagcaaaccgccgtggagacaaagaagcagctgtgcccctatgctgcagtgggagagtgccgatacggggagaactgtgtgtatctccacggagattcttgtgacatgtgtgggctgcaggtcctgcatccaatggatgctgcccagagatcgcagcatatcaaatcgtgcattgaggcccatgagaaggacatggagctctcatttgccgtgcagcgcagcaaggacatggtgtgtgggatctgcatggaggtggtctatgagaaagccaaccccagtgagcgccgcttcgggatcctctccaactgcaaccacacctactgtctcaagtgcattcgcaagtggaggagtgctaagcaatttgagagcaagatcataaagtcctgcccagaatgccggatcacatctaatgctttgattccttggatcccacccattctttcactttaagaaaaaacaaataattgttgcagaggtctctgtattttgcagctgcccttttgtaagaagcacttttcccaaataaaacaattaaaaaaaaagttggctgttctgtgtaa

SEQ ID NO: 432007 - DNA, 1225 bp, Homo sapiens
gttgaagtggcgagagcgctcagatacgcgacgcgtagcaggcggggaccgaacgggtgcctcagtgtccttcccctcccctcgcctggcctcgccgtcctctccccgcagccggaccggaactatgtgatcccggaagttccggggcctttgctgtgtgggataaacagtaatggcggaggctgcaactcccggaacaacagccacaacatcaggagcaggagcggcagcggcgacggcggcagcagcctcccccaccccgatccccacagtcaccgccccgtccctgggggcgggcggagggggcggcggcagcgacggcagcggcggcggctggactaaacaggtcacctgcaggtattttatgcatggggtttgtaaggaaggagacaactgtcgctactcgcatgacctctctgacagtccgtatagtgtagtgtgcaagtattttcagcgagggtactgtatttatggagaccgctgcagatatgaacatagcaaaccattgaaacaggaagaagcaactgctacagagctaactacaaagtcatcccttgctgcttcctcaagtctctcatcgatagttggaccacttgttgaaatgaatacaggcgaagctgagtcaagaaattcaaactttgcaactgtaggagcaggttcagaggactgggtgaatgctattgagtttgttcctgggcaaccctactgtggccgtactgcgccttcctgcactgaagcacccctgcagggctcagtgaccaaggaagaatcagagaaagagcaaaccgccgtggagacaaagaagcagctgtgcccctatgctgcagtgggagagtgccgatacggggagaactgtgtgtatctccacggagattcttgtgacatgtgtgggctgcaggtcctgcatccaatggatgctgcccagagatcgcagcatatcaaatcgtgcattgaggcccatgagaaggacatggagctctcatttgccgtgcagcgcagcaaggacatggtgtgtgggatctgcatggaggtggtctatgagaaagccaaccccagtgagcgccgcttcgggatcctctccaactgcaaccacacctactgtctcaagtgcattcgcaagtggaggagtgctaagcagaggtctctgtattttgcagctgcccttttgtaagaagcacttttcccaaataaaacaattaaaaaaaaagttggctgttctgtgtaa

SEQ ID NO: 432008 - DNA, 489 bp, Homo sapiens
ctcgtgcgaattcggagaggagaaacctttgtcctcacttgaggcattttgttgtcgggtttttgtgtttgtttttgtgggtatttgcctcattccacccctgagctttcaggtagacagacgtgattcaaaactctgttctaaggtgtttattgtagtggagtaatgggtttgcagtgataagtcatacttttccaccgaaagggagggcttgggaatccctgagattagctaaagttaagttgttggaagaattccttgattggaaattgtacctttgtgttttgttgctctgtttcctgaaaataactcggggatgctcctggtttgtccatctactgctttgattccttggatcccacccattctttcactttaagaaaaaacaaataattgttgcagaggtctctgtattttgcagctgcccttttgtaagaagcacttttcccaaataaaacaattaaaaaaaaagttggctgttctgtgtaa

SEQ ID NO: 432009 - DNA, 301 bp, Homo sapiens
gtaaggaaggagacaactgtcgctactcgcatgacctctctgacagtccgtatagtgtagtgtgcaagtattttcagcgagggtactgtatttatggagaccgctgcaggtaagaatttgtttataaatttgttcaggggtgggttggaggaaaaaggtaaaagacatacttctgatagctttatatgtcactgattaaaaataatgctttgaaaatgactcttggctgggcagtggctcatgcctataatcccagcactttgggatgcttaggtaggaggattgcttgatcttggaagtt

SEQ ID NO: 432010 - DNA, 782 bp, Homo sapiens
atggaaaaaaaacttagagtaaaacaggaaagaaagtggcgagctttttccaggaggaagaaacctgttgggaaaatactagatacttcatgctggagaaggaattcaatgaaataaacatgataaaccctttactcatagagcgacactccaggacatgtgaggattaatgctgtataaaacactcactaagagaaaagcaacttgttacaatgaaaaaaaagaaaattattaaaaaaaataataaaacactgtcaatgtcctgaattagggaaagtatttggtgattgcacgtaccctcatgaaccttaaagttctcatgttggggaatctcctcaagtcagtgtaagtctgtttcagcatgctagagtatcaagatgaatgcatgaaatttcattatgtatttgtattttctttataggataaagaggcacagaaagagatgcaaaaaataatgacttccttgaagaggtaaataaacgaatttactcttcaacaaatcagatgtggtctaccaaaatttaaatgaatcaaagttgtgcttttattatccttcatttttgatgtaagggtattgtgcttagatttgaaggtaaagccatgtttctgcagaatgcattccactagtagcactacaaaattaattatgttatttggagaatctatatactataatgtcaatacataatctataaacatgtatgctttatatttttcttatcaataaactgcagccttaagaatatttctttaaataaaatatttaaatccaataaaaagaa

SEQ ID NO: 432011 - DNA, 1160 bp, Homo sapiens
caccaatccctgctgccgttgtcaaggaaatcttttctccatgtggagcctcagtttgaatcctggttttggcatgttctgttttaagcccctcataatgcaagttattaatatgttttaagtctaaactccttagaacaactagttatgccctaggttctaggaattacaaactactttttaaaaataacccagcagcctaaatgaaggtttaggtttgacagctcttactgctaagtccaagaacagctctctgagtcacttgagcatgtgcagaaacagtcacgccctgatggttaaacttagtcccagtcctcctgattagcctaacatagaaccagtttaatcttaaggaaataaaagtgctaaaggaagagttattttaaaagctaactcctaaagttgcagacatttctctggaagattcttggggtatcagaccaaatcagtattctcaatcctgtcttaaaatgtataatcgctgtactatacaactctaagcagtaatatatgtgtgtgtgagctcacatgtaaatgtataatatagccacccatataatcaacttcctgtgggggtaataatccctttacctttctctggaaccagtttcaaaattttatagttactaaatgtgttttccttcccaacctacctacttcaagtttacaaaaatacagacaaggctgcatgcagtggctcacctctgtaatcccaacactttggaaggccgaggtaggaggattgcttgaggccaggagtttgagaccagcctgggcaacatagcaacatgccatctcctacaaaaaaataaaaaaatttgctgggcatggtggcataacaacagtccccagctactcaggagactgaggcaggagaatcacttgagcccagtagttcaaggccgcagtgagccatgatcacaccactgcactccagcctgaccaaaagagcatgaccttatctcaaaaataataataataaacgtcttgtacatgctaatatttgtgctgtatttcagggagcagttttgtagaactgagagggaatttgtagatcatgtagtctaggtttcttctcactttctatctctcacccccaatggccagtggctgcctcaagtgaaaaaataagtgtcctgaaatcaagcacaagcccagca

SEQ ID NO: 432012 - DNA, 569 bp, Homo sapiens
gcggccgcgggctcctcccccggcgcctccgctatctgggtcaggacgcgacggccgcggcgcgggaccttaggacccgcgggctccagggctactgtccgtccgccactgcgcgccagcaggtcctggtctccgctctccaacagctgaaaggccggcgcagtgaacacaggtgcgtgcgcagtctgggagggggctgctcagccgctgggggccggaccgcgccggggacttgcggagggaagcggaaatacttgcggtgggggcgactgcacttccgggtcggtgtgtccctggcgaagcttgagcctgctagccagcggtgctctgcgttcccggggctggagcagcggcccatagtggcttcccgggttcatccctcgctgaccctgcgccacggaagccctagccccggaggtcgctggtatttcctcgcacgcggacccttctggggtgcgtggggaacaggcagtttgctgcctcggcccggctggtccctgcaaaccccaaagaatttcaacagagacacttgctgggctctcgctcggctttcagccttgcgcaaacat

SEQ ID NO: 432013 - DNA, 514 bp, Homo sapiens
tttacatttcataaagtagttgagattatgatctacctaactgtcacaaatcccctcccgcaaatgaactcttccatttgtctccctgaactggccagagaaatctgtggatgagaggaaagtttatctgggttttcctacattcactcaactaagtattagtgactattatcaacacctggcttctttacaaagagaagaaattactggaggtgcagaagcaaaagatgcacatcctcatttgacctcccttctcagtttcaaggctgagcatgcttcctgagcagacgccttcctcgggatgcctggagcccatgaggaatgcagtgacctaacgctcccagaacacaataatgagaccccaacttaagtttcttgcccaaagaaggagcccataaattgagtcaggtctcaagagaatcatacaacaaagcagattgtgcacaacaatgccgctgcctatcactcagcctcagtcttctaaaaaagaaaaaaagtgagtgctctctctctc

SEQ ID NO: 432014 - DNA, 1226 bp, Homo sapiens
aactccacatgcagcttgagcattcagtcttctgacctgttccacctctacagggcattttatggcttaaggatgacggcctagaagggaagggagagacttactttggattaaatttacaatgggaaagtgcttaaggtatattacagctaatactgacacagaagaacagagttttccagtccctaaggcatttaacacacgtgtagaggaattaaatttagatgtccttcttcagaaggtagatcatttacgtatgagtgagtctggcaagtcggagagttttgaactacttcgtgaccacaaagaaaagtttagagatgaaatagagtttatgtggcgatttgctcgtgcttatggagacatgtatgaactatctacaaacacacaagaaaagaaacattatgctaatattggaaaaactttaagtgaaagagctattaatagagcacccatgaatggacattgtcatctgtggtatgcagttttgtgtggctatgtatctgagtttgagggtttacaaaacaaaatcaactatgggcacctcttcaaggaacatctagatatagcaatcaaacttttaccagaggaaccctttctatattacctcaaagggagatactgctatactgtctcaaaactgagctggattgagaaaaaaatggctgctactctgtttggaaaaataccatcttcaactgtacaagaagctttacacaatttccttaaggctgaagaactatgccctggttattctaatcccaattacatgtacttagcaaagtgttatactgatcttgaggaaaaccagaatgctttgaagttctgtaatttggctttattgcttcctactgttaccaaagaggataaagaggcacagaaagagatgcaaaaaataatgacttccttgaagaggtaaataaacgaatttactcttcaacaaatcagatgtggtctaccaaaatttaaatgaatcaaagttgtgcttttattatccttcatttttgatgtaagggtattgtgcttagatttgaaggtaaagccatgtttctgcagaatgcattccactagtagcactacaaaattaattatgttatttggagaatctatatactataatgtcaatacataatctataaacatgtatgctttatatttttcttatcaataaactgcagccttaagaatatttctttaaataaaatatttaaatccaataaaaagaa

SEQ ID NO: 432015 - DNA, 2009 bp, Homo sapiens
gcggccgcgggctcctcccccggcgcctccgctatctgggtcaggacgcgacggccgcggcgcgggaccttaggacccgcgggctccagggctactgtccgtccgccactgcgcgccagcaggtcctggtctccgctctccaacagctgaaaggccggcgcagtgaacacaggtgcgtgcgcagtctgggagggggctgctcagccgctgggggccggaccgcgccggggacttgcggagggaagcggaaatacttgcggtgggggcgactgcacttccgggtcggtgtgtccctggcgaagcttgagcctgctagccagcggtgctctgcgttcccggggctggagcagcggcccatagtggcttcccgggttcatccctcgctgaccctgcgccacggaagccctagccccggaggtcgctggtatttcctcgcacgcggacccttctgggaaacgaaaaccaagaaatgccttattccacaaacaaagagttgatacttggcatcatggtgggcactgctggaatcagcttgctgctcttgtggtaccacaaggtccgtaaaccagggatagcaatgaagttacctgaatttctttctctgggtaatacatttaattcaataactttgcaagatgaaatacatgatgaccaaggaacaacagtaatctttcaagaaaggcaacttcagatactggagaagttaaacgaattactgacaaatatggaagaactcaaagaggaaatcagatttcttaaagaagctattccaaagctggaggaatatatacaagatgaacttggagggaaaataactgttcataagataagccctcagcacagagcgagaaaaagaagactccccacaattcaaagttcagcaacaagtaatagttcagaggaagcagaaagtgaaggagggtatattacagctaatactgacacagaagaacagagttttccagtccctaaggcatttaacacacgtgtagaggaattaaatttagatgtccttcttcagaaggtagatcatttacgtatgagtgagtctggcaagtcggagagttttgaactacttcgtgaccacaaagaaaagtttagagatgaaatagagtttatgtggcgatttgctcgtgcttatggagacatgtatgaactatctacaaacacacaagaaaagaaacattatgctaatattggaaaaactttaagtgaaagagctattaatagagcacccatgaatggacattgtcatctgtggtatgcagttttgtgtggctatgtatctgagtttgagggtttacaaaacaaaatcaactatgggcacctcttcaaggaacatctagatatagcaatcaaacttttaccagaggaaccctttctatattacctcaaagggagatactgctatactgtctcaaaactgagctggattgagaaaaaaatggctgctactctgtttggaaaaataccatcttcaactgtacaagaagctttacacaatttccttaaggctgaagaactatgccctggttattctaatcccaattacatgtacttagcaaagtgttatactgatcttgaggaaaaccagaatgctttgaagttctgtaatttggctttattgcttcctactgttaccaaagaggataaagaggcacagaaagagatgcaaaaaataatgacttccttgaagaggtaaataaacgaatttactcttcaacaaatcagatgtggtctaccaaaatttaaatgaatcaaagttgtgcttttattatccttcatttttgatgtaagggtattgtgcttagatttgaaggtaaagccatgtttctgcagaatgcattccactagtagcactacaaaattaattatgttatttggagaatctatatactataatgtcaatacataatctataaacatgtatgctttatatttttcttatcaataaactgcagccttaagaatatttctttaaataaaatatttaaatccaataaaaagaa

SEQ ID NO: 432016 - DNA, 1728 bp, Homo sapiens
gcggccgcgggctcctcccccggcgcctccgctatctgggtcaggacgcgacggccgcggcgcgggaccttaggacccgcgggctccagggctactgtccgtccgccactgcgcgccagcaggtcctggtctccgctctccaacagctgaaaggccggcgcagtgaacacagaaacgaaaaccaagaaatgccttattccacaaacaaagagttgatacttggcatcatggtgggcactgctggaatcagcttgctgctcttgtggtaccacaaggtccgtaaaccagggatagcaatgaagttacctgaatttctttctctgggtaatacatttaattcaataactttgcaagatgaaatacatgatgaccaaggaacaacagtaatctttcaagaaaggcaacttcagatactggagaagttaaacgaattactgacaaatatggaagaactcaaagaggaaatcagatttcttaaagaagctattccaaagctggaggaatatatacaagatgaacttggagggaaaataactgttcataagataagccctcagcacagagcgagaaaaagaagactccccacaattcaaagttcagcaacaagtaatagttcagaggaagcagaaagtgaaggagggtatattacagctaatactgacacagaagaacagagttttccagtccctaaggcatttaacacacgtgtagaggaattaaatttagatgtccttcttcagaaggtagatcatttacgtatgagtgagtctggcaagtcggagagttttgaactacttcgtgaccacaaagaaaagtttagagatgaaatagagtttatgtggcgatttgctcgtgcttatggagacatgtatgaactatctacaaacacacaagaaaagaaacattatgctaatattggaaaaactttaagtgaaagagctattaatagagcacccatgaatggacattgtcatctgtggtatgcagttttgtgtggctatgtatctgagtttgagggtttacaaaacaaaatcaactatgggcacctcttcaaggaacatctagatatagcaatcaaacttttaccagaggaaccctttctatattacctcaaagggagatactgctatactgtctcaaaactgagctggattgagaaaaaaatggctgctactctgtttggaaaaataccatcttcaactgtacaagaagctttacacaatttccttaaggctgaagaactatgccctggttattctaatcccaattacatgtacttagcaaagtgttatactgatcttgaggaaaaccagaatgctttgaagttctgtaatttggctttattgcttcctactgttaccaaagaggataaagaggcacagaaagagatgcaaaaaataatgacttccttgaagaggtaaataaacgaatttactcttcaacaaatcagatgtggtctaccaaaatttaaatgaatcaaagttgtgcttttattatccttcatttttgatgtaagggtattgtgcttagatttgaaggtaaagccatgtttctgcagaatgcattccactagtagcactacaaaattaattatgttatttggagaatctatatactataatgtcaatacataatctataaacatgtatgctttatatttttcttatcaataaactgcagccttaagaatatttctttaaataaaatatttaaatccaataaaaagaa

SEQ ID NO: 432017 - DNA, 1666 bp, Homo sapiens
gcggccgcgggctcctcccccggcgcctccgctatctgggtcaggacgcgacggccgcggcgcgggaccttaggacccgcgggctccagggctactgtccgtccgccactgcgcgccagcaggtcctggtctccgctctccaacagctgaaaggccggcgcagtgaacacagaaacgaaaaccaagaaatgccttattccacaaacaaagagttgatacttggcatcatggtgggcactgctggaatcagcttgctgctcttgtggtaccacaaggtccgtaaaccagggatagcaatgaagttacctgaatttctttctctgggtaatacatttaattcaataactttgcaagatgaaatacatgatgaccaaggaacaacagtaatctttcaagaaaggcaacttcagatactggagaagttaaacgaattactgacaaatatggaagaactcaaagaggaaatcagatttcttaaagaagctattccaaagctggaggaatatatacaagatgaacttggagggaaaataactgttcataagataagccctcagcacagagcgagaaaaagaagagtatattacagctaatactgacacagaagaacagagttttccagtccctaaggcatttaacacacgtgtagaggaattaaatttagatgtccttcttcagaaggtagatcatttacgtatgagtgagtctggcaagtcggagagttttgaactacttcgtgaccacaaagaaaagtttagagatgaaatagagtttatgtggcgatttgctcgtgcttatggagacatgtatgaactatctacaaacacacaagaaaagaaacattatgctaatattggaaaaactttaagtgaaagagctattaatagagcacccatgaatggacattgtcatctgtggtatgcagttttgtgtggctatgtatctgagtttgagggtttacaaaacaaaatcaactatgggcacctcttcaaggaacatctagatatagcaatcaaacttttaccagaggaaccctttctatattacctcaaagggagatactgctatactgtctcaaaactgagctggattgagaaaaaaatggctgctactctgtttggaaaaataccatcttcaactgtacaagaagctttacacaatttccttaaggctgaagaactatgccctggttattctaatcccaattacatgtacttagcaaagtgttatactgatcttgaggaaaaccagaatgctttgaagttctgtaatttggctttattgcttcctactgttaccaaagaggataaagaggcacagaaagagatgcaaaaaataatgacttccttgaagaggtaaataaacgaatttactcttcaacaaatcagatgtggtctaccaaaatttaaatgaatcaaagttgtgcttttattatccttcatttttgatgtaagggtattgtgcttagatttgaaggtaaagccatgtttctgcagaatgcattccactagtagcactacaaaattaattatgttatttggagaatctatatactataatgtcaatacataatctataaacatgtatgctttatatttttcttatcaataaactgcagccttaagaatatttctttaaataaaatatttaaatccaataaaaagaa

SEQ ID NO: 432018 - DNA, 990 bp, Homo sapiens
  misc_feature (930)..(930): n is a, c, g, or t
  misc_feature (934)..(934): n is a, c, g, or t
aactccacatgcagcttgagcattcagtcttctgacctgttccacctctacagggcattttatggcttaaggatgacggcctagaagggaagggagagacttactttggattaaatttacaatgggaaagtgcttaaggtatattacagctaatactgacacagaagaacagagttttccagtccctaaggcatttaacacacgtgtagaggaattaaatttagatgtccttcttcagaaggtagatcatttacgtatgagtgagtctggcaagtcggagagttttgaactacttcgtgaccacaaagaaaagtttagagatgaaatagagtttatgtggcgatttgctcgtgcttatggagacatgtatgaactatctacaaacacacaagaaaagaaacattatgctaatattggaaaaactttaagtgaaagagctattaatagagcacccatgaatggacattgtcatctgtggtatgcagttttgtgtggctatgtatctgagtttgagggtttacaaaacaaaatcaactatgggcacctcttcaaggaacatctagatatagcaatcaaacttttaccagaggaaccctttctatattacctcaaagggagatactgctatactgtctcaaaactgagctggattgagaaaaaaatggctgctactctgtttggaaaaataccatcttcaactgtacaagaagctttacacaatttccttaaggctgaagaactatgccctggttattctaatcccaattacatgtacttagcaaagtgttatactgatcttgaggaaaaccagaatgctttgaagttctgtaatttggctttattgcttcctactgttaccaaagaggataaagaggcacagaaagagatgcaaaaaataatgacttccttgaagaggtaaataacagttcnatanagccgtcaacaagaaaaccccttcttttacctccccattgctgtagaaatgggtac

SEQ ID NO: 432019 - DNA, 1603 bp, Homo sapiens
gcggccgcgggctcctcccccggcgcctccgctatctgggtcaggacgcgacggccgcggcgcgggaccttaggacccgcgggctccagggctactgtccgtccgccactgcgcgccagcaggtcctggtctccgctctccaacagctgaaaggccggcgcagtgaacacaggtgcgtgcgcagtctgggagggggctgctcagccgctgggggccggaccgcgccggggacttgcggagggaagcggaaatacttgcggtgggggcgactgcacttccgggtcggtgtgtccctggcgaagcttgagcctgctagccagcggtgctctgcgttcccggggctggagcagcggcccatagtggcttcccgggttcatccctcgctgaccctgcgccacggaagccctagccccggaggtcgctggtatttcctcgcacgcggacccttctgggaaacgaaaaccaagaaatgccttattccacaaacaaagagttgatacttggcatcatggtgggcactgctggaatcagcttgctgctcttgtggtaccacaaggtccgtaaaccagggatagcaatgaagttacctgaatttctttctctgggtaatacatttaattcaataactttgcaagatgaaatacatgatgaccaaggaacaacagtaatctttcaagaaaggcaacttcagatactggagaagttaaacgaattactgacaaatatggaagaactcaaagaggaaatcagatttcttaaagaagctattccaaagctggaggaatatatacaagatgaacttggagggaaaataactgttcataagataagccctcagcacagagcgagaaaaagaagactccccacaattcaaagttcagcaacaagtaatagttcagaggaagcagaaagtgaaggagggtatattacagctaatactgacacagaagaacagagttttccagtccctaaggcatttaacacacgtgtagaggaattaaatttagatgtccttcttcagaaggtagatcatttacgtatgagtgagtctggcaagtcggagagttttgaactacttcgtgaccacaaagaaaagtttagagatgaaatagagtttatgtggcgatttgctcgtgcttatggagacatgtatgaactatctacaaacacacaagaaaagaaacattatgctaatattggaaaaactttaagtgaaagagctattaatagagcacccatgaatggacattgtcatctgtggtatgcagttttgtgtggctatgtatctgagtttgagggtttacaaaacaaaatcaactatgggcacctcttcaaggaacatctagatatagcaatcaaacttttaccagaggaaccctttctatattacctcaaagggagatactgctatactgtcttcaaaaactgaggtggattgcgaaacaacatgggcggtactctgttggaaaaatccattcttaatgtaccagaagttacacaattttcttaaggtgagaaataggccggtgcgttaatcccgttcgtggtcttgccacggttacgagtggggaacaaaggttgagctggagggttggccaggtca

SEQ ID NO: 432020 - DNA, 681 bp, Homo sapiens
tgaaaaaggaaggtaaaatattaacatgaataccatgagggtggtatctctaatatatattatttatggatatatgttttcatttgtatatgttatatctatacacacacacacgtatatacacataacacacacacgtctaactggggagagataatccattcaaaaggtgaacaactttctaagagtgatgttgttgtgtatttgcaggtctcaaaactgagctggattgagaaaaaaatggctgctactctgtttggaaaaataccatcttcaactgtacaagaagctttacacaatttccttaaggtacattttgtgtatccattattttagtgtcagactgattaccatctgcaccaatccctgctgccgttgtcaaggaaatcttttctccatgtggagcctcagtttgaatcctggttttggcatgttctgttttaagcccctcataatgcaagttattaatatgttttaagtctaaactccttagaacaactagttatgccctaggttctaggaattacaaactactttttaaaaataacccagcagcctaaatgaaggtttaggtttgacagctcttactgctaagtccaagaacagctctctgagtcacttgagcatgtgcagaaacagtcacgccctgatggttaaacttagtcccagtcctcctgatta

SEQ ID NO: 432021 - DNA, 1741 bp, Homo sapiens
atatgtctacttcatcaatttttcttttctttttatggactcttttctgttggcaaaaaaaacctgttatttcttgatcttttggcaccattttcgcacttaataatggcgtaatttctcttctatttgttttctatttgcccatctgttcttttttctccttttcctgccttcttttggaccaaaaacgaaaaccaagaaatgccttattccacaaacaaagagttgatacttggcatcatggtgggcactgctggaatcagcttgctgctcttgtggtaccacaaggtccgtaaaccagggatagcaatgaagttacctgaatttctttctctgggtaatacatttaattcaataactttgcaagatgaaatacatgatgaccaaggaacaacagtaatctttcaagaaaggcaacttcagatactggagaagttaaacgaattactgacaaatatggaagaactcaaagaggaaatcagatttcttaaagaagctattccaaagctggaggaatatatacaagatgaacttggagggaaaataactgttcataagataagccctcagcacagagcgagaaaaagaagactccccacaattcaaagttcagcaacaagtaatagttcagaggaagcagaaagtgaaggagggtatattacagctaatactgacacagaagaacagagttttccagtccctaaggcatttaacacacgtgtagaggaattaaatttagatgtccttcttcagaaggtagatcatttacgtatgagtgagtctggcaagtcggagagttttgaactacttcgtgaccacaaagaaaagtttagagatgaaatagagtttatgtggcgatttgctcgtgcttatggagacatgtatgaactatctacaaacacacaagaaaagaaacattatgctaatattggaaaaactttaagtgaaagagctattaatagagcacccatgaatggacattgtcatctgtggtatgcagttttgtgtggctatgtatctgagtttgagggtttacaaaacaaaatcaactatgggcacctcttcaaggaacatctagatatagcaatcaaacttttaccagaggaaccctttctatattacctcaaagggagatactgctatactgtctcaaaactgagctggattgagaaaaaaatggctgctactctgtttggaaaaataccatcttcaactgtacaagaagctttacacaatttccttaaggctgaagaactatgccctggttattctaatcccaattacatgtacttagcaaagtgttatactgatcttgaggaaaaccagaatgctttgaagttctgtaatttggctttattgcttcctactgttaccaaagaggataaagaggcacagaaagagatgcaaaaaataatgacttccttgaagaggtaaataaacgaatttactcttcaacaaatcagatgtggtctaccaaaatttaaatgaatcaaagttgtgcttttattatccttcatttttgatgtaagggtattgtgcttagatttgaaggtaaagccatgtttctgcagaatgcattccactagtagcactacaaaattaattatgttatttggagaatctatatactataatgtcaatacataatctataaacatgtatgctttatatttttcttatcaataaactgcagccttaagaatatttctttaaataaaatatttaaatccaataaaaagaa

SEQ ID NO: 432022 - DNA, 1085 bp, Homo sapiens
aactccacatgcagcttgagcattcagtcttctgacctgttccacctctacagggcattttatggcttaaggatgacggcctagaagggaagggagagacttactttggattaaatttacaatgggaaagtgcttaaggtatattacagctaatactgacacagaagaacagagttttccagtccctaaggcatttaacacacgtgtagaggaattaaatttagatgtccttcttcagaaggtagatcatttacgtatgagtgagtctggcaagtcggagagttttgaactacttcgtgaccacaaagaaaagtttagagatgaaatagagtttatgtggcgatttgctcgtgcttatggagacatgtatgaactatctacaaacacacaagaaaagaaacattatgctaatattggaaaaactttaagtgaaagagctattaatagagcacccatgaatggacattgtcatctgtggtatgcagttttgtgtggctatgtatctgagtttgagggtttacaaaacaaaatcaactatgggcacctcttcaaggaacatctagatatagcaatcaaacttttaccagaggaaccctttctatattacctcaaagggagatactgctatactgtctcaaaactgagctggattgagaaaaaaatggctgctactctgtttggaaaaataccatcttcaactgtacaagaagctttacacaatttccttaaggctgaagaactatgccctggttattctaatcccaattacatgtacttagcaaagtgttatactgatcttgaggaaaaccagaatgctttgaagttctgtaatttggctttattgcttcctactgttaccaaagaggataaagaggcacagaaagagatgcaaaaaataatgacttccttgaagaggtaaataaacttcgtaagacaaaataatttcattaatgtggatgaaaaatggaaaactcagcaaaggacatgaacaagttgttggcagaagaggaaaaacaaacaaatgtagtattgtaactggtaatcaaaagatgtgaataaaattacaataaaatactgttttacca

SEQ ID NO: 432023 - DNA, 626 bp, Homo sapiens
  misc_feature (13)..(13): n is a, c, g, or t
  misc_feature (17)..(18): n is a, c, g, or t
  misc_feature (20)..(20): n is a, c, g, or t
  misc_feature (32)..(32): n is a, c, g, or t
  misc_feature (38)..(38): n is a, c, g, or t
  misc_feature (58)..(58): n is a, c, g, or t
  misc_feature (63)..(63): n is a, c, g, or t
  misc_feature (69)..(69): n is a, c, g, or t
  misc_feature (74)..(74): n is a, c, g, or t
  misc_feature (76)..(76): n is a, c, g, or t
gattcggcacggnggcnnantggccgtagganagagcntagctaaatagaaatcatgncatanctgtancactntnctgtatttgcaaatccaacattgagcttctggactacgctgactccactgctgaatcctcaatggaaagggtcgactggttgcagttgaaatgacctgaaatgtagcctctgtccttgtaagtcagttgacttgccgcacatctctttgtgtacttgtacggtactggcagaaaagtcatttttcaaaagccataggcttttccttgcccttagctgtaataatgcatctgattttgatttcctccagagctgtgtttctgtccatcacctgtgtattggccctgtgtttaccactctggcccactcctcacccccttgctcccctggtcttctggagtttgtgacattgatttgaaatggatggtgttctcttgagagcaagtgagattgttagaattaagttccaactatacagttttctaacatagctataaggtccttgttgctgtttgtgataactgatagataactcattggaaacgtgcatacatttatattcagatgaaattatggtttgcactgtctattaaatatctcgattaattttca

SEQ ID NO: 432024 - DNA, 892 bp, Homo sapiens
  misc_feature (13)..(13): n is a, c, g, or t
  misc_feature (17)..(18): n is a, c, g, or t
  misc_feature (20)..(20): n is a, c, g, or t
  misc_feature (32)..(32): n is a, c, g, or t
  misc_feature (38)..(38): n is a, c, g, or t
  misc_feature (58)..(58): n is a, c, g, or t
  misc_feature (63)..(63): n is a, c, g, or t
  misc_feature (69)..(69): n is a, c, g, or t
  misc_feature (74)..(74): n is a, c, g, or t
  misc_feature (76)..(76): n is a, c, g, or t
  misc_feature (651)..(651): n is a, c, g, or t
  misc_feature (661)..(661): n is a, c, g, or t
gattcggcacggnggcnnantggccgtagganagagcntagctaaatagaaatcatgncatanctgtancactntnctgtatttgcaaatccaacattgagcttctggactacgctgactccactgctgaatcctcaatggaaagggtcgactggttgcagttgaaatgacctgaaatgtagcctctgtccttgtaagtcagttgacttgccgcacatctctttgtgtacttgtacggtactggcagaaaagtcatttttcaaaagccataggcttttccttgcccttagctgtaataatgcatctgattttgatttcctccagagctgtgtttctgtccatcacctgtgtattggccctgtgtttaccactctggcccactcctcacccccttgctcccctggtcttctggagtttgtgacattgatttgaaatggatggtgttctcttgagagcaagtgagattgttagaattaagttccaactatacagttttctaacatagctataaggtccttgttgctgtttgtgataactgatagataactcattggaaacgtgcatacatttatattcagatgaaattatggtttgcactgtctattaaatatctcgattaattttcaaaaaaaaaaaaaaaaaaaaaaaaanaaaaaaacanaaataattaataaatataaaaattaataaatataatattatattatcaatatctattacttcgggtgaaagaataaaaattaattattttattttctttttggggcctcttcgcccaaggcacttttaatttggagaagtttatttggcggggcaaattgaggtcaatttggcaattttcccttatgggggcgattaaaaatacggggcgcggttaaaaagggggggtggg

SEQ ID NO: 432025 - DNA, 476 bp, Homo sapiens
tcacccccaggtagaagtaatccacacagaacttctagaaaaagcgaggcaatttgatgtggcatgagagagaaccctgggggcagtgcatgaccagctgtggtcacctccctctcccatgtataaagagggaacggcctcctcaagtagagtcagctgcctagagtcctgtgtaggcagaggccgtccagcaagcctcctggagctgtgtggccatgagtcaagccacttgaggtggagttgggggttggcaaggattagatctcttctggggttcttcccactctcctcccaccttgcaggctctgggaccgaagccttgtgggaatcctgagggcctctgtgtagaatccttgttttgtctgggcctgctggaggcggagggtgggtgctgccaaactgtgcttggttttccattcactgagttactacttagaataatggcctccagctccatccagttgtgcagtggatcc

SEQ ID NO: 432026 - DNA, 1625 bp, Homo sapiens
gctgcggggcggaggcggaggcggaggagaggcctgcggcggcagggagcggcgggactgggagcgggcgccggagccgacccgagccgagccgagccgagccgagccggagcgggcggcgaaggccggcgcggcgagcagcaaccatgtcggtgttcgggaagctgttcggggctggagggggtaaggccggcaagggcggcccgaccccccaggaggccatccagcggctgcgggacacggaagagatgttaagcaagaaacaggagttcctggagaagaaaatcgagcaggagctgacggccgccaagaagcacggcaccaaaaacaagcgcgcggccctccaggcactgaagcgtaagaagaggtatgagaagcagctggcgcagatcgacggcacattatcaaccatcgagttccagcgggaggccctggagaatgccaacaccaacaccgaggtgctcaagaacatgggctatgccgccaaggccatgaaggcggcccatgacaacatggacatcgataaagttgatgagttaatgcaggacattgctgaccagcaagaacttgcagaggagatttcaacagcaatttcgaaacctgtagggtttggagaagagtttgacgaggatgagctcatggcggaattagaagaactagaacaggaggaactagacaagaatttgctggaaatcagtggacccgaaacagtccctctaccaaatgttccctctatagccctaccatcaaaacccgccaagaagaaagaagaggaggacgacgacatgaaggaattggagaactgggctggatccatgtaatggggtccagcgctggctgggcccagacagactgtggtggcctgcgcagcgagcaggcgtgtgcgtgtgtggggcaggcaggatgtggtgcaggcaggttccatcgctttcgactctcactccaaagcagtagggccgcgttgctgctcactctctgcatagcatggtctgcacctgggagatgggcggggggaggggggcgggcggggtgggaagtgcctgctgtttataatgttgaatttctgtaaaataaactgtatttgcaaatccaacattgagcttctggactacgctgactccactgctgaatcctcaatggaaagggtcgactggttgcagttgaaatgacctgaaatgtagcctctgtccttgtaagtcagttgacttgccgcacatctctttgtgtacttgtacggtactggcagaaaagtcatttttcaaaagccataggcttttccttgcccttagctgtaataatgcatctgattttgatttcctccagagctgtgtttctgtccatcacctgtgtattggccctgtgtttaccactctggcccactcctcacccccttgctcccctggtcttctggagtttgtgacattgatttgaaatggatggtgttctcttgagagcaagtgagattgttagaattaagttccaactatacagttttctaacatagctataaggtccttgttgctgtttgtgataactgatagataactcattggaaacgtgcatacatttatattcagatgaaattatggtttgcactgtctattaaatatctcgattaattttca

SEQ ID NO: 432027 - DNA, 1602 bp, Homo sapiens
actgcatccaacgccgctgactgcatccaacgccgctgactgcatccaacgccgctgactgcatccaacgccgccgagccgagccggagcgggcggcgaaggccggcgcggcgagcagcaaccatgtcggtgttcgggaagctgttcggggctggagggggtaaggccggcaagggcggcccgaccccccaggaggccatccagcggctgcgggacacggaagagatgttaagcaagaaacaggagttcctggagaagaaaatcgagcaggagctgacggccgccaagaagcacggcaccaaaaacaagcgcgcggccctccaggcactgaagcgtaagaagaggtatgagaagcagctggcgcagatcgacggcacattatcaaccatcgagttccagcgggaggccctggagaatgccaacaccaacaccgaggtgctcaagaacatgggctatgccgccaaggccatgaaggcggcccatgacaacatggacatcgataaagttgatgagttaatgcaggacattgctgaccagcaagaacttgcagaggagatttcaacagcaatttcgaaacctgtagggtttggagaagagtttgacgaggatgagctcatggcggaattagaagaactagaacaggaggaactagacaagaatttgctggaaatcagtggacccgaaacagtccctctaccaaatgttccctctatagccctaccatcaaaacccgccaagaagaaagaagaggaggacgacgacatgaaggaattggagaactgggctggatccatgtaatggggtccagcgctggctgggcccagacagactgtggtggcctgcgcagcgagcaggcgtgtgcgtgtgtggggcaggcaggatgtggtgcaggcaggttccatcgctttcgactctcactccaaagcagtagggccgcgttgctgctcactctctgcatagcatggtctgcacctgggagatgggcggggggaggggggcgggcggggtgggaagtgcctgctgtttataatgttgaatttctgtaaaataaactgtatttgcaaatccaacattgagcttctggactacgctgactccactgctgaatcctcaatggaaagggtcgactggttgcagttgaaatgacctgaaatgtagcctctgtccttgtaagtcagttgacttgccgcacatctctttgtgtacttgtacggtactggcagaaaagtcatttttcaaaagccataggcttttccttgcccttagctgtaataatgcatctgattttgatttcctccagagctgtgtttctgtccatcacctgtgtattggccctgtgtttaccactctggcccactcctcacccccttgctcccctggtcttctggagtttgtgacattgatttgaaatggatggtgttctcttgagagcaagtgagattgttagaattaagttccaactatacagttttctaacatagctataaggtccttgttgctgtttgtgataactgatagataactcattggaaacgtgcatacatttatattcagatgaaattatggtttgcactgtctattaaatatctcgattaattttca

SEQ ID NO: 432028 - DNA, 1891 bp, Homo sapiens
  misc_feature (1650)..(1650): n is a, c, g, or t
  misc_feature (1660)..(1660): n is a, c, g, or t
gctgcggggcggaggcggaggcggaggagaggcctgcggcggcagggagcggcgggactgggagcgggcgccggagccgacccgagccgagccgagccgagccgagccggagcgggcggcgaaggccggcgcggcgagcagcaaccatgtcggtgttcgggaagctgttcggggctggagggggtaaggccggcaagggcggcccgaccccccaggaggccatccagcggctgcgggacacggaagagatgttaagcaagaaacaggagttcctggagaagaaaatcgagcaggagctgacggccgccaagaagcacggcaccaaaaacaagcgcgcggccctccaggcactgaagcgtaagaagaggtatgagaagcagctggcgcagatcgacggcacattatcaaccatcgagttccagcgggaggccctggagaatgccaacaccaacaccgaggtgctcaagaacatgggctatgccgccaaggccatgaaggcggcccatgacaacatggacatcgataaagttgatgagttaatgcaggacattgctgaccagcaagaacttgcagaggagatttcaacagcaatttcgaaacctgtagggtttggagaagagtttgacgaggatgagctcatggcggaattagaagaactagaacaggaggaactagacaagaatttgctggaaatcagtggacccgaaacagtccctctaccaaatgttccctctatagccctaccatcaaaacccgccaagaagaaagaagaggaggacgacgacatgaaggaattggagaactgggctggatccatgtaatggggtccagcgctggctgggcccagacagactgtggtggcctgcgcagcgagcaggcgtgtgcgtgtgtggggcaggcaggatgtggtgcaggcaggttccatcgctttcgactctcactccaaagcagtagggccgcgttgctgctcactctctgcatagcatggtctgcacctgggagatgggcggggggaggggggcgggcggggtgggaagtgcctgctgtttataatgttgaatttctgtaaaataaactgtatttgcaaatccaacattgagcttctggactacgctgactccactgctgaatcctcaatggaaagggtcgactggttgcagttgaaatgacctgaaatgtagcctctgtccttgtaagtcagttgacttgccgcacatctctttgtgtacttgtacggtactggcagaaaagtcatttttcaaaagccataggcttttccttgcccttagctgtaataatgcatctgattttgatttcctccagagctgtgtttctgtccatcacctgtgtattggccctgtgtttaccactctggcccactcctcacccccttgctcccctggtcttctggagtttgtgacattgatttgaaatggatggtgttctcttgagagcaagtgagattgttagaattaagttccaactatacagttttctaacatagctataaggtccttgttgctgtttgtgataactgatagataactcattggaaacgtgcatacatttatattcagatgaaattatggtttgcactgtctattaaatatctcgattaattttcaaaaaaaaaaaaaaaaaaaaaaaaanaaaaaaacanaaataattaataaatataaaaattaataaatataatattatattatcaatatctattacttcgggtgaaagaataaaaattaattattttattttctttttggggcctcttcgcccaaggcacttttaatttggagaagtttatttggcggggcaaattgaggtcaatttggcaattttcccttatgggggcgattaaaaatacggggcgcggttaaaaagggggggtggg

SEQ ID NO: 432029 - DNA, 1624 bp, Homo sapiens
gctgcggggcggaggcggaggcggaggagaggcctgcggcggcagggagcggcgggactgggagcgggcgccggagccgacccgagccgagccgagccgagccgagccggagcgggcggcgaaggccggcgcggcgagcagcaaccatgtcggtgttcgggaagctgttcggggctggagggggtaaggccggcaagggcggcccgaccccccaggaggccatccagcggctgcgggacacggaagagatgttaagcaagaaacaggagttcctggagaagaaaatcgagcaggagctgacggccgccaagaagcacggcaccaaaaacaagcgcgcggccctccaggcactgaagcgtaagaagaggtatgagaagcagctggcgcagatcgacggcacattatcaaccatcgagttccagcgggaggccctggagaatgccaacaccaacaccgaggtgctcaagaacatgggctatgccgccaaggccatgaaggcggcccatgacaacatggacatcgataaagttgatgagttaatgcaggacattgctgaccagcaagaacttgcagaggagatttcaacagcaatttcgaaacctgtagggtttggagaagagtttgacgaggatgagctcatggcggaattagaagaactagaacaggaggaactagacaagaatttgctggaaatcagtggacccgaaacagtccctctaccaaatgttccctctatagccctaccatcaaaacccgccaagaagaaagaagaggaggacgacgacatgaaggaattggagaactgggctggatccatgtaatggggtccagcgctggctgggcccagacagactgtggtggcctgcgcagcgagcaggcgtgtgcgtgtgtggggcaggcaggatgtggtgcaggcaggttccatcgctttcgactctcactccaaagcagtagggccgcgttgctgctcactctctgcatagcatggtctgcacctgggagatgggcggggggaggggggcgggcggggtgggaagtgcctgctgtttataatgttgaatttctgtaaaataaactgtatttgcaaatccaacattgagcttctggactacgctgactccactgctgaatcctcaatggaaagggtcgactggttgcagttgaaatgacctgaaatgtagcctctgtccttgtaagtcagttgacttgccgcacatctctttgtgtacttgtacggtactggcagaaaagtcatttttcaaaagccataggcttttccttgcccttagctgtaataatgcatctgattttgatttcctccagagctgtgtttctgtccatcacctgtgtattggccctgtgtttaccactctggcccactcctcacccccttgctcccctggtcttctggagtttgtgacattgatttgaaatggatggtgttctcttgagagcaagtgagattgttagaattaagttccaactatacagttttctaacatagctataaggtccttgttgctgtttgtgataactctcatgtaactactcgacacgtgatctcggaagagggtggccgtcagcattcaccaaataaacccgctctctgggcaaaaaaaaaaaa

SEQ ID NO: 432030 - DNA, 1571 bp, Homo sapiens
gctgcggggcggaggcggaggcggaggagaggcctgcggcggcagggagcggcgggactgggagcgggcgccggagccgacccgagccgagccgagccgagccgagccggagcgggcggcgaaggccggcgcggcgagcagcaaccatgtcggtgttcgggaagctgttcggggctggagggggtaaggccggcaagggcggcccgaccccccaggaggccatccagcggctgcgggacacggaagagatgttaagcaagaaacaggagttcctggagaagaaaatcgagcaggagctgacggccgccaagaagcacggcaccaaaaacaagcgcgcggccctccaggcactgaagcgtaagaagaggtatgagaagcagctggcgcagatcgacggcacattatcaaccatcgagttccagcgggaggccctggagaatgccaacaccaacaccgaggtgctcaagaacatgggctatgccgccaaggccatgaaggcggcccatgacaacatggacatcgataaagttgatgagttaatgcaggacattgctgaccagcaagaacttgcagaggagatttcaacagcaatttcgaaacctgtagggtttggagaagagtttgacgaggatgagctcatggcggaattagaagaactagaacaggaggaactagacaagaatttgctggaaatcagtggacccgaaacagtccctctaccaaatgttccctctatagccctaccatcaaaacccgccaagaagaaagaagaggaggacgacgacatgaaggaattggagaactgggctggatccatgtaatggggtccagcgctggctgggcccagacagactgtggtggcctgcgcagcgagcaggcgtgtgcgtgtgtggggcaggcaggatgtggtgcaggcaggttccatcgctttcgactctcactccaaagcagtagggccgcgttgctgctcactctctgcatagcatggtctgcacctgggagatgggcggggggaggggggcgggcggggtgggaagtgcctgctgtttataatgttgaatttctgtaaaataaactgtatttgcaaatccaacattgagcttctggactacgctgactccactgctgaatcctcaatggaaagggtcgactggttgcagttgaaatgacctgaaatgtagcctctgtccttgtaagtcagttgacttgccgcacatctctttgtgtacttgtacggtactggcagaaaagtcatttttcttcctccagagctgtgtttctgtccatcacctgtgtattggccctgtgtttaccactctggcccactcctcacccccttgctcccctggtcttctggagtttgtgacattgatttgaaatggatggtgttctcttgagagcaagtgagattgttagaattaagttccaactatacagttttctaacatagctataaggtccttgttgctgtttgtgataactgatagataactcattggaaacgtgcatacatttatattcagatgaaattatggtttgcactgtctattaaatatctcgattaattttca

SEQ ID NO: 432031 - DNA, 1617 bp, Homo sapiens
gctgcggggcggaggcggaggcggaggagaggcctgcggcggcagggagcggcgggactgggagcgggcgccggagccgacccgagccgagccgagccgagccgagccggagcgggcggcgaaggccggcgcggcgagcagcaaccatgtcggtgttcgggaagctgttcggggctggagggggtaaggccggcaagggcggcccgaccccccaggaggccatccagcggctgcgggacacggaagagatgttaagcaagaaacaggagttcctggagaagaaaatcgagcaggagctgacggccgccaagaagcacggcaccaaaaacaagcgcgcggccctccaggcactgaagcgtaagaagaggtatgagaagcagctggcgcagatcgacggcacattatcaaccatcgagttccagcgggaggccctggagaatgccaacaccaacaccgaggtgctcaagaacatgggctatgccgccaaggccatgaaggcggcccatgacaacatggacatcgataaagttgatgagttaatgcaggacattgctgaccagcaagaacttgcagaggagatttcaacagcaatttcgaaacctgtagggtttggagaagagtttgacgaggatgagctcatggcggaattagaagaactagaacaggaggaactagacaagaatttgctggaaatcagtggacccgaaacagtccctctaccaaatgttccctctatagccctaccatcaaaacccgccaagaagaaagaagaggaggacgacgacatgaaggaattggagaactgggctggatccatgtaatggggtccagcgctggctgggcccagacagactgtggtggcctgcgcagcgagcaggcgtgtgcgtgtgtggggcaggcaggatgtggtgcaggcaggttccatcgctttcgactctcactccaaagcagtagggccgcgttgctgctcactctctgcatagcatggtctgcacctgggagatgggcggggggaggggggcgggcggggtgggaagtgcctgctgtttataatgttgaatttctgtaaaataaactgtatttgcaaatccaacattgagcttctggactacgctgactccactgctgaatcctcaatggaaagggtcgactggttgcagttgaaatgacctgaaatgtagcctctgtccttgtaagtcagcgtagtccagaagctcaatgtaaagggtcgactggttgcagttgaaatgacctgaaatgtagcctctgtccttgtaagtcagttgacttgccgaaaatctctttccgtgcgttaccaggttagaccggcccgaaatttgagtgtgaagtagctgaccgcggaaaaatcggagacgggaaaacggtaggggcgagaagatgttttgcccataagagaaggagctcagtttagaagaaccatgagggaaaaaacaatcgagaggatacaatgaagtgagtacagacccggtggataggaaaggtagagtgacagatcgcctcccacatatgtttcagtgtagtgcaaatgtaggatgaagtggcgagagggaaatatatgaggagggttctcgagagatatctcggaggaaggaccct

SEQ ID NO: 432032 - DNA, 1229 bp, Homo sapiens
  misc_feature (915)..(915): n is a, c, g, or t
gctgcggggcggaggcggaggcggaggagaggcctgcggcggcagggagcggcgggactgggagcgggcgccggagccgacccgagccgagccgagccgagccgagccggagcgggcggcgaaggccggcgcggcgagcagcaaccatgtcggtgttcgggaagctgttcggggctggagggggtaaggccggcaagggcggcccgaccccccaggaggccatccagcggctgcgggacacggaagagatgttaagcaagaaacaggagttcctggagaagaaaatcgagcaggagctgacggccgccaagaagcacggcaccaaaaacaagcgcgcggccctccaggcactgaagcgtaagaagaggtatgagaagcagctggcgcagatcgacggcacattatcaaccatcgagttccagcgggaggccctggagaatgccaacaccaacaccgaggtgctcaagaacatgggctatgccgccaaggccatgaaggcggcccatgacaacatggacatcgataaagttgatgagttaatgcaggacattgctgaccagcaagaacttgcagaggagatttcaacagcaatttcgaaacctgtagggtttggagaagagtttgacgaggatgagctcatggcggaattagaagaactagaacaggaggaactagacaagaatttgctggaaatcagtggacccgaaacagtccctctaccaaatgttccctctatagccctaccatcaaaacccgccaagaagaaagaagaggaggacgacgacatgaaggaattggagaactgggctggatccatgtaatggggtccagcgctggctgggcccagacagactgtggtggcctgcgcagcgagcaggcgtgtgcgtgtgtgataaatacgtgatgttatccccnacactagcaaatctaggtcctactaaataccaatctctgggtggatgatcttctagtactgtatttttaaattaaggagttttagttataatgaaattgatttgtagtctgttttgccgtaaacttgtttttctttaaattgttcttacagtgatatcttactatttttaactgtctggggtttctgatatggggatttcagcccctggttaatcagtcttgtccctacaagtccctgatgcagtatgtttatttgtgatgtttaaagaacatttcttggctgggcgctgcggcttgcgcctgtaatctcagca

SEQ ID NO: 432033 - DNA, 1157 bp, Homo sapiens
  misc_feature (26)..(26): n is a, c, g, or t
gtttcctgtcgactctgaggatcttnaaacaccgcaatctcaacatggacatcgataaagttgatgagttaatgcaggacattgctgaccagcaagaacttgcagaggagatttcaacagcaatttcgaaacctgtagggtttggagaagagtttgacgaggatgagctcatggcggaattagaagaactagaacaggaggaactagacaagaatttgctggaaatcagtggacccgaaacagtccctctaccaaatgttccctctatagccctaccatcaaaacccgccaagaagaaagaagaggaggacgacgacatgaaggaattggagaactgggctggatccatgtaatggggtccagcgctggctgggcccagacagactgtggtggcctgcgcagcgagcaggcgtgtgcgtgtgtggggcaggcaggatgtggtgcaggcaggttccatcgctttcgactctcactccaaagcagtagggccgcgttgctgctcactctctgcatagcatggtctgcacctgggagatgggcggggggaggggggcgggcggggtgggaagtgcctgctgtttataatgttgaatttctgtaaaataaactgtatttgcaaatccaacattgagcttctggactacgctgactccactgctgaatcctcaatggaaagggtcgactggttgcagttgaaatgacctgaaatgtagcctctgtccttgtaagtcagttgacttgccgcacatctctttgtgtacttgtacggtactggcagaaaagtcatttttcaaaagccataggcttttccttgcccttagctgtaataatgcatctgattttgatttcctccagagctgtgtttctgtccatcacctgtgtattggccctgtgtttaccactctggcccactcctcacccccttgctcccctggtcttctggagtttgtgacattgatttgaaatggatggtgttctcttgagagcaagtgagattgttagaattaagttccaactatacagttttctaacatagctataaggtccttgttgctgtttgtgataactgatagataactcattggaaacgtgcatacatttatattcagatgaaattatggtttgcactgtctattaaatatctcgattaattttca

SEQ ID NO: 432034 - DNA, 1573 bp, Homo sapiens
gctgcggggcggaggcggaggcggaggagaggcctgcggcggcagggagcggcgggactgggagcgggcgccggagccgacccgagccgagccgagccgagccgagccggagcgggcggcgaaggccggcgcggcgagcagcaaccatgtcggtgttcgggaagctgttcggggctggagggggtaaggccggcaagggcggcccgaccccccaggaggccatccagcggctgcgggacacggaagagatgttaagcaagaaacaggagttcctggagaagaaaatcgagcaggagctgacggccgccaagaagcacggcaccaaaaacaagcgcgcggccctccaggcactgaagcgtaagaagaggtatgagaagcagctggcgcagatcgacggcacattatcaaccatcgagttccagcgggaggccctggagaatgccaacaccaacaccgaggtgctcaagaacatgggctatgccgccaaggccatgaaggcggcccatgacaacatggacatcgataaagttgatgagttaatgcaggacattgctgaccagcaagaacttgcagaggagatttcaacagcaatttcgaaacctgtagggtttggagaagagtttgacgaggatgagctcatggcggaattagaagaactagaacaggaggaactagacaagaatttgctggaaatcagtggacccgaaacagtccctctaccaaatgttccctctatagccctaccatcaaaacccgtggatccatgtaatggggtccagcgctggctgggcccagacagactgtggtggcctgcgcagcgagcaggcgtgtgcgtgtgtggggcaggcaggatgtggtgcaggcaggttccatcgctttcgactctcactccaaagcagtagggccgcgttgctgctcactctctgcatagcatggtctgcacctgggagatgggcggggggaggggggcgggcggggtgggaagtgcctgctgtttataatgttgaatttctgtaaaataaactgtatttgcaaatccaacattgagcttctggactacgctgactccactgctgaatcctcaatggaaagggtcgactggttgcagttgaaatgacctgaaatgtagcctctgtccttgtaagtcagttgacttgccgcacatctctttgtgtacttgtacggtactggcagaaaagtcatttttcaaaagccataggcttttccttgcccttagctgtaataatgcatctgattttgatttcctccagagctgtgtttctgtccatcacctgtgtattggccctgtgtttaccactctggcccactcctcacccccttgctcccctggtcttctggagtttgtgacattgatttgaaatggatggtgttctcttgagagcaagtgagattgttagaattaagttccaactatacagttttctaacatagctataaggtccttgttgctgtttgtgataactgatagataactcattggaaacgtgcatacatttatattcagatgaaattatggtttgcactgtctattaaatatctcgattaattttca

SEQ ID NO: 432035 - DNA, 1463 bp, Homo sapiens
tcacccccaggtagaagtaatccacacagaacttctagaaaaagcgaggcaatttgatgtggcatgagagagaaccctgggggcagtgcatgaccagctgtggtcacctccctctcccatgtataaagagggaacggcctcctcaagtagagtcagctgcctagagtcctgtgtaggcagaggccgtccagcaagcctcctggagctgtgtggccatgagtcaagccacttgaggtggagttgggggttggcaaggattagatctcttctggggttcttcccactctcctcccaccttgcaggctctgggaccgaagccttgtgggaatcctgagggcctctgtgtagaatccttgttttgtctgggcctgctggaggcggagggtgggtgctgccaaactgtgcttggttttccagagttgtatgttgcagcttttaggcaccaaggagcagtctccctacagcctggagaggagtctggccacagggcagggctgtttgacagacaccatggagcacaggcagccctcatttccggccagaacatgttgaacgcaccagtcatcctaaatagccttttctgtcttcacacagccaagaagaaagaagaggaggacgacgacatgaaggaattggagaactgggctggatccatgtaatggggtccagcgctggctgggcccagacagactgtggtggcctgcgcagcgagcaggcgtgtgcgtgtgtggggcaggcaggatgtggtgcaggcaggttccatcgctttcgactctcactccaaagcagtagggccgcgttgctgctcactctctgcatagcatggtctgcacctgggagatgggcggggggaggggggcgggcggggtgggaagtgcctgctgtttataatgttgaatttctgtaaaataaactgtatttgcaaatccaacattgagcttctggactacgctgactccactgctgaatcctcaatggaaagggtcgactggttgcagttgaaatgacctgaaatgtagcctctgtccttgtaagtcagttgacttgccgcacatctctttgtgtacttgtacggtactggcagaaaagtcatttttcaaaagccataggcttttccttgcccttagctgtaataatgcatctgattttgatttcctccagagctgtgtttctgtccatcacctgtgtattggccctgtgtttaccactctggcccactcctcacccccttgctcccctggtcttctggagtttgtgacattgatttgaaatggatggtgttctcttgagagcaagtgagattgttagaattaagttccaactatacagttttctaacatagctataaggtccttgttgctgtttgtgataactgatagataactcattggaaacgtgcatacatttatattcagatgaaattatggtttgcactgtctattaaatatctcgattaattttca

SEQ ID NO: 432036 - DNA, 912 bp, Homo sapiens
  misc_feature (2)..(2): n is a, c, g, or t
  misc_feature (84)..(84): n is a, c, g, or t
  misc_feature (105)..(105): n is a, c, g, or t
  misc_feature (118)..(118): n is a, c, g, or t
  misc_feature (181)..(181): n is a, c, g, or t
  misc_feature (188)..(188): n is a, c, g, or t
  misc_feature (196)..(196): n is a, c, g, or t
  misc_feature (199)..(199): n is a, c, g, or t
  misc_feature (214)..(214): n is a, c, g, or t
  misc_feature (216)..(216): n is a, c, g, or t
cnccctcaagcctttctccaatgcctcccaggaggatttggggactttctccctggggcgcccagatccagctcggaggcctcnctgggacctggcaaggcctgncctcccgcccaancttgcttctgtagctccccctcgaggaagtgaggtgtttaattttgcatgttttctggcatgnattaagncccttatnctngtatatatgagtgtncngtttgttctcactccaaagcagtagggccgcgttgctgctcactctctgcatagcatggtctgcacctgggagatgggcggggggaggggggcgggcggggtgggaagtgcctgctgtttataatgttgaatttctgtaaaataaactgtatttgcaaatccaacattgagcttctggactacgctgactccactgctgaatcctcaatggaaagggtcgactggttgcagttgaaatgacctgaaatgtagcctctgtccttgtaagtcagttgacttgccgcacatctctttgtgtacttgtacggtactggcagaaaagtcatttttcaaaagccataggcttttccttgcccttagctgtaataatgcatctgattttgatttcctccagagctgtgtttctgtccatcacctgtgtattggccctgtgtttaccactctggcccactcctcacccccttgctcccctggtcttctggagtttgtgacattgatttgaaatggatggtgttctcttgagagcaagtgagattgttagaattaagttccaactatacagttttctaacatagctataaggtccttgttgctgtttgtgataactgatagataactcattggaaacgtgcatacatttatattcagatgaaattatggtttgcactgtctattaaatatctcgattaattttca

SEQ ID NO: 432037 - DNA, 915 bp, Homo sapiens
gctgcggggcggaggcggaggcggaggagaggcctgcggcggcagggagcggcgggactgggagcgggcgccggagccgacccgagccgagccgagccgagccgagccggagcgggcggcgaaggccggcgcggcgagcagcaaccatgtcggtgttcgggaagctgttcggggctggagggggtaaggccggcaagggcggcccgaccccccaggaggccatccagcggctgcgggacacggaagagatgttaagcaagaaacaggagttcctggagaagaaaatcgagcaggagctgacggccgccaagaagcacggcaccaaaaacaagcgcgcggccctccaggcactgaagcgtaagaagaggtatgagaagcagctggcgcagatcgacggcacattatcaaccatcgagttccagcgggaggccctggagaatgccaacaccaacaccgaggtgctcaagaacatgggctatgccgccaaggccatgaaggcggcccatgacaacatggacatcgataaagttgatgagttaatgcaggacattgctgaccagcaagaacttgcagaggagatttcaacagcaatttcgaaacctgtagggtttggagaagagtttgacgaggatgagctcatggcggaattagaagaactagaacaggaggaactagacaagaatttgctggaaatcagtggacccgaaacagtccctctaccaaatgttccctctatagccctaccatcaaaacccgccaagaagaaagaagaggaggacgacgacatgaaggaattggagaactgggcgacttgtcacagcaggtgaacaggctaccgagcacatgatttatcgaaggtcgagcctcaggtacacacaggagtcggggtcagaggaacagagggggatactctaa

SEQ ID NO: 432038 - DNA, 1015 bp, Homo sapiens
  misc_feature (971)..(971): n is a, c, g, or t
gctgcggggcggaggcggaggcggaggagaggcctgcggcggcagggagcggcgggactgggagcgggcgccggagccgacccgagccgagccgagccgagccgagccggagcgggcggcgaaggccggcgcggcgagcagcaaccatgtcggtgttcgggaagctgttcggggctggagggggtaaggccggcaagggcggcccgaccccccaggaggccatccagcggctgcgggacacggaagagatgttaagcaagaaacaggagttcctggagaagaaaatcgagcaggagctgacggccgccaagaagcacggcaccaaaaacaagcgcgcggccctccaggcactgaagcgtaagaagaggtatgagaagcagctggcgcagatcgacggcacattatcaaccatcgagttccagcgggaggccctggagaatgccaacaccaacaccgaggtgctcaagaacatgggctatgccgccaaggccatgaaggcggcccatgacaacatggacatcgataaagttgatgagttaatgcaggacattgctgaccagcaagaacttgcagaggagatttcaacagcaatttcgaaacctgtagggtttggagaagagtttgacgaggatgagctcatggcggaattagaagaactagaacaggaggaactagacaagaatttgctggaaatcagtggacccgaaacagtccctctaccaaatgttccctctatagccctaccatcaaaacccgtggatccatgtaatggggtccagcgctggctgggcccagacagactgtggtggcctgcgcagcgagcaggcgtgtgcgtgtgtggggcaggcaggatgtggtgcaggcaggttccatcgctttcgactctcactccaaagcagtagggccgcgttgctgctcactctctgcatagcatggtctgcacctgggagatgggtccactttgtcttctnttgttcttttttttccctcttttcattctctcttttttcctttc

SEQ ID NO: 432039 - DNA, 1264 bp, Homo sapiens
  misc_feature (964)..(964): n is a, c, g, or t
  misc_feature (1264)..(1264): n is a, c, g, or t
gctgcggggcggaggcggaggcggaggagaggcctgcggcggcagggagcggcgggactgggagcgggcgccggagccgacccgagccgagccgagccgagccgagccggagcgggcggcgaaggccggcgcggcgagcagcaaccatgtcggtgttcgggaagctgttcggggctggagggggtaaggccggcaagggcggcccgaccccccaggaggccatccagcggctgcgggacacggaagagatgttaagcaagaaacaggagttcctggagaagaaaatcgagcaggagctgacggccgccaagaagcacggcaccaaaaacaagcgcgcggccctccaggcactgaagcgtaagaagaggtatgagaagcagctggcgcagatcgacggcacattatcaaccatcgagttccagcgggaggccctggagaatgccaacaccaacaccgaggtgctcaagaacatgggctatgccgccaaggccatgaaggcggcccatgacaacatggacatcgataaagttgatgagttaatgcaggacattgctgaccagcaagaacttgcagaggagatttcaacagcaatttcgaaacctgtagggtttggagaagagtttgacgaggatgagctcatggcggaattagaagaactagaacaggaggaactagacaagaatttgctggaaatcagtggacccgaaacagtccctctaccaaatgttccctctatagccctaccatcaaaacccgtggatccatgtaatggggtccagcgctggctgggcccagacagactgtggtggcctgcgcagcgagcaggcgtgtgcgtgtgtggggcaggcaggatgtggtgcaggcaggttccatcgctttcgactctcactccaaagcagtagggccgcgttgctgctcactctctgcatagcatggtctgcacctgggagatgggccccccccncccccctccccccccccccccccctccctcgtcgcgtttccgctcccctcctccccggcctgcctctccctcctctcgcccctcctctctccgcccttccctgtccgcggtccctctcgccggccgtgtgcgcctcgtctccctcgtcttccgcgtcccgcctcctcgtctctcctggctcctgccccgctctctcgccgtcccttcctgcgcttcgcctctcgctcgctctgttcgttcttcttctcctcctccttcctcctgcctcctccctgctctcctctctgtcccctctgcccn

SEQ ID NO: 432040 - DNA, 775 bp, Homo sapiens
gctgcggggcggaggcggaggcggaggagaggcctgcggcggcagggagcggcgggactgggagcgggcgccggagccgacccgagccgagccgagccgagccgagccggagcgggcggcgaaggccggcgcggcgagcagcaaccatgtcggtgttcgggaagctgttcggggctggagggggtaaggccggcaagggcggcccgaccccccaggaggccatccagcggctgcgggacacggaagagatgttaagcaagaaacaggagttcctggagaagaaaatcgagcaggagctgacggccgccaagaagcacggcaccaaaaacaagcgcgcggccctccaggcactgaagcgtaagaagaggtatgagaagcagctggcgcagatcgacggcacattatcaaccatcgagttccagcgggaggccctggagaatgccaacaccaacaccgaggtgctcaagaacatgggctatgccgccaaggccatgaaggcggcccatgacaacatggacatcgataaagttgatgagttaatgcaggacattgctgaccagcaagaacttgcagaggagatttcaacagcaatttcgaaacctgtagggtttggagaagagtttgacgaggatgagctcatggcggaattagaagaactagaacaggaggaactagacaagaatttgctggaaatcagtggacccgaaacagtccctctaccaaatgttccctctatagccctaccatcaaaacccggctgaagatgacttctaga

SEQ ID NO: 432041 - DNA, 817 bp, Homo sapiens
gctgcggggcggaggcggaggcggaggagaggcctgcggcggcagggagcggcgggactgggagcgggcgccggagccgacccgagccgagccgagccgagccgagccggagcgggcggcgaaggccggcgcggcgagcagcaaccatgtcggtgttcgggaagctgttcggggctggagggggtaaggccggcaagggcggcccgaccccccaggaggccatccagcggctgcgggacacggaagagatgttaagcaagaaacaggagttcctggagaagaaaatcgagcaggagctgacggccgccaagaagcacggcaccaaaaacaagcgcgcggccctccaggcactgaagcgtaagaagaggtatgagaagcagctggcgcagatcgacggcacattatcaaccatcgagttccagcgggaggccctggagaatgccaacaccaacaccgaggtgctcaagaacatgggctatgccgccaaggccatgaaggcggcccatgacaacatggacatcgataaagttgatgagttaatgcaggacattgctgaccagcaagaacttgcagaggagatttcaacagcaatttcgaaacctgtagggtttggagaagagtttgacgaggatgagctcatggcggaattagaagaactagaacaggaggaactagacaagaatttgctggaaatcagtggacccgaaacagtccctctaccaaatgttccctctatagccctaccatcaaaacccgccaagaagaaagaagagggggtttgtgggtgaggcctctagcggcacccggggtatcctct

SEQ ID NO: 432042 - DNA, 687 bp, Homo sapiens
gctgcggggcggaggcggaggcggaggagaggcctgcggcggcagggagcggcgggactgggagcgggcgccggagccgacccgagccgagccgagccgagccgagccggagcgggcggcgaaggccggcgcggcgagcagcaaccatgtcggtgttcgggaagctgttcggggctggagggggtaaggccggcaagggcggcccgaccccccaggaggccatccagcggctgcgggacacggaagagatgttaagcaagaaacaggagttcctggagaagaaaatcgagcaggagctgacggccgccaagaagcacggcaccaaaaacaagcgcgcggccctccaggcactgaagcgtaagaagaggtatgagaagcagctggcgcagatcgacggcacattatcaaccatcgagttccagcgggaggccctggagaatgccaacaccaacaccgaggtgctcaagaacatgggctatgccgccaaggccatgaaggcggcccatgacaacatggacatcgataaagttgatgagttaatgcaggacattgctgaccagcaagaacttgcagaggagatttcaagagatgttggaaggagggatgagatgttggaaggaggaatgagatgttggaaggagccatgagatgttggaaggagcctgagatgttgaaggtaccggccac

SEQ ID NO: 432043 - DNA, 1305 bp, Homo sapiens
ggaaacactaatgtgtgattttaagtagataatacaaaggccctataaaccgtaccatatctgatggagtcggctgtggcatgggcctttctctttgagggagtgagttgtgtgtccttggaaggcatttcccattgcccagtttcattctctttaagagcccctgttgggcaaatgggagggttgcgacaagattgaaatcccttttccatggtcacagccctcagtgtgtaacaggacatctccgcaaccctcaaacaggttaatcccacacaggggcctggctgactttccctcttctctggattccaactagggatagagaagtggaggtatgaccttagcacagaggcattgccactttgggaagaagaaagtgcctcacggccacagcagtgctaagggaagtggcaccctgaccaagcatgcgggtgaagtcatcagctggtgtgcggcgggagggcgcagatctcagatagcagctccctgttgattgctcagcttcattcttgggttctgagaataagccatgggcggaggcacttctgtaagaggaagcagcttcattaaaatcttgggaaattttaatttgcattcaccttctctaaacatgaacatgaatctgtaaagtgatacattctttcttgcttaagaaattaaagcgtttggggatttgagtttttatactctttgaaaattgagtttcttgtgctaaaatcatcattcacaaaatgtcctctcacctgaggaattccaacacagcaaattcaatctgaaataaattgaggctacatttaagagacgggacttccagctaaaaataggtattagagagctgtttttgccaaaaaattgaatacttaaccttattcttcactcttgactcatttgttttgtctcagttctgggtgaactggagggttttctttctttgtattttcatttttgtattcattttcttaatgcgattgaattagatcaacattttatgccttctcttcccgtaacttgcattcacatagacctgatatatgtatgagcctaaatctttgtggttaacacttattattgctttggaataactgtccatatatggaatgattcattcggttggtataaccatttacagggttcttgatacacatttccaaattaacttctaaaaggttttacatgaaaactcttcccatccatagccatcaccagtttcacctcacacacttgctaatgctattaatattattgttagaatttatgctaatctgatgagcgataaaaatgcctcatgttttgtttatttggatt

SEQ ID NO: 432044 - DNA, 913 bp, Homo sapiens
aggaattgggaacaaattgaccctggtttggagccacaactctgctgcttgttctctgtgtgatcccaggcaaatcgttgcgtctttctgagcttttaaaaaatccaagaagatcccagcctatgcggagacaaaccctccatctcagctgtcaccgtggagctgagcaaagaaacactggacaccatgttagatggcctgggccgcatccgagaccaactctctgccgtggccagtaaatgatccagccagctgccagggccactgccatgacccagctgctcatgagtgataaatgtctccccatatgcaggctgcccttgcagctgcagctgacaacaggcaggatggtggggacagcagggggctactgccatccagaagttacagttggattgggaagaagcagccagatcccccgctgttctcactcatcttctttctctttctgaagctggagagcagaagcccccatctttgaaaagctcctgagtgcaacttaattaccaccatggcagggtgagggaacatttgcatcgtcagctgcctctgcatagctgtttgagaaattcaggcccaaatcatgcagcctatccaataagtaagtttatttccaacattagctctaattagttcatttccaatcccagaacacatggagggaatcggacaggtgatgccagcagttcctgctcctctgtcagggaagccaggcagagcccacagagcatggtccatccagagtgttccctgagccccctccaccatactggaacccctcttcagtgtaggaagtctgaaatgggtgctaattcccttcttcatgaaaccagggccctcttccttcatctaatgcagccactcctaggtgaagaagtgggaataattggaaataaacaacagttctaaaact

SEQ ID NO: 432045 - DNA, 904 bp, Homo sapiens
acctcgcttccctgggtgccacggtcagcgggacttcggcaagatggctgccctgacagcggagcattttgcagcactccagagcctgctcaagaatgccgtataaatggaataatacagcctcctcgaaagatgttgtcagacagctgtgtcaagaaagcttttccagttcagcccttggcttgaaaaaactcttggatgttacatgttccagcttgtctgtgacccaggaggaggcagaggaactgctccaggctctgcaccgcctcactaggctggtggcattccgtgacctgtcctctgccgaggcaattctggctctctttccagaaaatttccaccaaaacctcaaaaacctgctgacaaagatcatcctagaacatgtgtctacttggagaaccgaagcccaggcaaatcagatctctctgccacgcctggtcgatctggactggagagtggatatcaaaactgaaaagctcctgagtgcaacttaattaccaccatggcagggtgagggaacatttgcatcgtcagctgcctctgcatagctgtttgagaaattcaggcccaaatcatgcagcctatccaataagtaagtttatttccaacattagctctaattagttcatttccaatcccagaacacatggagggaatcggacaggtgatgccagcagttcctgctcctctgtcagggaagccaggcagagcccacagagcatggtccatccagagtgttccctgagccccctccaccatactggaacccctcttcagtgtaggaagtctgaaatgggtgctaattcccttcttcatgaaaccagggccctcttccttcatctaatgcagccactcctaggtgaagaagtgggaataattggaaataaacaacagttctaaaact

SEQ ID NO: 432046 - DNA, 1310 bp, Homo sapiens
acctcgcttccctgggtgccacggtcagcgggacttcggcaagatggctgccctgacagcggagcattttgcagcactccagagcctgctcaaggcctcctcgaaagatgttgtcagacagctgtgtcaagaaagcttttccagttcagcccttggcttgaaaaaactcttggatgttacatgttccagcttgtctgtgacccaggaggaggcagaggaactgctccaggctctgcaccgcctcactaggctggtggcattccgtgacctgtcctctgccgaggcaattctggctctctttccagaaaatttccaccaaaacctcaaaaacctgctgacaaagatcatcctagaacatgtgtctacttggagaaccgaagcccaggcaaatcagatctctctgccacgcctggtcgatctggactggagagtggatatcaaaacctcctcagacagcatcagccgcatggccgtccccacctgcctgctccagatgaagatccaagaagatcccagcctatgcggagacaaaccctccatctcagctgtcaccgtggagctgagcaaagaaacactggacaccatgttagatggcctgggccgcatccgagaccaactctctgccgtggccagtaaatgatccagccagctgccagggccactgccatgacccagctgctcatgagtgataaatgtctccccatatgcaggctgcccttgcagctgcagctgacaacaggcaggatggtggggacagcagggggctactgccatccagaagttacagttggattgggaagaagcagccagatcccccgctgttctcactcatcttctttctctttctgaagctggagagcagaagcccccatctttgaaaagctcctgagtgcaacttaattaccaccatggcagggtgagggaacatttgcatcgtcagctgcctctgcatagctgtttgagaaattcaggcccaaatcatgcagcctatccaataagtaagtttatttccaacattagctctaattagttcatttccaatcccagaacacatggagggaatcggacaggtgatgccagcagttcctgctcctctgtcagggaagccaggcagagcccacagagcatggtccatccagagtgttccctgagccccctccaccatactggaacccctcttcagtgtaggaagtctgaaatgggtgctaattcccttcttcatgaaaccagggccctcttccttcatctaatgcagccactcctaggtgaagaagtgggaataattggaaataaacaacagttctaaaact

SEQ ID NO: 432047 - DNA, 559 bp, Homo sapiens
aagcaggctggtacggtcggaggtttaggattccaataagtaagtttattggataggctgcatgatttgggcctgaatttctcaaacagctatgcagaggcagctgacgatgcaaatgttccctcaccctgccatggtggtaattaagttgcactcaggagcttttcaaagatgggggcttctgctctccagcttcagaaagagaaagaagatgagtgagaacagcgggggatctggctgccaataagtaagtttatttccaacattagctctaattagttcatttccaatcccagaacacatggagggaatcggacaggtgatgccagcagttcctgctcctctgtcagggaagccaggcagagcccacagagcatggtccatccagagtgttccctgagccccctccaccatactggaacccctcttcagtgtaggaagtctgaaatgggtgctaattcccttcttcatgaaaccagggccctcttccttcatctaatgcagccactcctaggtgaagaagtgggaataattggaaataaacaacagttctaaaact

SEQ ID NO: 432048 - DNA, 661 bp, Homo sapiens
tccagatacgtaacgtgtgatcgtatagcgctgcctgatttggagaccagcatcgtctcactgcaggctcctgacaaatcgcatgtctgatcgcagtggcaggatgttgcgcctcacccgtacccataggtgggttaactctaaggttcgctcctcgaccgtaggcgtcttatcacaaagactgagagagcgtctgtctgtctactccaagacattcagcaactgtaggaccagaagcactgagtgagaacagcgggggatctggctgccaataagtaagtttatttccaacattagctctaattagttcatttccaatcccagaacacatggagggaatcggacaggtgatgccagcagttcctgctcctctgtcagggaagccaggcagagcccacagagcatggtccatccagagtgttccctgagccccctccaccatactggaacccctcttcagtgtaggaagtctgaaatgggtgctaattcccttcttcatgaaaccagggccctcttccttcatctaatgcagccactcctaggtgaagaagtgggaacataccacaacaggttcctaaggacgtgtcaaaccacaccaggaaagccaaaacagacccctatggcatccagaccgagagcacgaacggcgcaagcgcgggcc

SEQ ID NO: 432049 - DNA, 1335 bp, Homo sapiens
acctcgcttccctgggtgccacggtcagcgggacttcggcaagatggctgccctgacagcggagcattttgcagcactccagagcctgctcaagaatgccgtataaatggaataatacagcctcctcgaaagatgttgtcagacagctgtgtcaagaaagcttttccagttcagcccttggcttgaaaaaactcttggatgttacatgttccagcttgtctgtgacccaggaggaggcagaggaactgctccaggctctgcaccgcctcactaggctggtggcattccgtgacctgtcctctgccgaggcaattctggctctctttccagaaaatttccaccaaaacctcaaaaacctgctgacaaagatcatcctagaacatgtgtctacttggagaaccgaagcccaggcaaatcagatctctctgccacgcctggtcgatctggactggagagtggatatcaaaacctcctcagacagcatcagccgcatggccgtccccacctgcctgctccagatgaagatccaagaagatcccagcctatgcggagacaaaccctccatctcagctgtcaccgtggagctgagcaaagaaacactggacaccatgttagatggcctgggccgcatccgagaccaactctctgccgtggccagtaaatgatccagccagctgccagggccactgccatgacccagctgctcatgagtgataaatgtctccccatatgcaggctgcccttgcagctgcagctgacaacaggcaggatggtggggacagcagggggctactgccatccagaagttacagttggattgggaagaagcagccagatcccccgctgttctcactcatcttctttctctttctgaagctggagagcagaagcccccatctttgaaaagctcctgagtgcaacttaattaccaccatggcagggtgagggaacatttgcatcgtcagctgcctctgcatagctgtttgagaaattcaggcccaaatcatgcagcctatccaataagtaagtttatttccaacattagctctaattagttcatttccaatcccagaacacatggagggaatcggacaggtgatgccagcagttcctgctcctctgtcagggaagccaggcagagcccacagagcatggtccatccagagtgttccctgagccccctccaccatactggaacccctcttcagtgtaggaagtctgaaatgggtgctaattcccttcttcatgaaaccagggccctcttccttcatctaatgcagccactcctaggtgaagaagtgggaataattggaaataaacaacagttctaaaact

SEQ ID NO: 432050 - DNA, 1275 bp, Homo sapiens
acctcgcttccctgggtgccacggtcagcgggacttcggcaagatggctgccctgacagcggagcattttgcagcactccagagcctgctcaaggcctcctcgaaagatgttgtcagacagctgtgtcaagaaagcttttccagttcagcccttggcttgaaaaaactcttggatgttacatgttccagcttgtctgtgacccaggaggaggcagaggaactgctccaggctctgcaccgcctcactaggctggtggcattccgtgacctgtcctctgccgaggcaattctggctctctttccagaaaatttccaccaaaacctcaaaaacctgctgacaaagatcatcctagaacatgttctctctgccacgcctggtcgatctggactggagagtggatatcaaaacctcctcagacagcatcagccgcatggccgtccccacctgcctgctccagatgaagatccaagaagatcccagcctatgcggagacaaaccctccatctcagctgtcaccgtggagctgagcaaagaaacactggacaccatgttagatggcctgggccgcatccgagaccaactctctgccgtggccagtaaatgatccagccagctgccagggccactgccatgacccagctgctcatgagtgataaatgtctccccatatgcaggctgcccttgcagctgcagctgacaacaggcaggatggtggggacagcagggggctactgccatccagaagttacagttggattgggaagaagcagccagatcccccgctgttctcactcatcttctttctctttctgaagctggagagcagaagcccccatctttgaaaagctcctgagtgcaacttaattaccaccatggcagggtgagggaacatttgcatcgtcagctgcctctgcatagctgtttgagaaattcaggcccaaatcatgcagcctatccaataagtaagtttatttccaacattagctctaattagttcatttccaatcccagaacacatggagggaatcggacaggtgatgccagcagttcctgctcctctgtcagggaagccaggcagagcccacagagcatggtccatccagagtgttccctgagccccctccaccatactggaacccctcttcagtgtaggaagtctgaaatgggtgctaattcccttcttcatgaaaccagggccctcttccttcatctaatgcagccactcctaggtgaagaagtgggaataattggaaataaacaacagttctaaaact

SEQ ID NO: 432051 - DNA, 1255 bp, Homo sapiens
acctcgcttccctgggtgccacggtcagcgggacttcggcaagatggctgccctgacagcggagcattttgcagcactccagagcctgctcaaggcctcctcgaaagatgttgtcagacagctgtgtcaagaaagcttttccagttcagcccttggcttgaaaaaactcttggatgttacatgttccagcttgtctgtgacccaggaggaggcagaggaactgctccaggctctgcaccgcctcactaggctggtggcattccgtgacctgtcctctgccgaggcaattctggctctctttccagaaaatttccaccaaaacctcaaaaacctgctgacaaagatcatcctagaacatgtgtctacttggagaaccgaagcccaggcaaatcagatctctctgccacgcctggtcgatctggactggagagtggatatcaaaacatccaagaagatcccagcctatgcggagacaaaccctccatctcagctgtcaccgtggagctgagcaaagaaacactggacaccatgttagatggcctgggccgcatccgagaccaactctctgccgtggccagtaaatgatccagccagctgccagggccactgccatgacccagctgctcatgagtgataaatgtctccccatatgcaggctgcccttgcagctgcagctgacaacaggcaggatggtggggacagcagggggctactgccatccagaagttacagttggattgggaagaagcagccagatcccccgctgttctcactcatcttctttctctttctgaagctggagagcagaagcccccatctttgaaaagctcctgagtgcaacttaattaccaccatggcagggtgagggaacatttgcatcgtcagctgcctctgcatagctgtttgagaaattcaggcccaaatcatgcagcctatccaataagtaagtttatttccaacattagctctaattagttcatttccaatcccagaacacatggagggaatcggacaggtgatgccagcagttcctgctcctctgtcagggaagccaggcagagcccacagagcatggtccatccagagtgttccctgagccccctccaccatactggaacccctcttcagtgtaggaagtctgaaatgggtgctaattcccttcttcatgaaaccagggccctcttccttcatctaatgcagccactcctaggtgaagaagtgggaataattggaaataaacaacagttctaaaact

SEQ ID NO: 432052 - DNA, 1190 bp, Homo sapiens
acctcgcttccctgggtgccacggtcagcgggacttcggcaagatggctgccctgacagcggagcattttgcagcactccagagcctgctcaaggcctcctcgaaagatgttgtcagacagctgtgtcaagaaagcttttccagttcagcccttggcttgaaaaaactcttggatgttacatgttccagcttgtctgtgacccaggaggaggcagaggaactgctccaggctctgcaccgcctcactaggctggtggcattccgtgacctgtcctctgccgaggcaattctggctctctttccagaaaatttccaccaaaacctcaaaaacctgctgacaaagatcatcctagaacatgtgtctacttggagaaccgaagcccaggcaaatcagatctctctgccacgcctggtcgatctggactggagagtggatatcaaaacctcctcagacagcatcagccgcatggccgtccccacctgcctgctccagatgaagatccaagaagatcccagcctatgcggagacaaaccctccatctcagctgtcaccgtggagctgagcaaagaaacactggacaccatgttagatggcctgggccgcatccgagaccaactctctgccgtggccagtaaatgatccagccagctgccagggccactgccatgacccagctgctcatgagtgataaatgtctccccatatgcaggctgcccttgcagctgcagctgacaacaggcaggatggtggggacagcagggggctactgccatccagaagttacagttggattgggaagaagcagccagatcccccgctgttctcactcatcttctttctctttctgaagctggagagcagaagcccccatctttgaaaagctcctgagtgcaacttaattaccaccatggcagggtgagggaacaaacacatggagggaatcggacaggtgatgccagcagttcctgctcctctgtcagggaagccaggcagagcccacagagcatggtccatccagagtgttccctgagccccctccaccatactggaacccctcttcagtgtaggaagtctgaaatgggtgctaattcccttcttcatgaaaccagggccctcttccttcatctaatgcagccactcctaggtgaagaagtgggaataattggaaataaacaacagttctaaaact

SEQ ID NO: 432053 - DNA, 1206 bp, Homo sapiens
acctcgcttccctgggtgccacggtcagcgggacttcggcaagatggctgccctgacagcggagcattttgcagcactccagagcctgctcaaggcctcctcgaaagatgttgtcagacagctgtgtcaagaaagcttttccagttcagcccttggcttgaaaaaactcttggatgttacatgttccagcttgtctgtgacccaggaggaggcagaggaactgctccaggctctgcaccgcctcactaggctggtggcattccgtgacctgtcctctgccgaggcaattctggctctctttccagaaaatttccaccaaaacctcaaaaacctgctgacaaagatcatcctagaacatgtgtctacttggagaaccgaagcccaggcaaatcagatctctctgccacgcctggtcgatctggactggagagtggatatcaaaacctcctcagacagcatcagccgcatggccgtccccacctgcctgctccagatgaagatccaagaagatcccagcctatgcggagacaaaccctccatctcagctgtcaccgtggagctgagcaaagaaacactggacaccatgttagatggcctgggccgcatccgagaccaactctctgccgtggccagtaaatgatccagccagctgccagggccactgccatgacccagctgctcatgagtgataaatgtctccccatatgcaggctgcccttgcagctgcagctgacaacaggcaggatgctggagagcagaagcccccatctttgaaaagctcctgagtgcaacttaattaccaccatggcagggtgagggaacatttgcatcgtcagctgcctctgcatagctgtttgagaaattcaggcccaaatcatgcagcctatccaataagtaagtttatttccaacattagctctaattagttcatttccaatcccagaacacatggagggaatcggacaggtgatgccagcagttcctgctcctctgtcagggaagccaggcagagcccacagagcatggtccatccagagtgttccctgagccccctccaccatactggaacccctcttcagtgtaggaagtctgaaatgggtgctaattcccttcttcatgaaaccagggccctcttccttcatctaatgcagccactcctaggtgaagaagtgggaataattggaaataaacaacagttctaaaact

SEQ ID NO: 432054 - DNA, 879 bp, Homo sapiens
acctcgcttccctgggtgccacggtcagcgggacttcggcaagatggctgccctgacagcggagcattttgcagcactccagagcctgctcaaggcctcctcgaaagatgttgtcagacagctgtgtcaagaaagcttttccagttcagcccttggcttgaaaaaactcttggatgttacatgttccagcttgtctgtgacccaggaggaggcagaggaactgctccaggctctgcaccgcctcactaggctggtggcattccgtgacctgtcctctgccgaggcaattctggctctctttccagaaaatttccaccaaaacctcaaaaacctgctgacaaagatcatcctagaacatgtgtctacttggagaaccgaagcccaggcaaatcagatctctctgccacgcctggtcgatctggactggagagtggatatcaaaactgaaaagctcctgagtgcaacttaattaccaccatggcagggtgagggaacatttgcatcgtcagctgcctctgcatagctgtttgagaaattcaggcccaaatcatgcagcctatccaataagtaagtttatttccaacattagctctaattagttcatttccaatcccagaacacatggagggaatcggacaggtgatgccagcagttcctgctcctctgtcagggaagccaggcagagcccacagagcatggtccatccagagtgttccctgagccccctccaccatactggaacccctcttcagtgtaggaagtctgaaatgggtgctaattcccttcttcatgaaaccagggccctcttccttcatctaatgcagccactcctaggtgaagaagtgggaataattggaaataaacaacagttctaaaact

SEQ ID NO: 432055 - DNA, 722 bp, Homo sapiens
cccccgggctgcaggaattggcactgagcaaagaaacactggacaccatgttagatggcctgggccgcatccgagaccaactctctgccgtggccagtaaatgatccagccagctgccagggccactgccatgacccagctgctcatgagtgataaatgtctccccatatgcaggctgcccttgcagctgcagctgacaacaggcaggatggtggggacagcagggggctactgccatccagaagttacagttggattgggaagaagcagccagatcccccgctgttctcactcatcttctttctctttctgaagctggagagcagaagcccccatctttttgcatcgtcagctgcctctgcatagctgtttgagaaattcaggcccaaatcatgcagcctatccaataagtaagtttatttccaacattagctctaattagttcatttccaatcccagaacacatggagggaatcggacaggtgatgccagcagttcctgctcctctgtcagggaagccaggcagagcccacagagcatggtccatccagagtgttccctgagccccctccaccatactggaacccctcttcagtgtaggaagtctgaaatgggtgctaattcccttcttcatgaaaccagggccctcttccttcatctaatgcagccactcctaggtgaagaagtgggaataattggaaataaacaacagttctaaaact

SEQ ID NO: 432056 - DNA, 375 bp, Homo sapiens
  misc_feature (34)..(35): n is a, c, g, or t
tggaagtgtgatgaattgtaattattttgggggnngggggtcggcgcgcatccgggccaataagtaagtttatttccaacattagctctaattagttcatttccaatcccagaacacatggagggaatcggacaggtgatgccagcagttcctgctcctctgtcagggaagccaggcagagcccacagagcatggtccatccagagtgttccctgagccccctccaccatactggaacccctcttcagtgtaggaagtctgaaatgggtgctaattcccttcttcatgaaaccagggccctcttccttcatctaatgcagccactcctaggtgaagaagtgggaataattggaaataaacaacagttctaaaact

SEQ ID NO: 432057 - DNA, 1279 bp, Homo sapiens
aggctgtaccggtcggagtcgttggatgcggagcattttgcagcactccagagcctgctcaaggcctcctcgaaagatgttgtcagacagctgtgtcaagaaagcttttccagttcagcccttggcttgaaaaaactcttggatgttacatgttccagcttgtctgtgacccaggaggaggcagaggaactgctccaggctctgcaccgcctcactaggctggtggcattccgtgacctgtcctctgccgaggcaattctggctctctttccagaaaatttccaccaaaacctcaaaaacctgctgacaaagatcatcctagaacatgtgtctacttggagaaccgaagcccaggcaaatcagatctctctgccacgcctggtcgatctggactggagagtggatatcaaaacctcctcagacagcatcagccgcatggccgtccccacctgcctgctccagatgaagatccaagaagatcccagcctatgcggagacaaaccctccatctcagctgtcaccgtggagctgagcaaagaaacactggacaccatgttagatggcctgggccgcatccgagaccaactctctgccgtggccagtaaatgatccagccagctgccagggccactgccatgacccagctgctcatgagtgataaatgtctccccatatgcaggctgcccttgcagctgcagctgacaacaggcaggatggtggggacagcagggggctactgccatccagaagttacagttggattgggaagaagcagccagatcccccgctgttctcactcatcttctttctctttctgaagctggagagcagaagcccccatctttgaaaagctcctgagtgcaacttaattaccaccatggcagggtgagggaacatttgcatcgtcagctgcctctgcatagctgtttgagaaattcaggcccaaatcatgcagcctatccaataagtaagtttatttccaacattagctctaattagttcatttccaatcccagaacacatggagggaatcggacaggtgatgccagcagttcctgctcctctgtcagggaagccaggcagagcccacagagcatggtccatccagagtgttccctgagccccctccaccatactggaacccctcttcagtgtaggaagtctgaaatgggtgctaattcccttcttcatgaaaccagggccctcttccttcatctaatgcagccactcctaggtgaagaagtgggaataattggaaataaacaacagttctaaaact

SEQ ID NO: 432058 - DNA, 1184 bp, Homo sapiens
acctcgcttccctgggtgccacggtcagcgggacttcggcaagatggctgccctgacagcggagcattttgcagcactccagagcctgctcaagctgctccaggctctgcaccgcctcactaggctggtggcattccgtgacctgtcctctgccgaggcaattctggctctctttccagaaaatttccaccaaaacctcaaaaacctgctgacaaagatcatcctagaacatgtgtctacttggagaaccgaagcccaggcaaatcagatctctctgccacgcctggtcgatctggactggagagtggatatcaaaacctcctcagacagcatcagccgcatggccgtccccacctgcctgctccagatgaagatccaagaagatcccagcctatgcggagacaaaccctccatctcagctgtcaccgtggagctgagcaaagaaacactggacaccatgttagatggcctgggccgcatccgagaccaactctctgccgtggccagtaaatgatccagccagctgccagggccactgccatgacccagctgctcatgagtgataaatgtctccccatatgcaggctgcccttgcagctgcagctgacaacaggcaggatggtggggacagcagggggctactgccatccagaagttacagttggattgggaagaagcagccagatcccccgctgttctcactcatcttctttctctttctgaagctggagagcagaagcccccatctttgaaaagctcctgagtgcaacttaattaccaccatggcagggtgagggaacatttgcatcgtcagctgcctctgcatagctgtttgagaaattcaggcccaaatcatgcagcctatccaataagtaagtttatttccaacattagctctaattagttcatttccaatcccagaacacatggagggaatcggacaggtgatgccagcagttcctgctcctctgtcagggaagccaggcagagcccacagagcatggtccatccagagtgttccctgagccccctccaccatactggaacccctcttcagtgtaggaagtctgaaatgggtgctaattcccttcttcatgaaaccagggccctcttccttcatctaatgcagccactcctaggtgaagaagtgggaataattggaaataaacaacagttctaaaact

SEQ ID NO: 432059 - DNA, 1228 bp, Homo sapiens
acctcgcttccctgggtgccacggtcagcgggacttcggcaagatggctgccctgacagcggagcattttgcagcactccagagcctgctcaaggcctcctcgaaagatgttgtcagacagctgtgtcaagaaagcttttccagttcagcccttggcttgaaaaaactcttggatgttacatgttccagcttgtctgtgacccaggaggaggcagaggaactgctccaggctctgcaccgcctcactaggctggtggcattccgtgacctgtcctctgccgaggcaattctggctctctttccagaaaatttccaccaaaacctcaaaaacctgctgacaaagatcatcctagaacatgtgtctacttggagaaccgaagcccaggcaaatcagatctctctgccacgcctggtcgatctggactggagagtggatatcaaaacctcctcagacagcatcagccgcatggccgtccccacctgcctgctccagatgaagatccaagaagatcccagcctatgcggagacaaaccctccatctcagctgtcaccgtggagctgagcaaagaaacactggacaccatgttagatggcctgggccgcatccgagaccaactctctgccgtggccagtaaatgatccagccagctgccagggccactgccatgacccagctgctcatgagtgataaatgtctccccatatgcaggctgcccttgcagctgcagctgacaacaggcaggatggtggggacagcagggggctactgccatccagaagttacagttggattgggaagaagcagccagatcccccgctgttctcactcatcttctttctctttctgaagctggagagcagaagcccccatctttgaaaagctcctgagtgcaacttaattaccaccatggcagggtgagggaacatttgcatcgtcagctgcctctgcatagctgtttgagaaattcaggcccaaatcatgcagcctatccaataagtaagtttatttccaacattagctctaattagttcatttccaatcccagaacacatggagggaatcggacaggtgatgccagcagttcctgctcctctgtcagggaagccaggcagagcccacagagcatggtccatccagagtgttccctgagccccctccaccatactggaaccccgtcgatccccagcccagcggggagtccgtctagagtcgacatcagcatccac

SEQ ID NO: 432060 - DNA, 1206 bp, Homo sapiens
acctcgcttccctgggtgccacggtcagcgggacttcggcaagatggctgccctgacagcggagcattttgcagcactccagagcctgctcaaggcctcctcgaaagatgttgtcagacagctgtgtcaagaaagcttttccagttcagcccttggcttgaaaaaactcttggatgttacatgttccagcttgtctgtgacccaggaggaggcagaggaactgctccaggctctgcaccgcctcactaggctggtggcattccgtgacctgtcctctgccgaggcaattctggctctctttccagaaaatttccaccaaaacctcaaaaacctgctgacaaagatcatcctagaacatgtgtctacttggagaaccgaagcccaggcaaatcagaatccaagaagatcccagcctatgcggagacaaaccctccatctcagctgtcaccgtggagctgagcaaagaaacactggacaccatgttagatggcctgggccgcatccgagaccaactctctgccgtggccagtaaatgatccagccagctgccagggccactgccatgacccagctgctcatgagtgataaatgtctccccatatgcaggctgcccttgcagctgcagctgacaacaggcaggatggtggggacagcagggggctactgccatccagaagttacagttggattgggaagaagcagccagatcccccgctgttctcactcatcttctttctctttctgaagctggagagcagaagcccccatctttgaaaagctcctgagtgcaacttaattaccaccatggcagggtgagggaacatttgcatcgtcagctgcctctgcatagctgtttgagaaattcaggcccaaatcatgcagcctatccaataagtaagtttatttccaacattagctctaattagttcatttccaatcccagaacacatggagggaatcggacaggtgatgccagcagttcctgctcctctgtcagggaagccaggcagagcccacagagcatggtccatccagagtgttccctgagccccctccaccatactggaacccctcttcagtgtaggaagtctgaaatgggtgctaattcccttcttcatgaaaccagggccctcttccttcatctaatgcagccactcctaggtgaagaagtgggaataattggaaataaacaacagttctaaaact

SEQ ID NO: 432061 - DNA, 975 bp, Homo sapiens
acctcgcttccctgggtgccacggtcagcgggacttcggcaagatggctgccctgacagcggagcattttgcagcactccagagcctgctcaaggcctcctcgaaagatgttgtcagacagctgtgtcaagaaagcttttccagttcagcccttggcttgaaaaaactcttggatgttacatgttccagcttgtctgtgacccaggaggaggcagaggaactgctccaggctctgcaccgcctcactaggctggtggcattccgtgacctgtcctctgccgaggcaattctggctctctttccagaaaatttccaccaaaacctcaaaaacctgctgacaaagatcatcctagaacatgtgtctacttggagaaccgaagcccaggcaaatcagatctctctgccacgcctggtcgatctggactggagagtggatatcaaaacctcctcagacagcatcagccgcatggccgtccccacctgcctgctccagatgaagatccaagaagatcccagcctatgcggagacaaaccctccattgaaaagctcctgagtgcaacttaattaccaccatggcagggtgagggaacatttgcatcgtcagctgcctctgcatagctgtttgagaaattcaggcccaaatcatgcagcctatccaataagtaagtttatttccaacattagctctaattagttcatttccaatcccagaacacatggagggaatcggacaggtgatgccagcagttcctgctcctctgtcagggaagccaggcagagcccacagagcatggtccatccagagtgttccctgagccccctccaccatactggaacccctcttcagtgtaggaagtctgaaatgggtgctaattcccttcttcatgaaaccagggccctcttccttcatctaatgcagccactcctaggtgaagaagtgggaataattggaaataaacaacagttctaaaact

SEQ ID NO: 432062 - DNA, 971 bp, Homo sapiens
acctcgcttccctgggtgccacggtcagcgggacttcggcaagatggctgccctgacagcggagcattttgcagcactccagagcctgctcaaggcctcctcgaaagatgttgtcagacagctgtgtcaagaaagcttttccagttcagcccttggcttgaaaaaactcttggatgttacatgttccagcttgtctgtgacccaggaggaggcagaggaactgctccaggctctgcaccgcctcactaggctggtggcattccgtgacctgtcctctgccgaggcaattctggctctctttccagaaaatttccaccaaaacctcaaaaacctgctgacaaagatcatcctagaacatgtgtctacttggagaaccgaagcccaggcaaatcagatctctctgccacgcctggtcgatctggactggagagtggatatcaaaacctcctcagacagcatcagccgcatggccgtccccacctgcctgctccagatgaagatccaagaagatcccagcctatgcggagacaaaccctccatctcagctgtcaccgtggagctgagcaaagaaacactggacaccatgttagatggcctgggccgcatccgagaccaactctctgccgtggccactggagagcagaagcccccatctttgaaaagctcctgagtgcaacttaattaccaccatggcagggtgagggaacaaacacatggagggaatcggacaggtgatgccagcagttcctgctcctctgtcagggaagccaggcagagcccacagagcatggtccatccagagtgttccctgagccccctccaccatactggaacccctcttcagtgtaggaagtctgaaatgggtgctaattcccttcttcatgaaaccagggccctcttccttcatctaatgcagccactcctaggtgaagaagtgggaataattggaaataaacaacagttctaaaact

SEQ ID NO: 432063 - DNA, 362 bp, Homo sapiens
cctagtccatttaactgatggaggaagcctgagaagtaaggtggtcaaactgagcttgcattctactgagtgatggaattgggatatacattctgagtccagtgctcttttccattgtactctgcagtgtgtatctgttttctctccataactgctacgtaagctttgggaagcagggatgatccttatatgtgccaattagaactgcctggtaaatgcttgttaactaatgtcagccattgtgtcatagttacaagagctcatatgttacaccacctccctttcattatctgttcattttttttgtttgtttgttttttggttttttgtttttgtttttgtttttcttttttaaggcagag

SEQ ID NO: 432064 - DNA, 1608 bp, Homo sapiens
  misc_feature (43)..(43): n is a, c, g, or t
tctgccccaccctgtcctctggaacctctgcgagatttagagnaaagaaccagttttcaggcggattgcctcagatcacactatctccacttgcccagccctgtggaagattagcggccatgtattccaatgtgataggaactgtaacctctggaaaaaggaaggtttatcttttgtccttgctgctcattggcttctgggactgcgtgacctgtcacgggagccctgtggacatctgcacagccaagccgcgggacattcccatgaatcccatgtgcatttaccgctccccggagaagaaggcaactgaggatgagggctcagaacagaagatcccggaggccaccaaccggcgtgtctgggaactgtccaaggccaattcccgctttgctaccactttctatcagcacctggcagattccaagaatgacaatgataacattttcctgtcacccctgagtatctccacggcttttgctatgaccaagctgggtgcctgtaatgacaccctccagcaactgatggaggtatttaagtttgacaccatatctgagaaaacatctgatcagatccacttcttctttgccaaactgaactgccgactctatcgaaaagccaacaaatcctccaagttagtatcagccaatcgcctttttggagacaaatcccttaccttcaatgagacctaccaggacatcagtgagttggtatatggagccaagctccagcccctggacttcaaggaaaatgcagagcaatccagagcggccatcaacaaatgggtgtccaataagaccgaaggccgaatcaccgatgtcattccctcggaagccatcaatgagctcactgttctggtgctggttaacaccatttacttcaagggcctgtggaagtcaaagttcagccctgagaacacaaggaaggaactgttctacaaggctgatggagagtcgtgttcagcatctatgatgtaccaggaaggcaagttccgttatcggcgcgtggctgaaggcacccaggtgcttgagttgcccttcaaaggtgatgacatcaccatggtcctcatcttgcccaagcctgagaagagcctggccaaggtggagaaggaactcaccccagaggtgctgcaggagtggctggatgaattggaggagatgatgctggtggtccacatgccccgcttccgcattgaggacggcttcagtttgaaggagcagctgcaagacatgggccttgtcgatctgttcagccctgaaaagtccaaactcccaggtattgttgcagaaggccgagatgacctctatgtctcagatgcattccataaggcatttcttgaggtaaatgaagaaggcagtgaagcagctgcaagtaccgctgttgtgattgctggccgttcgctaaaccccaacagggtgactttcaaggccaacaggcctttcctggtttttataagagaagttcctctgaacactattatcttcatgggcagagtagccaacccttgtgttaagtaaaatgttcttattctttgcacctcttcctatttttggtttgtgaacagaagtaaaaataaatacaaactacttccatctcacattaaaaatggac

SEQ ID NO: 432065 - DNA, 1671 bp, Homo sapiens
  misc_feature (157)..(157): n is a, c, g, or t
ggtgcacgcctatagtcccagctactcgggaggctgaggtaggagaatcgtttgaactcaggaggcagaggttgcaatgagccaagatcgcgccactgcactccagcctgggtgacagagcgagaccgtctcaaaaagaaagaagtgactagggttnaaagaaccagttttcaggcggattgcctcagatcacactatctccacttgcccagccctgtggaagattagcggccatgtattccaatgtgataggaactgtaacctctggaaaaagctgtcacgggagccctgtggacatctgcacagccaagccgcgggacattcccatgaatcccatgtgcatttaccgctccccggagaagaaggcaactgaggatgagggctcagaacagaagatcccggaggccaccaaccggcgtgtctgggaactgtccaaggccaattcccgctttgctaccactttctatcagcacctggcagattccaagaatgacaatgataacattttcctgtcacccctgagtatctccacggcttttgctatgaccaagctgggtgcctgtaatgacaccctccagcaactgatggaggtatttaagtttgacaccatatctgagaaaacatctgatcagatccacttcttctttgccaaactgaactgccgactctatcgaaaagccaacaaatcctccaagttagtatcagccaatcgcctttttggagacaaatcccttaccttcaatgagacctaccaggacatcagtgagttggtatatggagccaagctccagcccctggacttcaaggaaaatgcagagcaatccagagcggccatcaacaaatgggtgtccaataagaccgaaggccgaatcaccgatgtcattccctcggaagccatcaatgagctcactgttctggtgctggttaacaccatttacttcaagggcctgtggaagtcaaagttcagccctgagaacacaaggaaggaactgttctacaaggctgatggagagtcgtgttcagcatctatgatgtaccaggaaggcaagttccgttatcggcgcgtggctgaaggcacccaggtgcttgagttgcccttcaaaggtgatgacatcaccatggtcctcatcttgcccaagcctgagaagagcctggccaaggtggagaaggaactcaccccagaggtgctgcaggagtggctggatgaattggaggagatgatgctggtggtccacatgccccgcttccgcattgaggacggcttcagtttgaaggagcagctgcaagacatgggccttgtcgatctgttcagccctgaaaagtccaaactcccaggtattgttgcagaaggccgagatgacctctatgtctcagatgcattccataaggcatttcttgaggtaaatgaagaaggcagtgaagcagctgcaagtaccgctgttgtgattgctggccgttcgctaaaccccaacagggtgactttcaaggccaacaggcctttcctggtttttataagagaagttcctctgaacactattatcttcatgggcagagtagccaacccttgtgttaagtaaaatgttcttattctttgcacctcttcctatttttggtttgtgaacagaagtaaaaataaatacaaactacttccatctcacattaaaaatggac

SEQ ID NO: 432066 - DNA, 1669 bp, Homo sapiens
  misc_feature (157)..(157): n is a, c, g, or t
ggtgcacgcctatagtcccagctactcgggaggctgaggtaggagaatcgtttgaactcaggaggcagaggttgcaatgagccaagatcgcgccactgcactccagcctgggtgacagagcgagaccgtctcaaaaagaaagaagtgactagggttnaaagaaccagttttcaggcggattgcctcagatcacactatctccacttgcccagccctgtggaagattagcggccatgtattccaatgtgataggaactgtaacctctggaaaaaggaaggtttatcttttgtccttgctgctcattggcttctgggactgcgtgacctgtcacgggagccctgtggacatctgcacagccaagccgcgggacattcccatgaatcccatgtgcatttaccgctccccggagaagaaggcaactgaggatgagggctcagaacagaagatcccggaggccaccaaccggcgtgtctgggaactgtccaaggccaattcccgctttgctaccactttctatcagcacctggcagattccaagaatgacaatgataacattttcctgtcacccctgagtatctccacggcttttgctatgaccaagctgggtgcctgtaatgacaccctccagcaactgatggaggtatttaagtttgacaccatatctgagaaaacatctgatcagatccacttcttctttgccaaactgaactgccgactctatcgaaaagccaacaaatcctccaagttagtatcagccaatcgcctttttggagacaaatcccttaccttcaatgagacctaccaggacatcagtgagttggtatatggagccaagctccagcccctggacttcaagcgaaggccgaatcaccgatgtcattccctcggaagccatcaatgagctcactgttctggtgctggttaacaccatttacttcaagggcctgtggaagtcaaagttcagccctgagaacacaaggaaggaactgttctacaaggctgatggagagtcgtgttcagcatctatgatgtaccaggaaggcaagttccgttatcggcgcgtggctgaaggcacccaggtgcttgagttgcccttcaaaggtgatgacatcaccatggtcctcatcttgcccaagcctgagaagagcctggccaaggtggagaaggaactcaccccagaggtgctgcaggagtggctggatgaattggaggagatgatgctggtggtccacatgccccgcttccgcattgaggacggcttcagtttgaaggagcagctgcaagacatgggccttgtcgatctgttcagccctgaaaagtccaaactcccaggtattgttgcagaaggccgagatgacctctatgtctcagatgcattccataaggcatttcttgaggtaaatgaagaaggcagtgaagcagctgcaagtaccgctgttgtgattgctggccgttcgctaaaccccaacagggtgactttcaaggccaacaggcctttcctggtttttataagagaagttcctctgaacactattatcttcatgggcagagtagccaacccttgtgttaagtaaaatgttcttattctttgcacctcttcctatttttggtttgtgaacagaagtaaaaataaatacaaactacttccatctcacattaaaaatggac

SEQ ID NO: 432067 - DNA, 1665 bp, Homo sapiens
  misc_feature (157)..(157): n is a, c, g, or t
ggtgcacgcctatagtcccagctactcgggaggctgaggtaggagaatcgtttgaactcaggaggcagaggttgcaatgagccaagatcgcgccactgcactccagcctgggtgacagagcgagaccgtctcaaaaagaaagaagtgactagggttnaaagaaccagttttcaggcggattgcctcagatcacactatctccacttgcccagccctgtggaagattagcggccatgtattccaatgtgataggaactgtaacctctggaaaaaggaaggtttatcttttgtccttgctgctcattggcttctgggactgcgtgacctgtcacgggagccctgtggacatctgcacagccaagccgcgggacattcccatgaatcccatgtgcatttaccgctccccggagaagaaggcaactgaggatgagggctcagaacagaagatcccggaggccaccaaccggcgtgtctgggaactgtccaaggccaattcccgctttgctaccactttctatcagcacctggcagattccaagaatgacaatgataacattttcctgtcacccctgagtatctccacggcttttgctatgaccaagctgggtgcctgtaatgacaccctccagcaactgatggaggtatttaagtttgacaccatatctgagaaaacatctgatcagatccacttcttctttgccaaactgaactgccgactctatcgacttaccttcaatgagacctaccaggacatcagtgagttggtatatggagccaagctccagcccctggacttcaaggaaaatgcagagcaatccagagcggccatcaacaaatgggtgtccaataagaccgaaggccgaatcaccgatgtcattccctcggaagccatcaatgagctcactgttctggtgctggttaacaccatttacttcaagggcctgtggaagtcaaagttcagccctgagaacacaaggaaggaactgttctacaaggctgatggagagtcgtgttcagcatctatgatgtaccaggaaggcaagttccgttatcggcgcgtggctgaaggcacccaggtgcttgagttgcccttcaaaggtgatgacatcaccatggtcctcatcttgcccaagcctgagaagagcctggccaaggtggagaaggaactcaccccagaggtgctgcaggagtggctggatgaattggaggagatgatgctggtggtccacatgccccgcttccgcattgaggacggcttcagtttgaaggagcagctgcaagacatgggccttgtcgatctgttcagccctgaaaagtccaaactcccaggtattgttgcagaaggccgagatgacctctatgtctcagatgcattccataaggcatttcttgaggtaaatgaagaaggcagtgaagcagctgcaagtaccgctgttgtgattgctggccgttcgctaaaccccaacagggtgactttcaaggccaacaggcctttcctggtttttataagagaagttcctctgaacactattatcttcatgggcagagtagccaacccttgtgttaagtaaaatgttcttattctttgcacctcttcctatttttggtttgtgaacagaagtaaaaataaatacaaactacttccatctcacattaaaaatggac

SEQ ID NO: 432068 - DNA, 1672 bp, Homo sapiens
  misc_feature (157)..(157): n is a, c, g, or t
ggtgcacgcctatagtcccagctactcgggaggctgaggtaggagaatcgtttgaactcaggaggcagaggttgcaatgagccaagatcgcgccactgcactccagcctgggtgacagagcgagaccgtctcaaaaagaaagaagtgactagggttnaaagaaccagttttcaggcggattgcctcagatcacactatctccacttgcccagccctgtggaagattagcggccatgtattccaatgtgataggaactgtaacctctggaaaaaggaaggtttatcttttgtccttgctgctcattggcttctgggactgcgtgacctgtcacgggagccctgtggacatctgcacagccaagccgcgggacattcccatgaatcccatgtgcatttaccgctccccggagaagaaggcaactgaggatgagggctcagaacagaagatcccggaggccaccaaccggcgtgtctgggaactgtccaaggccaattcccgctttgctaccactttctatcagcacctggcagattccaagaatgacaatgataacattttcctgtcacccctgagtatctccacggcttttgctatgaccaagctgggtgcctgtaatgacaccctccagcaactgatggaggtatttaagtttgacaccatatctgagaaaacataaagccaacaaatcctccaagttagtatcagccaatcgcctttttggagacaaatcccttaccttcaatgagacctaccaggacatcagtgagttggtatatggagccaagctccagcccctggacttcaaggaaaatgcagagcaatccagagcggccatcaacaaatgggtgtccaataagaccgaaggccgaatcaccgatgtcattccctcggaagccatcaatgagctcactgttctggtgctggttaacaccatttacttcaagggcctgtggaagtcaaagttcagccctgagaacacaaggaaggaactgttctacaaggctgatggagagtcgtgttcagcatctatgatgtaccaggaaggcaagttccgttatcggcgcgtggctgaaggcacccaggtgcttgagttgcccttcaaaggtgatgacatcaccatggtcctcatcttgcccaagcctgagaagagcctggccaaggtggagaaggaactcaccccagaggtgctgcaggagtggctggatgaattggaggagatgatgctggtggtccacatgccccgcttccgcattgaggacggcttcagtttgaaggagcagctgcaagacatgggccttgtcgatctgttcagccctgaaaagtccaaactcccaggtattgttgcagaaggccgagatgacctctatgtctcagatgcattccataaggcatttcttgaggtaaatgaagaaggcagtgaagcagctgcaagtaccgctgttgtgattgctggccgttcgctaaaccccaacagggtgactttcaaggccaacaggcctttcctggtttttataagagaagttcctctgaacactattatcttcatgggcagagtagccaacccttgtgttaagtaaaatgttcttattctttgcacctcttcctatttttggtttgtgaacagaagtaaaaataaatacaaactacttccatctcacattaaaaatggac

SEQ ID NO: 432069 - DNA, 1675 bp, Homo sapiens
  misc_feature (157)..(157): n is a, c, g, or t
ggtgcacgcctatagtcccagctactcgggaggctgaggtaggagaatcgtttgaactcaggaggcagaggttgcaatgagccaagatcgcgccactgcactccagcctgggtgacagagcgagaccgtctcaaaaagaaagaagtgactagggttnaaagaaccagttttcaggcggattgcctcagatcacactatctccacttgcccagccctgtggaagattagcggccatgtattccaatgtgataggaactgtaacctctggaaaaaggaaggtttatcttttgtccttgctgctcattggcttctgggactgcgtgacctgtcacgggagccctgtggacatctgcacagccaagccgcgggacattcccatgaatcccatgtgcatttaccgctccccggagaagaaggcaactgaggatgagggctcagaacagaagatcccggaggccaccaaccggcgtgtctgggaactgtccaaggccaattcccgctttgctaccactttctatcagcacctggcagattccaagaatgacaatgataacattttcctgtcacccctgagtatctccacggcttttgctatgaccaagctgggtgcctgtaatgacaccctccagcaactgatggaggtatttaagtttgacaccatatctgagaaaacatctgatcagatccacttcttctttgccaaactgaactgccgactctatcgaaaagccaacaaatcctccaagttagtatcagccaatcgcctttttggagacaaatcccttaccttcaatgagacctaccaggacatcagtgagttggtatatggagccaagctccagcccctggacttcaaggaaaatgcagagcaatccagagcggccatcaacaaatgggtgtccaataagaccgaaggccgaatcaccgatgtcattccctcggaagccatcaatgagctcactgttctggtgctggttaacaccatttacttcaagggcctgtggaagtcaaagttcagccctgagaacacaaggaaggaactgttctacaaggctgatggagagtcgtgttcagcatctatgatgtaccaggaaggcaagttccgttatcggcgcgtggctgaaggcacccaggtgcttgagttgcccttcaaaggtgatgacatcaccatggtcctcatcttgcccaagcctgagaagagcctggccaaggtggagaaggaactcaccccagaggtgctgcaggagtggctggatgaattggaggagatgatgctggtggtccacatgccccgcttccgcattgaggacggcttcagtttgaaggagcagctgcaagacatgggccttgtcgatctgttcagccctctatgtctcagatgcattccataaggcatttcttgaggtaaatgaagaaggcagtgaagcagctgcaagtaccgctgttgtgattgctggccgttcgctaaaccccaacagggtgactttcaaggccaacaggcctttcctggtttttataagagaagttcctctgaacactattatcttcatgggcagagtagccaacccttgtgttaagtaaaatgttcttattctttgcacctcttcctatttttggtttgtgaacagaagtaaaaataaatacaaactacttccatctcacattaaaaatggac

SEQ ID NO: 432070 - DNA, 1668 bp, Homo sapiens
  misc_feature (157)..(157): n is a, c, g, or t
ggtgcacgcctatagtcccagctactcgggaggctgaggtaggagaatcgtttgaactcaggaggcagaggttgcaatgagccaagatcgcgccactgcactccagcctgggtgacagagcgagaccgtctcaaaaagaaagaagtgactagggttnaaagaaccagttttcaggcggattgcctcagatcacactatctccacttgcccagccctgtggaagattagcggccatgtattccaatgtgataggaactgtaacctctggaaaaaggaaggtttatcttttgtccttgctgctcattggcttctgggactgcgtgacctgtcacgggagccctgtggacatctgcacagccaagccgcgggacattcccatgaatcccatgtgcatttaccgctccccggagaagaaggcaactgaggatgagggctcagaacagaagatcccggaggccaccaaccggcgtgtctgggaactgtccaaggccaattcccgctttgctaccactttctatcagcacctggcagattccaagaatgacaatgataacattttcctgtcacccctgagtatctccacggcttttgctatgaccaagctgggtgcctgtaatgacaccctccagcaactgatggaggtatttaagtttgacaccatatctgagaaaacatctgatcagatccacttcttctttgccaaactgaactgccgactctatcgaaaagccaacaaatcctccaagttagtatcagccaatcgcctttttggagacaaatcccttaccttcaatgagacctaccaggacatcagtgagttggtatatggagccaagctccagcccctggacttcaaggaaaatgcagagcaatccagagcggccatcaacaaatgggtgtccaataagaccgaaggccgaatcaccgatgtcattccctcggaagccatcaatgagctcactgttctggtgctggttaacaccatttacttcaagggcctgtggaagtcaaagttcagccctgagaacacaaggaaggaactgttctacaaggctgatggagagtcgtgttcagcatctatgatgtaccaggaaggcaagttccgttatcggcgcgtggctgaaggcacccaggtgcttgagttgcccttcaaaggtgatgacatcaccatggtcctcatcttgcccaagcctgagaagagcctggccaaggtggagaaggaactcaccccagaggtgctgcaggagtggctggatgaattggaggagatgatgctggtggtccacatgccccgcttccgcattgaggacggcttcagtttgaaggagcagctgcaagacatgggccttgtcgatctgttcagccctgaaaagtccaaactcccaggtattgttgcagaaggccgagatgacctctatgtctcagatgcattccataaggcatttcttgaggtaaatgaagaaggcagtgaagcagctgcaagtaccgctgttgtgattgctggccttataagagaagttcctctgaacactattatcttcatgggcagagtagccaacccttgtgttaagtaaaatgttcttattctttgcacctcttcctatttttggtttgtgaacagaagtaaaaataaatacaaactacttccatctcacattaaaaatggac

SEQ ID NO: 432071 - DNA, 977 bp, Homo sapiens
  misc_feature (43)..(43): n is a, c, g, or t
tctgccccaccctgtcctctggaacctctgcgagatttagagnaaagaaccagttttcaggcggattgcctcagatcacactatctccacttgcccagccctgtggaagattagcggccatgtattccaatgtgataggaactgtaacctctggaaaaaggaaggtttatcttttgtccttgctgctcattggcttctgggactgcgtgacctgtcacgggagccctgtggacatctgcacagccaagccgcgggacattcccatgaatcccatgtgcatttaccgctccccggagaagaaggcaactgaggatgagggctcagaacagaagatcccggaggccaccaaccggcgtgtctgggaactgtccaaggccaattcccgctttgctaccactttctatcagcacctggcagattccaagaatgacaatgataacattttcctgtcacccctgagtatctccacggcttttgctatgaccaagctgggtgcctgtaatgacaccctccagcaactgatggaggtatttaagtttgacaccatatctgagaaaacatctgatcagatccacttcttctttgccaaactgaactgccgactctatcgaaaagccaacaaatcctccaagttagtatcagccaatcgcctttttggagacaaatcctctatgtctcagatgcattccataaggcatttcttgaggtaaatgaagaaggcagtgaagcagctgcaagtaccgctgttgtgattgctggccgttcgctaaaccccaacagggtgactttcaaggccaacaggcctttcctggtttttataagagaagttcctctgaacactattatcttcatgggcagagtagccaacccttgtgttaagtaaaatgttcttattctttgcacctcttcctatttttggtttgtgaacagaagtaaaaataaatacaaactacttccatctcacattaaaaatggac

SEQ ID NO: 432072 - DNA, 1722 bp, Homo sapiens
  misc_feature (157)..(157): n is a, c, g, or t
ggtgcacgcctatagtcccagctactcgggaggctgaggtaggagaatcgtttgaactcaggaggcagaggttgcaatgagccaagatcgcgccactgcactccagcctgggtgacagagcgagaccgtctcaaaaagaaagaagtgactagggttnaaagaaccagttttcaggcggattgcctcagatcacactatctccacttgcccagccctgtggaagattagcggccatgtattccaatgtgataggaactgtaacctctggaaaaaggaaggtttatcttttgtccttgctgctcattggcttctgggactgcgtgacctgtcacgggagccctgtggacatctgcacagccaagccgcgggacattcccatgaatcccatgtgcatttaccgctccccggagaagaaggcaactgaggatgagggctcagaacagaagatcccggaggccaccaaccggcgtgtctgggaactgtccaaggccaattcccgctttgctaccactttctatcagcacctggcagattccaagaatgacaatgataacattttcctgtcacccctgagtatctccacggcttttgctatgaccaagctgggtgcctgtaatgacaccctccagcaactgatggaggtatttaagtttgacaccatatctgagaaaacatctgatcagatccacttcttctttgccaaactgaactgccgactctatcgaaaagccaacaaatcctccaagttagtatcagccaatcgcctttttggagacaaatcccttaccttcaatgagacctaccaggacatcagtgagttggtatatggagccaagctccagcccctggacttcaaggaaaatgcagagcaatccagagcggccatcaacaaatgggtgtccaataagaccgaaggccgaatcaccgatgtcattccctcggaagccatcaatgagctcactgttctggtgctggttaacaccatttacttcaagggcctgtggaagtcaaagttcagccctgagaacacaaggaaggaactgttctacaaggctgatggagagtcgtgttcagcatctatgatgtaccaggaaggcaagttccgttatcggcgcgtggctgaaggcacccaggtgcttgagttgcccttcaaaggtgatgacatcaccatggtcctcatcttgcccaagcctgagaagagcctggccaaggtggagaaggaactcaccccagaggtgctgcaggagtggctggatgaattggaggagatgatgctggtggtccacatgccccgcttccgcattgaggacggcttcagtttgaaggagcagctgcaagacatgggccttgtcgatctgttcagccctgaaaagtccaaactcccaggtattgttgcagaaggccgagatgacctctatgtctcagatgcattccataaggcatttcttgaggtaaatgaagaaggcagtgaagcagctgcaagtaccgctgttgtgattgctggccgttcgctaaaccccaacagggtgactttcaaggccaacaggcctttcctggtttttataagagaagttcctctgaacactattatcttcatgggcagagtagccaacccttgtgttaagtaaaatgttcttattctttgcacctcttcctatttttggtttgtgaacagaagtaaaaataaatacaaactacttccatctcacattaaaaatggac

SEQ ID NO: 432073 - DNA, 1891 bp, Homo sapiens
  misc_feature (157)..(157): n is a, c, g, or t
ggtgcacgcctatagtcccagctactcgggaggctgaggtaggagaatcgtttgaactcaggaggcagaggttgcaatgagccaagatcgcgccactgcactccagcctgggtgacagagcgagaccgtctcaaaaagaaagaagtgactagggttnaaagaaccagttttcaggcggattgcctcagatcacactatctccacttgcccagccctgtggaagattagcggccatgtattccaatgtgataggaactgtaacctctggaaaaagcgtggggaattgagcacataatactccaaataaccatcagatgattctaattccaacatgaccacgtccaggcaactgaactgtcccctggcaagaagtctaggactgaacctgtcccgggcccctgtacttggttcaaaggatttagcctttctcttggccacaccaggaaggtttatcttttgtccttgctgctcattggcttctgggactgcgtgacctgtcacgggagccctgtggacatctgcacagccaagccgcgggacattcccatgaatcccatgtgcatttaccgctccccggagaagaaggcaactgaggatgagggctcagaacagaagatcccggaggccaccaaccggcgtgtctgggaactgtccaaggccaattcccgctttgctaccactttctatcagcacctggcagattccaagaatgacaatgataacattttcctgtcacccctgagtatctccacggcttttgctatgaccaagctgggtgcctgtaatgacaccctccagcaactgatggaggtatttaagtttgacaccatatctgagaaaacatctgatcagatccacttcttctttgccaaactgaactgccgactctatcgaaaagccaacaaatcctccaagttagtatcagccaatcgcctttttggagacaaatcccttaccttcaatgagacctaccaggacatcagtgagttggtatatggagccaagctccagcccctggacttcaaggaaaatgcagagcaatccagagcggccatcaacaaatgggtgtccaataagaccgaaggccgaatcaccgatgtcattccctcggaagccatcaatgagctcactgttctggtgctggttaacaccatttacttcaagggcctgtggaagtcaaagttcagccctgagaacacaaggaaggaactgttctacaaggctgatggagagtcgtgttcagcatctatgatgtaccaggaaggcaagttccgttatcggcgcgtggctgaaggcacccaggtgcttgagttgcccttcaaaggtgatgacatcaccatggtcctcatcttgcccaagcctgagaagagcctggccaaggtggagaaggaactcaccccagaggtgctgcaggagtggctggatgaattggaggagatgatgctggtggtccacatgccccgcttccgcattgaggacggcttcagtttgaaggagcagctgcaagacatgggccttgtcgatctgttcagccctgaaaagtccaaactcccaggtattgttgcagaaggccgagatgacctctatgtctcagatgcattccataaggcatttcttgaggtaaatgaagaaggcagtgaagcagctgcaagtaccgctgttgtgattgctggccgttcgctaaaccccaacagggtgactttcaaggccaacaggcctttcctggtttttataagagaagttcctctgaacactattatcttcatgggcagagtagccaacccttgtgttaagtaaaatgttcttattctttgcacctcttcctatttttggtttgtgaacagaagtaaaaataaatacaaactacttccatctcacattaaaaatggac

SEQ ID NO: 432074 - DNA, 1843 bp, Homo sapiens
  misc_feature (157)..(157): n is a, c, g, or t
ggtgcacgcctatagtcccagctactcgggaggctgaggtaggagaatcgtttgaactcaggaggcagaggttgcaatgagccaagatcgcgccactgcactccagcctgggtgacagagcgagaccgtctcaaaaagaaagaagtgactagggttnaaagaaccagttttcaggcggattgcctcagatcacactatctccacttgcccagccctgtggaagattagcggccatgtattccaatgtgataggaactgtaacctctggaaaaagaattccaacatgaccacgtccaggcaactgaactgtcccctggcaagaagtctaggactgaacctgtcccgggcccctgtacttggttcaaaggatttagcctttctcttggccacaccaggaaggtttatcttttgtccttgctgctcattggcttctgggactgcgtgacctgtcacgggagccctgtggacatctgcacagccaagccgcgggacattcccatgaatcccatgtgcatttaccgctccccggagaagaaggcaactgaggatgagggctcagaacagaagatcccggaggccaccaaccggcgtgtctgggaactgtccaaggccaattcccgctttgctaccactttctatcagcacctggcagattccaagaatgacaatgataacattttcctgtcacccctgagtatctccacggcttttgctatgaccaagctgggtgcctgtaatgacaccctccagcaactgatggaggtatttaagtttgacaccatatctgagaaaacatctgatcagatccacttcttctttgccaaactgaactgccgactctatcgaaaagccaacaaatcctccaagttagtatcagccaatcgcctttttggagacaaatcccttaccttcaatgagacctaccaggacatcagtgagttggtatatggagccaagctccagcccctggacttcaaggaaaatgcagagcaatccagagcggccatcaacaaatgggtgtccaataagaccgaaggccgaatcaccgatgtcattccctcggaagccatcaatgagctcactgttctggtgctggttaacaccatttacttcaagggcctgtggaagtcaaagttcagccctgagaacacaaggaaggaactgttctacaaggctgatggagagtcgtgttcagcatctatgatgtaccaggaaggcaagttccgttatcggcgcgtggctgaaggcacccaggtgcttgagttgcccttcaaaggtgatgacatcaccatggtcctcatcttgcccaagcctgagaagagcctggccaaggtggagaaggaactcaccccagaggtgctgcaggagtggctggatgaattggaggagatgatgctggtggtccacatgccccgcttccgcattgaggacggcttcagtttgaaggagcagctgcaagacatgggccttgtcgatctgttcagccctgaaaagtccaaactcccaggtattgttgcagaaggccgagatgacctctatgtctcagatgcattccataaggcatttcttgaggtaaatgaagaaggcagtgaagcagctgcaagtaccgctgttgtgattgctggccgttcgctaaaccccaacagggtgactttcaaggccaacaggcctttcctggtttttataagagaagttcctctgaacactattatcttcatgggcagagtagccaacccttgtgttaagtaaaatgttcttattctttgcacctcttcctatttttggtttgtgaacagaagtaaaaataaatacaaactacttccatctcacattaaaaatggac

SEQ ID NO: 432075 - DNA, 1637 bp, Homo sapiens
  misc_feature (157)..(157): n is a, c, g, or t
ggtgcacgcctatagtcccagctactcgggaggctgaggtaggagaatcgtttgaactcaggaggcagaggttgcaatgagccaagatcgcgccactgcactccagcctgggtgacagagcgagaccgtctcaaaaagaaagaagtgactagggttnaaagaaccagttttcaggcggattgcctcagatcacactatctccacttgcccagccctgtggaagattagcggccatgtattccaatgtgataggaactgtaacctctggaaaaaggaaggtttatcttttgtccttgctgctcattggcttctgggactgcgtgacctgtcacgggagccctgtggacatctgcacagccaagccgcgggacattcccatgaatcccatgtgcatttaccgctccccggagaagaaggcaactgaggatgagggctcagaacagaagattccaagaatgacaatgataacattttcctgtcacccctgagtatctccacggcttttgctatgaccaagctgggtgcctgtaatgacaccctccagcaactgatggaggtatttaagtttgacaccatatctgagaaaacatctgatcagatccacttcttctttgccaaactgaactgccgactctatcgaaaagccaacaaatcctccaagttagtatcagccaatcgcctttttggagacaaatcccttaccttcaatgagacctaccaggacatcagtgagttggtatatggagccaagctccagcccctggacttcaaggaaaatgcagagcaatccagagcggccatcaacaaatgggtgtccaataagaccgaaggccgaatcaccgatgtcattccctcggaagccatcaatgagctcactgttctggtgctggttaacaccatttacttcaagggcctgtggaagtcaaagttcagccctgagaacacaaggaaggaactgttctacaaggctgatggagagtcgtgttcagcatctatgatgtaccaggaaggcaagttccgttatcggcgcgtggctgaaggcacccaggtgcttgagttgcccttcaaaggtgatgacatcaccatggtcctcatcttgcccaagcctgagaagagcctggccaaggtggagaaggaactcaccccagaggtgctgcaggagtggctggatgaattggaggagatgatgctggtggtccacatgccccgcttccgcattgaggacggcttcagtttgaaggagcagctgcaagacatgggccttgtcgatctgttcagccctgaaaagtccaaactcccaggtattgttgcagaaggccgagatgacctctatgtctcagatgcattccataaggcatttcttgaggtaaatgaagaaggcagtgaagcagctgcaagtaccgctgttgtgattgctggccgttcgctaaaccccaacagggtgactttcaaggccaacaggcctttcctggtttttataagagaagttcctctgaacactattatcttcatgggcagagtagccaacccttgtgttaagtaaaatgttcttattctttgcacctcttcctatttttggtttgtgaacagaagtaaaaataaatacaaactacttccatctcacattaaaaatggac

SEQ ID NO: 432076 - DNA, 1834 bp, Homo sapiens
  misc_feature (157)..(157): n is a, c, g, or t
ggtgcacgcctatagtcccagctactcgggaggctgaggtaggagaatcgtttgaactcaggaggcagaggttgcaatgagccaagatcgcgccactgcactccagcctgggtgacagagcgagaccgtctcaaaaagaaagaagtgactagggttnaaagaaccagttttcaggcggattgcctcagatcacactatctccacttgcccagccctgtggaagattagcggccatgtattccaatgtgataggaactgtaacctctggaaaaagcgtggggaattgagcacataatactccaaataaccatcagatgattctaattccaacatgaccacgtccaggcaactgaactgtcccctggcaagaagtctaggactgaacctgtcccgggcccctgtacttggttcaaaggatttagcctttctcttggccacaccaggaaggtttatcttttgtccttgctgctcattggcttctgggactgcgtgacctgtcacgggagccctgtggacatctgcacagccaagccgcgggacattcccatgaatcccatgtgcatttaccgctccccggagaagaaggcaactgaggatgagggctcagaacagaagatcccggaggccaccaaccggcgtgtctgggaactgtccaaggccaattcccgctttgctaccactttctatcagcacctggcagattccaagaatgacaatgataacattttcctgtcacccctgagtatctccacggcttttgctatgaccaagctgggtgcctgtaatgacaccctccagcaactgatggaggtatttaagtttgacaccatatctgagaaaacatctgatcagatccacttcttctttgccaaactgaactgccgactctatcgacttaccttcaatgagacctaccaggacatcagtgagttggtatatggagccaagctccagcccctggacttcaaggaaaatgcagagcaatccagagcggccatcaacaaatgggtgtccaataagaccgaaggccgaatcaccgatgtcattccctcggaagccatcaatgagctcactgttctggtgctggttaacaccatttacttcaagggcctgtggaagtcaaagttcagccctgagaacacaaggaaggaactgttctacaaggctgatggagagtcgtgttcagcatctatgatgtaccaggaaggcaagttccgttatcggcgcgtggctgaaggcacccaggtgcttgagttgcccttcaaaggtgatgacatcaccatggtcctcatcttgcccaagcctgagaagagcctggccaaggtggagaaggaactcaccccagaggtgctgcaggagtggctggatgaattggaggagatgatgctggtggtccacatgccccgcttccgcattgaggacggcttcagtttgaaggagcagctgcaagacatgggccttgtcgatctgttcagccctgaaaagtccaaactcccaggtattgttgcagaaggccgagatgacctctatgtctcagatgcattccataaggcatttcttgaggtaaatgaagaaggcagtgaagcagctgcaagtaccgctgttgtgattgctggccgttcgctaaaccccaacagggtgactttcaaggccaacaggcctttcctggtttttataagagaagttcctctgaacactattatcttcatgggcagagtagccaacccttgtgttaagtaaaatgttcttattctttgcacctcttcctatttttggtttgtgaacagaagtaaaaataaatacaaactacttccatctcacattaaaaatggac

SEQ ID NO: 432077 - DNA, 1398 bp, Homo sapiens
  misc_feature (157)..(157): n is a, c, g, or t
ggtgcacgcctatagtcccagctactcgggaggctgaggtaggagaatcgtttgaactcaggaggcagaggttgcaatgagccaagatcgcgccactgcactccagcctgggtgacagagcgagaccgtctcaaaaagaaagaagtgactagggttnaaagaaccagttttcaggcggattgcctcagatcacactatctccacttgcccagccctgtggaagattagcggccatgtattccaatgtgataggaactgtaacctctggaaaaaggaaggtttatcttttgtccttgctgctcattggcttctgggactgcgtgacctgtcacgggagccctgtggacatctgcacagccaagccgcgggacattcccatgaatcccatgtgcatttaccgctccccggagaagaaggcaactgaggatgagggctcagaacagaagatcccggaggccaccaaccggcgtgtctgggaactgtccaaggccaattcccgctttgctaccactttctatcagcacctggcagattccaagaatgacaatgataacattttcctgtcacccctgagtatctccacggcttttgctatgaccaagctgggtgcctgtaatgacaccctccagcaactgatggaggtatttaagtttgacaccatttacttcaagggcctgtggaagtcaaagttcagccctgagaacacaaggaaggaactgttctacaaggctgatggagagtcgtgttcagcatctatgatgtaccaggaaggcaagttccgttatcggcgcgtggctgaaggcacccaggtgcttgagttgcccttcaaaggtgatgacatcaccatggtcctcatcttgcccaagcctgagaagagcctggccaaggtggagaaggaactcaccccagaggtgctgcaggagtggctggatgaattggaggagatgatgctggtggtccacatgccccgcttccgcattgaggacggcttcagtttgaaggagcagctgcaagacatgggccttgtcgatctgttcagccctgaaaagtccaaactcccaggtattgttgcagaaggccgagatgacctctatgtctcagatgcattccataaggcatttcttgaggtaaatgaagaaggcagtgaagcagctgcaagtaccgctgttgtgattgctggccgttcgctaaaccccaacagggtgactttcaaggccaacaggcctttcctggtttttataagagaagttcctctgaacactattatcttcatgggcagagtagccaacccttgtgttaagtaaaatgttcttattctttgcacctcttcctatttttggtttgtgaacagaagtaaaaataaatacaaactacttccatctcacattaaaaatggac

SEQ ID NO: 432078 - DNA, 1436 bp, Homo sapiens
taacgctccctaaactgccacttgctcagctccgcgcctaaggtgtctattagtgcgcctgcgctgtgacctagaatgggcgcatgcgccgagcggaactggctggtttgaaaaccatggcgtgggtaccagcggagtccgcagtggaagagttgatgcctcggctattgccggtagagccttgcgacttgacggaaggtttcgatccctcggtacccccgaggacgcctcaggaatacctgaggcgggtccagatcgaagcagctcaatgtccagatgttgtggtagctcaaattgacccaaagaagttgaaaaggaagcaaagtgtgaatatttctctttcaggatgccaacccgcccctgaaggttattccccaacacttcaatggcaacagcaacaagtggcacagttttcaactgttcgacagaatgtgaacaaacatagaagtcactggaaatcacaacagttggatagtaatgtgacaatgccaaaatctgaagatgaagaaggctggaagaaattttgtctgggtgaaaagttatgtgctgacggggctgttggaccagccacaaatgaaagtcctggaatagattatgtacaaattggttttcctcccttgcttagtattgttagcagaatgaatcaggcaacagtaactagtgtcttggaatatctgagtaattggtttggagaaagagactttactccagaattgggaagatggctttatgctttattggcttgtcttgaaaagcctttgttacctgaggctcattcactgattcggcagcttgcaagaaggtgctctgaagtgaggctcttagtggatagcaaagatgatgagagggttcctgctttgaatttattaatctgcttggttagcaggtattttgaccaacgtgatttagctgatgagccatcttgatgtagctgatctctcagggatagaagatatttctcatgaaggcagcctaactctgaggaaaacaatgccaattcaagtacagatttcaacacatcttcaacactatgtgaagggttcacatcttaacctgtgcaattcagattgatactcagaatatgggttgatttgaatatctgaaatatcaatggaaaatcccactcagtttttgatgaacagtttgaacagttttctgtaatcaagcagcttgcatagaaattgtatgatgaaattttacataggttcttggtgctgttttgttctttttttgttttttgttgttttgttatttacttatatacatataaaattttattgaaaatatgttttggttactaaaattttgtttgactcctaacaaaagacaatggatggccttagcatcagaattaaaataatctggattaaatggcaatgtgttcatagtcagcaataaaattaaacatttttccctttaagctcagcacttttttt

SEQ ID NO: 432079 - DNA, 1391 bp, Homo sapiens
taacgctccctaaactgccacttgctcagctccgcgcctaaggtgtctattagtgcgcctgcgctgtgacctagaatgggcgcatgcgccgagcggaactggctggtttgaaaaccatggcgtgggtaccagcggagtccgcagtggaagagttgatgcctcggctattgccggtagagccttgcgacttgacggaaggtttcgatccctcggtacccccgaggacgcctcaggaatacctgaggcgggtccagatcgaagcagctcaatgtccagatgttgtggtagctcaaattgacccaaagaagttgaaaaggaagcaaagtgtgaatatttctctttcaggatgccaacccgcccctgaaggttattccccaacacttcaatggcaacagcaacaagtggcacagttttcaactgttcgacagaatgtgaacaaacatagaagtcactggaaatcacaacagttggatagtaatgtgacaatgccaaaatctgaagatgaagaaggctggaagaaattttgtctgggtgaaaagttatgtgctgacggggctgttggaccagccacaaatgaaagtcctggaatagattatgtacaagcaacagtaactagtgtcttggaatatctgagtaattggtttggagaaagagactttactccagaattgggaagatggctttatgctttattggcttgtcttgaaaagcctttgttacctgaggctcattcactgattcggcagcttgcaagaaggtgctctgaagtgaggctcttagtggatagcaaagatgatgagagggttcctgctttgaatttattaatctgcttggttagcaggtattttgaccaacgtgatttagctgatgagccatcttgatgtagctgatctctcagggatagaagatatttctcatgaaggcagcctaactctgaggaaaacaatgccaattcaagtacagatttcaacacatcttcaacactatgtgaagggttcacatcttaacctgtgcaattcagattgatactcagaatatgggttgatttgaatatctgaaatatcaatggaaaatcccactcagtttttgatgaacagtttgaacagttttctgtaatcaagcagcttgcatagaaattgtatgatgaaattttacataggttcttggtgctgttttgttctttttttgttttttgttgttttgttatttacttatatacatataaaattttattgaaaatatgttttggttactaaaattttgtttgactcctaacaaaagacaatggatggccttagcatcagaattaaaataatctggattaaatggcaatgtgttcatagtcagcaataaaattaaacatttttccctttaagctcagcacttttttt

SEQ ID NO: 432080 - DNA, 1356 bp, Homo sapiens
taacgctccctaaactgccacttgctcagctccgcgcctaaggtgtctattagtgcgcctgcgctgtgacctagaatgggcgcatgcgccgagcggaactggctggtttgaaaaccatggcgtgggtaccagcggagtccgcagtggaagagttgatgcctcggctattgccggatcgaagcagctcaatgtccagatgttgtggtagctcaaattgacccaaagaagttgaaaaggaagcaaagtgtgaatatttctctttcaggatgccaacccgcccctgaaggttattccccaacacttcaatggcaacagcaacaagtggcacagttttcaactgttcgacagaatgtgaacaaacatagaagtcactggaaatcacaacagttggatagtaatgtgacaatgccaaaatctgaagatgaagaaggctggaagaaattttgtctgggtgaaaagttatgtgctgacggggctgttggaccagccacaaatgaaagtcctggaatagattatgtacaaattggttttcctcccttgcttagtattgttagcagaatgaatcaggcaacagtaactagtgtcttggaatatctgagtaattggtttggagaaagagactttactccagaattgggaagatggctttatgctttattggcttgtcttgaaaagcctttgttacctgaggctcattcactgattcggcagcttgcaagaaggtgctctgaagtgaggctcttagtggatagcaaagatgatgagagggttcctgctttgaatttattaatctgcttggttagcaggtattttgaccaacgtgatttagctgatgagccatcttgatgtagctgatctctcagggatagaagatatttctcatgaaggcagcctaactctgaggaaaacaatgccaattcaagtacagatttcaacacatcttcaacactatgtgaagggttcacatcttaacctgtgcaattcagattgatactcagaatatgggttgatttgaatatctgaaatatcaatggaaaatcccactcagtttttgatgaacagtttgaacagttttctgtaatcaagcagcttgcatagaaattgtatgatgaaattttacataggttcttggtgctgttttgttctttttttgttttttgttgttttgttatttacttatatacatataaaattttattgaaaatatgttttggttactaaaattttgtttgactcctaacaaaagacaatggatggccttagcatcagaattaaaataatctggattaaatggcaatgtgttcatagtcagcaataaaattaaacatttttccctttaagctcagcacttttttt

SEQ ID NO: 432081 - DNA, 1377 bp, Homo sapiens
taacgctccctaaactgccacttgctcagctccgcgcctaaggtgtctattagtgcgcctgcgctgtgacctagaatgggcgcatgcgccgagcggaactggctggtttgaaaaccatggcgtgggtaccagcggagtccgcagtggaagagttgatgcctcggctattgccggtagagccttgcgacttgacggaaggtttcgatccctcggtacccccgaggacgcctcaggaatacctgaggcgggtccagatcgaagcagctcaatgtccagatgttgtggtagctcaaattgacccaaagaagttgaaaaggaagcaaagtgtgaatatttctctttcaggatgccaacccgcccctgaaggttattccccaacacttcaatggcaacagcaacaagtggcacagttttcaactgttcgacagaatgtgaacaaacatagaagtcactggaaatcacaacagttggatagtaatgtgacaatgccaaaatctgaagatgaagaaggctggaagaaattttgtctgggtgaaaagttatgtgctgacggggctgttggaccagccacaaatgaaagtcctggaatagattatgtacaaattggttttcctcccttgcttagtattgttagcagaatgaatcaggcaacagtaactagtgtcttggaatatctgagtaattggtttggagaaagagactttactccagaattgggaagatggctttatgctttattggcttgtcttgaaaagcctttgttacctgaggctcattcactgattcggcagcttgcaagaaggtgctctgaagtgaggctcttagtggtattttgaccaacgtgatttagctgatgagccatcttgatgtagctgatctctcagggatagaagatatttctcatgaaggcagcctaactctgaggaaaacaatgccaattcaagtacagatttcaacacatcttcaacactatgtgaagggttcacatcttaacctgtgcaattcagattgatactcagaatatgggttgatttgaatatctgaaatatcaatggaaaatcccactcagtttttgatgaacagtttgaacagttttctgtaatcaagcagcttgcatagaaattgtatgatgaaattttacataggttcttggtgctgttttgttctttttttgttttttgttgttttgttatttacttatatacatataaaattttattgaaaatatgttttggttactaaaattttgtttgactcctaacaaaagacaatggatggccttagcatcagaattaaaataatctggattaaatggcaatgtgttcatagtcagcaataaaattaaacatttttccctttaagctcagcacttttttt

SEQ ID NO: 432082 - DNA, 1162 bp, Homo sapiens
aagccgtatcctatcctgagagatcagctacatcaagatgccgcatgaaatttctctggacgattgagctgctacgatctggacccgcctcagttattccccaacacttcaatggcaacagcaacaagtggcacagttttcaactgttcgacagaatgtgaacaaacatagaagtcactggaaatcacaacagttggatagtaatgtgacaatgccaaaatctgaagatgaagaaggctggaagaaattttgtctgggtgaaaagttatgtgctgacggggctgttggaccagccacaaatgaaagtcctggaatagattatgtacaaattggttttcctcccttgcttagtattgttagcagaatgaatcaggcaacagtaactagtgtcttggaatatctgagtaattggtttggagaaagagactttactccagaattgggaagatggctttatgctttattggcttgtcttgaaaagcctttgttacctgaggctcattcactgattcggcagcttgcaagaaggtgctctgaagtgaggctcttagtggatagcaaagatgatgagagggttcctgctttgaatttattaatctgcttggttagcaggtattttgaccaacgtgatttagctgatgagccatcttgatgtagctgatctctcagggatagaagatatttctcatgaaggcagcctaactctgaggaaaacaatgccaattcaagtacagatttcaacacatcttcaacactatgtgaagggttcacatcttaacctgtgcaattcagattgatactcagaatatgggttgatttgaatatctgaaatatcaatggaaaatcccactcagtttttgatgaacagtttgaacagttttctgtaatcaagcagcttgcatagaaattgtatgatgaaattttacataggttcttggtgctgttttgttctttttttgttttttgttgttttgttatttacttatatacatataaaattttattgaaaatatgttttggttactaaaattttgtttgactcctaacaaaagacaatggatggccttagcatcagaattaaaataatctggattaaatggcaatgtgttcatagtcagcaataaaattaaacatttttccctttaagctcagcacttttttt

SEQ ID NO: 432083 - DNA, 1554 bp, Homo sapiens
taacgctccctaaactgccacttgctcagctccgcgcctaaggtgtctattagtgcgcctgcgctgtgacctagaatgggcgcatgcgccgagcggaactggctggtttgaaaaccatggcgtgggtaccagcggagtccgcagtggaagagttgatgcctcggctattgccggtagagccttgcgacttgacggaaggtttcgatccctcggtacccccgaggacgcctcaggaatacctgaggcgggtccagatcgaagcagctcaatgtccagatgttgtggtagctcaaattgacccaaagaagttgaaaaggaagcaaagtgtgaatatttctctttcaggatgccaacccgcccctgaaggttattccccaacacttcaatggcaacagcaacaagtggcacagttttcaactgttcgacagaatgtgaacaaacatagaagtcactggaaatcacaacagttggatagtaatgtgacaatgaggtggggttttgccatgttggccaggctggtcttgaactcctgacttcatgtgatcgcctgcctcggcctcccaaagtgctgggattacaggcgtgaaccaccgcacccggcctaagccaaaatctgaagatgaagaaggctggaagaaattttgtctgggtgaaaagttatgtgctgacggggctgttggaccagccacaaatgaaagtcctggaatagattatgtacaaattggttttcctcccttgcttagtattgttagcagaatgaatcaggcaacagtaactagtgtcttggaatatctgagtaattggtttggagaaagagactttactccagaattgggaagatggctttatgctttattggcttgtcttgaaaagcctttgttacctgaggctcattcactgattcggcagcttgcaagaaggtgctctgaagtgaggctcttagtggatagcaaagatgatgagagggttcctgctttgaatttattaatctgcttggttagcaggtattttgaccaacgtgatttagctgatgagccatcttgatgtagctgatctctcagggatagaagatatttctcatgaaggcagcctaactctgaggaaaacaatgccaattcaagtacagatttcaacacatcttcaacactatgtgaagggttcacatcttaacctgtgcaattcagattgatactcagaatatgggttgatttgaatatctgaaatatcaatggaaaatcccactcagtttttgatgaacagtttgaacagttttctgtaatcaagcagcttgcatagaaattgtatgatgaaattttacataggttcttggtgctgttttgttctttttttgttttttgttgttttgttatttacttatatacatataaaattttattgaaaatatgttttggttactaaaattttgtttgactcctaacaaaagacaatggatggccttagcatcagaattaaaataatctggattaaatggcaatgtgttcatagtcagcaataaaattaaacatttttccctttaagctcagcacttttttt

SEQ ID NO: 432084 - DNA, 986 bp, Homo sapiens
  misc_feature (12)..(12): n is a, c, g, or t
  misc_feature (24)..(25): n is a, c, g, or t
  misc_feature (30)..(30): n is a, c, g, or t
  misc_feature (57)..(57): n is a, c, g, or t
  misc_feature (90)..(90): n is a, c, g, or t
agactgaccagncctcatcatccnnaaaancacggacagcgtctgtgtgcgcatctngagtcttcacacctgttgactcacacggctttngctgatgacacggggctgttggaccagccacaaatgaaagtcctggaatagattatgtacaaattggttttcctcccttgcttagtattgttagcagaatgaatcaggcaacagtaactagtgtcttggaatatctgagtaattggtttggagaaagagactttactccagaattgggaagatggctttatgctttattggcttgtcttgaaaagcctttgttacctgaggctcattcactgattcggcagcttgcaagaaggtgctctgaagtgaggctcttagtggatagcaaagatgatgagagggttcctgctttgaatttattaatctgcttggttagcaggtattttgaccaacgtgatttagctgatgagccatcttgatgtagctgatctctcagggatagaagatatttctcatgaaggcagcctaactctgaggaaaacaatgccaattcaagtacagatttcaacacatcttcaacactatgtgaagggttcacatcttaacctgtgcaattcagattgatactcagaatatgggttgatttgaatatctgaaatatcaatggaaaatcccactcagtttttgatgaacagtttgaacagttttctgtaatcaagcagcttgcatagaaattgtatgatgaaattttacataggttcttggtgctgttttgttctttttttgttttttgttgttttgttatttacttatatacatataaaattttattgaaaatatgttttggttactaaaattttgtttgactcctaacaaaagacaatggatggccttagcatcagaattaaaataatctggattaaatggcaatgtgttcatagtcagcaataaaattaaacatttttccctttaagctcagcacttttttt

SEQ ID NO: 432085 - DNA, 1275 bp, Homo sapiens
taacgctccctaaactgccacttgctcagctccgcgcctaaggtgtctattagtgcgcctgcgctgtgacctagaatgggcgcatgcgccgagcggaactggctggtttgaaaaccatggcgtgggtaccagcggagtccgcagtggaagagttgatgcctcggctattgccggtagagccttgcgacttgacggaaggtttcgatccctcggtacccccgaggacgcctcaggaatacctgaggcgggtccagatcgaagcagctcaatgtccagatgttgtggtagctcaaattgacccaaagaagttgaaaaggaagcaaagtgtgaatatttctctttcaggatgccaacccgcccctgaaggttattccccaacacttcaatggcaacagcaacaagtggcacagttttcaactgttcgacagaatgtgaacaaacatagaagtcactggaaatcacaacagttggatagtaatgtgacaatgccaaaatctgaagatgaagaaggctggaagaaattttgtctgggtgaaaagttatgtgctgacggggctgttggaccagccacaaatgaaagtcctggaatagattatgtacaaattggttttcctcccttgcttagtattgttagcagaatgaatcaggcaacagtaactagtgtcttggaatatctgagtaattggtttggagaaagagactttactccagaattgggaagatggctttatgctttattggcttgtcttgaaaagcctttgttacctgaggctcattcactgattcggcagcttgcaagaaggtgctctgaagtgaggctcttagtggatagcaaagatgatgagagggttcctgctttgaatttattaatctgcttggttagcaggtatagttaatccttggcttctttattatttatcagtgaggtcagtgaggttagatcgtatttattacatttggtttttgtttggttggtttttttttgagtctcactctgttgctatagttagggtgcagtggcgcaatcacagctcactagagctttaacttcctgggctccagcaatcctcccacctcagcctcctgagtagctaggaccacaaccaagcaccaccacacctggctaattaaaaaaaattgttcgtagagacagggtctcactgtgttgcccaggctgctcttgaactcctgatctcaggtgatccgcccgcctcagcctcccaaagtgctgggattacaggcatgagccactgtgcctggcctcaatatttttat

SEQ ID NO: 432086 - DNA, 1454 bp, Homo sapiens
taacgctccctaaactgccacttgctcagctccgcgcctaaggtgtctattagtgcgcctgcgctgtgacctagaatgggcgcatgcgccgagcggaactggctggtttgaaaaccatggcgtgggtaccagcggagtccgcagtggaagagttgatgcctcggctattgccggtagagccttgcgacttgacggaaggtttcgatccctcggtacccccgaggacgcctcaggaatacctgaggcgggtccagatcgaagcagctcaatgtccagatgttgtggtagctcaaattgacccaaagaagttgaaaaggaagcaaagtgtgaatatttctctttcaggatgccaacccgcccctgaaggttattccccaacacttcaatggcaacagcaacaagtggcacagttttcaactgttcgacagaatgtgaacaaacatagaagtcactggaaatcacaacagttggatagtaatgtgacaatgccaaaatctgaagatgaagaaggctggaagaaattttgtctgggtgaaaagttatgtgctgacggggctgttggaccagccacaaatgaaagtcctggaatagattatgtacaaattggttttcctcccttgcttagtattgttagcagaatgaatcaggcaacagtaactagtgtcttggaatatctgagtaattggtttggagaaagagactttactccagaattgggaagatggctttatgctttattggcttgtcttgaaaagcctttgttacctgaggctcattcactgattcggcagcttgcaagaaggtgctctgaagtgaggctcttagtggatagcaaagatgatgagagggttcctgctttgaatttattaatctgcttggttagcaggtatagttaatccttggcttctttattatttatcagtgaggtcagtgaggttagatcgtatttattacatttggtttttgtttggttggtttttttttgagtctcactctgttgctatagttagggtgcagtggcgcaatcacagctcactagagctttaacttcctgggctccagcaatcctcccacctcagcctcctgagtagctaggaccacaaccaagcaccaccacacctggctaattaaaaaaaattgttcgtagagacagggtctcactgtgttgcccaggctggtctcaaaactcctgggctcaagcgatcctcccacctaagcctccgaaagtgcagggattacaggtgtaaagccactgcattcagcctgcatttttgtttaattgcctgtgtcctgcgttcattttcagttgtggcatatttttatttagtatctgttttatttcatttcttacatagaaattcttcttggaatttatttgaaaactttttttgttgttttgttttgagacagagtctgggcaacaagaacgaaactccatctcaaaaaaaaaagaa

SEQ ID NO: 432087 - DNA, 952 bp, Homo sapiens
taacgctccctaaactgccacttgctcagctccgcgcctaaggtgtctattagtgcgcctgcgctgtgacctagaatgggcgcatgcgccgagcggaactggctggtttgaaaaccatggcgtgggtaccagcggagtccgcagtggaagagttgatgcctcggctattgccggtagagccttgcgacttgacggaaggtttcgatccctcggtacccccgaggacgcctcaggaatacctgaggcgggtccagatcgaagcagctcaatgtccagatgttgtggtagctcaaattgacccaaagaagttgaaaaggaagcaaagtgtgaatatttctctttcaggatgccaacccgcccctgaaggttattccccaacacttcaatggcaacagcaacaagtggcacagttttcaactgttcgacagaatgtgaacaaacatagaagtcactggaaatcacaacagttggatagtaatgtgacaatgccaaaatctgaagatgaagaaggctggaagaaattttgtctgggtgaaaagttatgtgctgacggggctgttggaccagccacaaatgaaagtcctggaatagattatgtacaaattggttttcctcccttgcttagtattgttagcagaatgaatcaggcaacagtaactagtgtcttggaatatctgagtaattggtttggagaaagagactttactccagaattgggaagatggctttatgctttattggcttgtcttgaaaagcctttgttacctgaggctcattcactgattcggcagcttgcaagaaggtgctctgaagtgaggctcttagtgatagcaaagatgatgagagggttcctgcttagttgagatagttgaatctagcattcgttcctataaaagagagaggtccattgtgcgccccctttccagtgtagcagtggccttccgggactcct

SEQ ID NO: 432088 - DNA, 1281 bp, Homo sapiens
taacgctccctaaactgccacttgctcagctccgcgcctaaggtgtctattagtgcgcctgcgctgtgacctagaatgggcgcatgcgccgagcggaactggctggtttgaaaaccatggcgtgggtaccagcggagtccgcagtggaagagttgatgcctcggctattgccggtagagccttgcgacttgacggaaggtttcgatccctcggtacccccgaggacgcctcaggaatacctgaggcgggtccagatcgaagcagctcaatgtccagatgttgtggtagctcaaattgacccaaagaagttgaaaaggaagcaaagtgtgaatatttctctttcaggatgccaacccgcccctgaaggttattccccaacacttcaatggcaacagcaacaagtggcacagttttcaactgttcgacagaatgtgaacaaacatagaagtcactggaaatcacaacagttggatagtaatgtgacaatgccaaaatctgaagatgaagaaggctggaagaaattttgtctgggtgaaaagttatgtgctgacggggctgttggaccagccacaaatgaaagtcctggaatagattatgtacaaattggttttcctcccttgcttagtattgttagcagaatgaatcaggcaacagtaactagtgtcttggaatatctgagtaattggtttggagaaagagactttactccagaattgggaagatggctttatgctttattggcttgtcttgaaaagcctttgttacctgaggctcattcactgattcggcagcttgcaagaaggtgctctgaagtgaggctcttagtggatagcaaagatgatgagagggttcctgctttgaatttattaatctgcttggttagcaggtattttgaccaacgtgatttagctgatgagccatcttgatgtagctgatctctcagggatagaagatatttctcatgaaggcagcctaactctgaggaaaacaatgccaattcaagtacagatttcaacacatcttcaacactatgtgaagggttcacatcttaacctgtgcaattcagattgatactcagaatatgggttgatttgaatatctgaaatatcaatggaaaatcccactcagtttttgatgaacagtttgaacagttttctgtaatcaagcagcttgcatagaaattgtatgatgaaattttacataggttcttggtgctgttttgttctttttttgttttttgttgttttgttatttacttatatacatataaaattttattga

SEQ ID NO: 432089 - DNA, 1082 bp, Homo sapiens
taacgctccctaaactgccacttgctcagctccgcgcctaaggtgtctattagtgcgcctgcgctgtgacctagaatgggcgcatgcgccgagcggaactggctggtttgaaaaccatggcgtgggtaccagcggagtccgcagtggaagagttgatgcctcggctattgccggtagagccttgcgacttgacggaaggtttcgatccctcggtacccccgaggacgcctcaggaatacctgaggcgggtccagatcgaagcagctcaatgtccagatgttgtggtagctcaaattgacccaaagaagttgaaaaggaagcaaagtgtgaatatttctctttcaggatgccaacccgcccctgaaggttattccccaacacttcaatggcaacagcaacaagtggcacagttttcaactgttcgacagaatgtgaacaaacatagaagtcactggaaatcacaacagttggatagtaatgtgacaatgccaaaatctgaagatgaagaaggctggaagaaattttgtctgggtgaaaagttatgtgctgacggggctgttggaccagccacaaatgaaagtcctggaatagattatgtacaaattggttttcctcccttgcttagtattgttagcagaatgaatcaggcaacagtaactagtgtcttggaatatctgagtaattggtttggagaaagagactttactccagaattgggaagatggctttatgctttattggcttgtcttgaaaagcctttgttacctgaggctcattcactgattcggcagcttgcaagaaggtgctctgaagtgaggctcttagtggatagcaaagatgatgagagggttcctgctttgaatttattaatctgcttggttagcaggtattttgaccaacgtgatttagctgatgagccatcttgatgtagctgatctctcagggatagaagatatttctcatgaaggcagcctaactctgaggaaaacaatgccaattcaagtacagatttcaacacatcttcaacactatgtgaagggttcacatagtgttgcagtgtgctttccgggatcctctagtca

SEQ ID NO: 432090 - DNA, 1367 bp, Homo sapiens
taacgctccctaaactgccacttgctcagctccgcgcctaaggtgtctattagtgcgcctgcgctgtgacctagaatgggcgcatgcgccgagcggaactggctggtttgaaaaccatggcgtgggtaccagcggagtccgcagtggaagagttgatgcctcggctattgccggtagagccttgcgacttgacggaaggtttcgatccctcggtacccccgaggacgcctcaggaatacctgaggcgggtccagatcgaagcagctcaatgtccagatgttgtggtagctcaaattgacccaaagaagttgaaaaggaagcaaagtgtgaatatttctctttcaggatgccaacccgcccctgaaggttattccccaacacttcaatggcaacagcaacaagtggcacagttttcaactgttcgacagaatgtgaacaaacatagaagtcactggaaatcacaacagttggatagtaatgtgacaatgccaaaatctgaagatgaagaaggctggaagaaattttgtctgggtgaaaagttatgtgctgacggggctgttggaccagccacaaatgaaagtcctggaatagattatgtacaaattggttttcctcccttgcttagtattgttagcagaatgaatcagggaagatggctttatgctttattggcttgtcttgaaaagcctttgttacctgaggctcattcactgattcggcagcttgcaagaaggtgctctgaagtgaggctcttagtggatagcaaagatgatgagagggttcctgctttgaatttattaatctgcttggttagcaggtattttgaccaacgtgatttagctgatgagccatcttgatgtagctgatctctcagggatagaagatatttctcatgaaggcagcctaactctgaggaaaacaatgccaattcaagtacagatttcaacacatcttcaacactatgtgaagggttcacatcttaacctgtgcaattcagattgatactcagaatatgggttgatttgaatatctgaaatatcaatggaaaatcccactcagtttttgatgaacagtttgaacagttttctgtaatcaagcagcttgcatagaaattgtatgatgaaattttacataggttcttggtgctgttttgttctttttttgttttttgttgttttgttatttacttatatacatataaaattttattgaaaatatgttttggttactaaaattttgtttgactcctaacaaaagacaatggatggccttagcatcagaattaaaataatctggattaaatggcaatgtgttcatagtcagcaataaaattaaacatttttccctttaagctcagcacttttttt

SEQ ID NO: 432091 - DNA, 2061 bp, Homo sapiens
taacgctccctaaactgccacttgctcagctccgcgcctaaggtgtctattagtgcgcctgcgctgtgacctagaatgggcgcatgcgccgagcggaactggctggtttgaaaaccatggcgtgggtaccagcggagtccgcagtggaagagttgatgcctcggctattgccggtagagccttgcgacttgacggaaggtttcgatccctcggtacccccgaggacgcctcaggaatacctgaggcgggtccagatcgaagcagctcaatgtccagatgttgtggtagctcaaattgacccaaagaagttgaaaaggaagcaaagtgtgaatatttctctttcaggatgccaacccgcccctgaaggttattccccaacacttcaatggcaacagcaacaagtggcacagttttcaactgttcgacagaatgtgaacaaacatagaagtcactggaaatcacaacagttggatagtaatgtgacaatgccaaaatctgaagatgaagaaggctggaagaaattttgtctgggtgaaaagttatgtgctgacggggctgttggaccagccacaaatgaaagtcctggaatagattatgtacaaattggttttcctcccttgcttagtattgttagcagaatgaatcaggcaacagtaactagtgtcttggaatatctgagtaattggtttggagaaagagactttactccagaattgggaagatggctttatgctttattggcttgtcttgaaaagcctttgttacctgaggctcattcactgattcggcagcttgcaagaaggtgctctgaagtgaggctcttagtggatagcaaagatgatgagagggttcctgctttgaatttattaatctgcttggttagcaggtatagttaatccttggcttctttattatttatcagtgagtctcactctgttgctatagttagggtgcagtggcgcaatcacagctcactagagctttaacttcctgggctccagcaatcctcccacctcagcctcctgagtagctaggaccacaaccaagcaccaccacacctggctaattaaaaaaaattgttcgtagagacagggtctcactgtgttgcccaggctggtctcaaaactcctgggctcaagcgatcctcccacctaagcctccgaaagtgcagggattacaggtgtaaagccactgcattcagcctgcatttttgtttaattgcctgtgtcctgcgttcattttcagttgtggcatatttttatttagtatctgttttatttcatttcttacatagaaattcttcttggaatttatttgaaaactttttttgttgttttgttttgagacagagtctcgctctgttgcccaggctggagtgcaatggcaccatctcggctcactacaaccttcacctcctgggttcaagcaattctcccccctcagcctcccaagtagctgggattacaggcacctgccatcatgcccggctaatttttgtaattttgtggagacggagtttcaccattattggccaggcagtaaaacacacatatttattttaggtctcctcctggacatatttttgttccatagatcagtgtttttatttcattgccagtacctttttaaagctttataatatacttaaatattgggaaggcaagtaatcttgtttccatattttcacatattcaatatctagtttcttgatctacaataattatgctgctgatgataattaacatttactgggcaatttgtgccaagcatttttcttagtgaggaacccatttaatccttctaaggtgggtactgttaacagtttacagatgaggaaaccatggcagagagaggttaaataatattactaccatcacaaagctagtaagtgttagagtaatgatccaaacccaggcaactttgactccggagctaaacttttaactatgctgatcaaaaattaagctaatacctacctcatctgttggtagtagcagttaaatgagatgatatagcattgccctacttactttatgtatagtatctctactctttacaata

SEQ ID NO: 432092 - DNA, 1253 bp, Homo sapiens
taacgctccctaaactgccacttgctcagctccgcgcctaaggtgtctattagtgcgcctgcgctgtgacctagaatgggcgcatgcgccgagcggaactggctggtttgaaaaccatggcgtgggtaccagcggagtccgcagtggaagagttgatgcctcggctattgccggtagagccttgcgacttgacggaaggtttcgatccctcggtacccccgaggacgcctcaggaatacctgaggcgggtccagatcgaagcagctcaatgtccagatgttgtggtagctcaaattgacccaaagaagttgaaaaggaagcaaagtgtgaatatttctctttcaggatgccaacccgcccctgaaggttattccccaacacttcaatggcaacagcaacaagtggcacagttttcaactgttcgacagaatgtgaacaaacatagaagtcactggaaatcacaacagttggatagtaatgtgacaatgattggttttcctcccttgcttagtattgttagcagaatgaatcagggaagatggctttatgctttattggcttgtcttgaaaagcctttgttacctgaggctcattcactgattcggcagcttgcaagaaggtgctctgaagtgaggctcttagtggatagcaaagatgatgagagggttcctgctttgaatttattaatctgcttggttagcaggtattttgaccaacgtgatttagctgatgagccatcttgatgtagctgatctctcagggatagaagatatttctcatgaaggcagcctaactctgaggaaaacaatgccaattcaagtacagatttcaacacatcttcaacactatgtgaagggttcacatcttaacctgtgcaattcagattgatactcagaatatgggttgatttgaatatctgaaatatcaatggaaaatcccactcagtttttgatgaacagtttgaacagttttctgtaatcaagcagcttgcatagaaattgtatgatgaaattttacataggttcttggtgctgttttgttctttttttgttttttgttgttttgttatttacttatatacatataaaattttattgaaaatatgttttggttactaaaattttgtttgactcctaacaaaagacaatggatggccttagcatcagaattaaaataatctggattaaatggcaatgtgttcatagtcagcaataaaattaaacatttttccctttaagctcagcacttttttt

SEQ ID NO: 432093 - DNA, 2304 bp, Homo sapiens
cgcgtgcgcaggccgcggtgcggccctggcggccgttgaaaaatggcgactgtggcagagttgaaggctgttttaaaggacaccttggaaaaaaagggggtattagggcatttaaaagcaaggatccgagctgaagttttcaatgccctagatgatgaccgtgaaccccgaccatcattgtctcatgaaaaccttctaattaatgaattaattcgagagtatttagaattcaacaaatataagtatacagcatctgtcctcatagcagaatctggtcaacctgtagttccgttggacagacagtttctcatccatgaactaaatgcatttgaagaatcaaaggataatacaatacctcttttatatgggattttagcccatttcttgcgtggaactaaggatggcatccagaatgcatttctgaaagggccttcacttcagccttcagacccaagtcttggcagacaacctagtagaagaaagccaatggatgaccacctaagaaaggaggaacagaaaagtactaacattgaagatcttcatgtttctcaggcagtcaacagataatgctttgtttggggtatcttttgtcttaaaattgtattattaattaaataacttatttattgtcccaatgttaccaaaatgcaccactaatgtttgtagaaattggagtttctacaaaacacccctcatgtttaactacatttgtgaataaaagctaactcttgtcatctagcttattggatttgacttgaaaaaaaaagtattgtttttacgaagtattttttgtttttttgagatggagtctcgctctgtcacccagactggagtgcagtggcacgatctcggctcactgcaatctctgcctcccggattcaagtgattctcctgcctcagcctcccaagtagctgggaaaacaggcctgtgccaccacaccggagtagtttttgtatttttagtagagatggggtttcaccatgctggccaggctggtcttgaactcctgacctcaggtgatctgtgtgccccagcctcccaaagcgctgggattacaggtgtgagccactgagcccagccatttaggaagtattataaaggcccttaaagtttgtaaggaaatgaaagggctttgtattaccttttcaataggcaacaatgtactttttctttccttagactttggcttactggaagatttaattaaaaggtagaggagaagtaaatttgctgtaataattttgctgtaaataaaacaaagagtttattttattagataaagaatgtgaagtaagcatgaagagacaggctttgggagaaataccagaaagggatttttcaaagatggcattgtttaatctccgtgtggccctcggttgtgcaatcacagatgagccagaagagggccagccccctacttgtttgggctccgaaactcttaccaaacatcaatttttattcttgggatagaaaaatagtatgtgctatctctaatacgctacttcgatatttattaaagaagtatttttaatgtagtgtccacaggctcatttcattgaaaacaactgactatgatgatagacagctcctgattggcaaaagttcgatggtatattcagaattaaattttgcctgcgcacctaaacactgacaacatttagcttaaaggttttccatggagaagagtggtaagagctgtagttagcaaaattggcatcctctttagggtgtcaattctgtgctgctttgcaaattgttgaaacttttgattttctgtttggcaatgctagtcagtgttcacttcttacagattagccaagaatttttatctaaatgcagaaacttattaatgaaatccatttaaactatacttacacaacattttgggaggccctgctggtaaaattatatatggatgcagaagtattgcaagagtccattttccatttttaaatctgcaatatctgattacattgatgaattccgttgtattgtatgtgtgaatataaatatctgaattctcccgggggacttggttttcgtccaaggatgttggcagtggacacttagtttacctcaggaattgcaatcatgtaagactatattcggaaaaaatgctggagtatataattttggatactgatataaaatcatcaagatggaagttaagcagaattgtcacgtgtagtccatagcgcttttatatgcattattctgtaatttgtttgtactgcggcaactttttatactttcaatgtatcatttaataaaaaaaataagcaagtcactttggtgcaaagggt

SEQ ID NO: 432094 - DNA, 2219 bp, Homo sapiens
cgcgtgcgcaggccgcggtgcggccctggcggccgttgaaaaatggcgactgtggcagagttgaaggctgttttaaaggacaccttggaaaaaaagggggtattagggcatttaaaagcaaggatccgagctgaagttttcaatgccctagatgatgaccgtgaaccccgaccatcattgtctcatgaaaaccttctaattaatgaattaattcgagagtatttagaattcaacaaatataagtatacagcatctgtcctcatagcagacctcttttatatgggattttagcccatttcttgcgtggaactaaggatggcatccagaatgcatttctgaaagggccttcacttcagccttcagacccaagtcttggcagacaacctagtagaagaaagccaatggatgaccacctaagaaaggaggaacagaaaagtactaacattgaagatcttcatgtttctcaggcagtcaacagataatgctttgtttggggtatcttttgtcttaaaattgtattattaattaaataacttatttattgtcccaatgttaccaaaatgcaccactaatgtttgtagaaattggagtttctacaaaacacccctcatgtttaactacatttgtgaataaaagctaactcttgtcatctagcttattggatttgacttgaaaaaaaaagtattgtttttacgaagtattttttgtttttttgagatggagtctcgctctgtcacccagactggagtgcagtggcacgatctcggctcactgcaatctctgcctcccggattcaagtgattctcctgcctcagcctcccaagtagctgggaaaacaggcctgtgccaccacaccggagtagtttttgtatttttagtagagatggggtttcaccatgctggccaggctggtcttgaactcctgacctcaggtgatctgtgtgccccagcctcccaaagcgctgggattacaggtgtgagccactgagcccagccatttaggaagtattataaaggcccttaaagtttgtaaggaaatgaaagggctttgtattaccttttcaataggcaacaatgtactttttctttccttagactttggcttactggaagatttaattaaaaggtagaggagaagtaaatttgctgtaataattttgctgtaaataaaacaaagagtttattttattagataaagaatgtgaagtaagcatgaagagacaggctttgggagaaataccagaaagggatttttcaaagatggcattgtttaatctccgtgtggccctcggttgtgcaatcacagatgagccagaagagggccagccccctacttgtttgggctccgaaactcttaccaaacatcaatttttattcttgggatagaaaaatagtatgtgctatctctaatacgctacttcgatatttattaaagaagtatttttaatgtagtgtccacaggctcatttcattgaaaacaactgactatgatgatagacagctcctgattggcaaaagttcgatggtatattcagaattaaattttgcctgcgcacctaaacactgacaacatttagcttaaaggttttccatggagaagagtggtaagagctgtagttagcaaaattggcatcctctttagggtgtcaattctgtgctgctttgcaaattgttgaaacttttgattttctgtttggcaatgctagtcagtgttcacttcttacagattagccaagaatttttatctaaatgcagaaacttattaatgaaatccatttaaactatacttacacaacattttgggaggccctgctggtaaaattatatatggatgcagaagtattgcaagagtccattttccatttttaaatctgcaatatctgattacattgatgaattccgttgtattgtatgtgtgaatataaatatctgaattctcccgggggacttggttttcgtccaaggatgttggcagtggacacttagtttacctcaggaattgcaatcatgtaagactatattcggaaaaaatgctggagtatataattttggatactgatataaaatcatcaagatggaagttaagcagaattgtcacgtgtagtccatagcgcttttatatgcattattctgtaatttgtttgtactgcggcaactttttatactttcaatgtatcatttaataaaaaaaataagcaagtcactttggtgcaaagggt

SEQ ID NO: 432095 - DNA, 2082 bp, Homo sapiens
cgcgtgcgcaggccgcggtgcggccctggcggccgttgaaaaatggcgactgtggcagagttgaaggctgttttaaaggacaccttggaaaaaaagggggtattagggcatttaaaagcaaggatccgagctgaagttttcaatgccctagatgatgaccgtgaaccccgaccatcattgtctcatgaaaaccttctaattaatgaattaattcgagagtatttagaattcaacaaatataagtatacagcatctgtcctcatagcagatgaccacctaagaaaggaggaacagaaaagtactaacattgaagatcttcatgtttctcaggcagtcaacagataatgctttgtttggggtatcttttgtcttaaaattgtattattaattaaataacttatttattgtcccaatgttaccaaaatgcaccactaatgtttgtagaaattggagtttctacaaaacacccctcatgtttaactacatttgtgaataaaagctaactcttgtcatctagcttattggatttgacttgaaaaaaaaagtattgtttttacgaagtattttttgtttttttgagatggagtctcgctctgtcacccagactggagtgcagtggcacgatctcggctcactgcaatctctgcctcccggattcaagtgattctcctgcctcagcctcccaagtagctgggaaaacaggcctgtgccaccacaccggagtagtttttgtatttttagtagagatggggtttcaccatgctggccaggctggtcttgaactcctgacctcaggtgatctgtgtgccccagcctcccaaagcgctgggattacaggtgtgagccactgagcccagccatttaggaagtattataaaggcccttaaagtttgtaaggaaatgaaagggctttgtattaccttttcaataggcaacaatgtactttttctttccttagactttggcttactggaagatttaattaaaaggtagaggagaagtaaatttgctgtaataattttgctgtaaataaaacaaagagtttattttattagataaagaatgtgaagtaagcatgaagagacaggctttgggagaaataccagaaagggatttttcaaagatggcattgtttaatctccgtgtggccctcggttgtgcaatcacagatgagccagaagagggccagccccctacttgtttgggctccgaaactcttaccaaacatcaatttttattcttgggatagaaaaatagtatgtgctatctctaatacgctacttcgatatttattaaagaagtatttttaatgtagtgtccacaggctcatttcattgaaaacaactgactatgatgatagacagctcctgattggcaaaagttcgatggtatattcagaattaaattttgcctgcgcacctaaacactgacaacatttagcttaaaggttttccatggagaagagtggtaagagctgtagttagcaaaattggcatcctctttagggtgtcaattctgtgctgctttgcaaattgttgaaacttttgattttctgtttggcaatgctagtcagtgttcacttcttacagattagccaagaatttttatctaaatgcagaaacttattaatgaaatccatttaaactatacttacacaacattttgggaggccctgctggtaaaattatatatggatgcagaagtattgcaagagtccattttccatttttaaatctgcaatatctgattacattgatgaattccgttgtattgtatgtgtgaatataaatatctgaattctcccgggggacttggttttcgtccaaggatgttggcagtggacacttagtttacctcaggaattgcaatcatgtaagactatattcggaaaaaatgctggagtatataattttggatactgatataaaatcatcaagatggaagttaagcagaattgtcacgtgtagtccatagcgcttttatatgcattattctgtaatttgtttgtactgcggcaactttttatactttcaatgtatcatttaataaaaaaaataagcaagtcactttggtgcaaagggt

SEQ ID NO: 432096 - DNA, 2239 bp, Homo sapiens
cgcgtgcgcaggccgcggtgcggccctggcggccgttgaaaaatggcgactgtggcagagttgaaggctgttttaaaggacaccttggaaaaaaagggggtattagggcatttaaaagcaaggatccgagctgaagttttcaatgccctagatgatgaccgtgaaccccgaccatcattgtctcatgaaaaccttctaattaatgaattaattcgagagtatttagaattcaacaaatataagtatacagcatctgtcctcatagcagctcactgcatcctccgcctcctgggttcaagcagttctcctgcctcagcctcccgagtacctggaactacagaatctggtcaacctgtagttccgttggacagacagtttctcatccatgaactaaatgcatttgaagaatcaaaggataatacaatatgaccacctaagaaaggaggaacagaaaagtactaacattgaagatcttcatgtttctcaggcagtcaacagataatgctttgtttggggtatcttttgtcttaaaattgtattattaattaaataacttatttattgtcccaatgttaccaaaatgcaccactaatgtttgtagaaattggagtttctacaaaacacccctcatgtttaactacatttgtgaataaaagctaactcttgtcatctagcttattggatttgacttgaaaaaaaaagtattgtttttacgaagtattttttgtttttttgagatggagtctcgctctgtcacccagactggagtgcagtggcacgatctcggctcactgcaatctctgcctcccggattcaagtgattctcctgcctcagcctcccaagtagctgggaaaacaggcctgtgccaccacaccggagtagtttttgtatttttagtagagatggggtttcaccatgctggccaggctggtcttgaactcctgacctcaggtgatctgtgtgccccagcctcccaaagcgctgggattacaggtgtgagccactgagcccagccatttaggaagtattataaaggcccttaaagtttgtaaggaaatgaaagggctttgtattaccttttcaataggcaacaatgtactttttctttccttagactttggcttactggaagatttaattaaaaggtagaggagaagtaaatttgctgtaataattttgctgtaaataaaacaaagagtttattttattagataaagaatgtgaagtaagcatgaagagacaggctttgggagaaataccagaaagggatttttcaaagatggcattgtttaatctccgtgtggccctcggttgtgcaatcacagatgagccagaagagggccagccccctacttgtttgggctccgaaactcttaccaaacatcaatttttattcttgggatagaaaaatagtatgtgctatctctaatacgctacttcgatatttattaaagaagtatttttaatgtagtgtccacaggctcatttcattgaaaacaactgactatgatgatagacagctcctgattggcaaaagttcgatggtatattcagaattaaattttgcctgcgcacctaaacactgacaacatttagcttaaaggttttccatggagaagagtggtaagagctgtagttagcaaaattggcatcctctttagggtgtcaattctgtgctgctttgcaaattgttgaaacttttgattttctgtttggcaatgctagtcagtgttcacttcttacagattagccaagaatttttatctaaatgcagaaacttattaatgaaatccatttaaactatacttacacaacattttgggaggccctgctggtaaaattatatatggatgcagaagtattgcaagagtccattttccatttttaaatctgcaatatctgattacattgatgaattccgttgtattgtatgtgtgaatataaatatctgaattctcccgggggacttggttttcgtccaaggatgttggcagtggacacttagtttacctcaggaattgcaatcatgtaagactatattcggaaaaaatgctggagtatataattttggatactgatataaaatcatcaagatggaagttaagcagaattgtcacgtgtagtccatagcgcttttatatgcattattctgtaatttgtttgtactgcggcaactttttatactttcaatgtatcatttaataaaaaaaataagcaagtcactttggtgcaaagggt

SEQ ID NO: 432097 - DNA, 2167 bp, Homo sapiens
cgcgtgcgcaggccgcggtgcggccctggcggccgttgaaaaatggcgactgtggcagagttgaaggctgttttaaaggacaccttggaaaaaaagggggtattagggcatttaaaagcaaggatccgagctgaagttttcaatgccctagatgatgaccgtgaaccccgaccatcattgtctcatgaaaaccttctaattaatgaattaattcgagagtatttagaattcaacaaatataagtatacagcatctgtcctcatagcagaatctggtcaacctgtagttccgttggacagacagtttctcatccatgaactaaatgcatttgaagaatcaaaggataatacaatatgaccacctaagaaaggaggaacagaaaagtactaacattgaagatcttcatgtttctcaggcagtcaacagataatgctttgtttggggtatcttttgtcttaaaattgtattattaattaaataacttatttattgtcccaatgttaccaaaatgcaccactaatgtttgtagaaattggagtttctacaaaacacccctcatgtttaactacatttgtgaataaaagctaactcttgtcatctagcttattggatttgacttgaaaaaaaaagtattgtttttacgaagtattttttgtttttttgagatggagtctcgctctgtcacccagactggagtgcagtggcacgatctcggctcactgcaatctctgcctcccggattcaagtgattctcctgcctcagcctcccaagtagctgggaaaacaggcctgtgccaccacaccggagtagtttttgtatttttagtagagatggggtttcaccatgctggccaggctggtcttgaactcctgacctcaggtgatctgtgtgccccagcctcccaaagcgctgggattacaggtgtgagccactgagcccagccatttaggaagtattataaaggcccttaaagtttgtaaggaaatgaaagggctttgtattaccttttcaataggcaacaatgtactttttctttccttagactttggcttactggaagatttaattaaaaggtagaggagaagtaaatttgctgtaataattttgctgtaaataaaacaaagagtttattttattagataaagaatgtgaagtaagcatgaagagacaggctttgggagaaataccagaaagggatttttcaaagatggcattgtttaatctccgtgtggccctcggttgtgcaatcacagatgagccagaagagggccagccccctacttgtttgggctccgaaactcttaccaaacatcaatttttattcttgggatagaaaaatagtatgtgctatctctaatacgctacttcgatatttattaaagaagtatttttaatgtagtgtccacaggctcatttcattgaaaacaactgactatgatgatagacagctcctgattggcaaaagttcgatggtatattcagaattaaattttgcctgcgcacctaaacactgacaacatttagcttaaaggttttccatggagaagagtggtaagagctgtagttagcaaaattggcatcctctttagggtgtcaattctgtgctgctttgcaaattgttgaaacttttgattttctgtttggcaatgctagtcagtgttcacttcttacagattagccaagaatttttatctaaatgcagaaacttattaatgaaatccatttaaactatacttacacaacattttgggaggccctgctggtaaaattatatatggatgcagaagtattgcaagagtccattttccatttttaaatctgcaatatctgattacattgatgaattccgttgtattgtatgtgtgaatataaatatctgaattctcccgggggacttggttttcgtccaaggatgttggcagtggacacttagtttacctcaggaattgcaatcatgtaagactatattcggaaaaaatgctggagtatataattttggatactgatataaaatcatcaagatggaagttaagcagaattgtcacgtgtagtccatagcgcttttatatgcattattctgtaatttgtttgtactgcggcaactttttatactttcaatgtatcatttaataaaaaaaataagcaagtcactttggtgcaaagggt

SEQ ID NO: 432098 - DNA, 2399 bp, Homo sapiens
gaagtgccttaagtagactcttcatttacttttctggtaatggtttaaatatcatttgttatgcatttttaagatacagttcagaatgacacattgatatggtcaaaaagcaaacagccagacatttgcgttgaaaaatggcgactgtggcagagttgaaggctgttttaaaggacaccttggaaaaaaagggggtattagggcatttaaaagcaaggatccgagctgaagttttcaatgccctagatgatgaccgtgaaccccgaccatcattgtctcatgaaaaccttctaattaatgaattaattcgagagtatttagaattcaacaaatataagtatacagcatctgtcctcatagcagaatctggtcaacctgtagttccgttggacagacagtttctcatccatgaactaaatgcatttgaagaatcaaaggataatacaatacctcttttatatgggattttagcccatttcttgcgtggaactaaggatggcatccagaatgcatttctgaaagggccttcacttcagccttcagacccaagtcttggcagacaacctagtagaagaaagccaatggatgaccacctaagaaaggaggaacagaaaagtactaacattgaagatcttcatgtttctcaggcagtcaacagataatgctttgtttggggtatcttttgtcttaaaattgtattattaattaaataacttatttattgtcccaatgttaccaaaatgcaccactaatgtttgtagaaattggagtttctacaaaacacccctcatgtttaactacatttgtgaataaaagctaactcttgtcatctagcttattggatttgacttgaaaaaaaaagtattgtttttacgaagtattttttgtttttttgagatggagtctcgctctgtcacccagactggagtgcagtggcacgatctcggctcactgcaatctctgcctcccggattcaagtgattctcctgcctcagcctcccaagtagctgggaaaacaggcctgtgccaccacaccggagtagtttttgtatttttagtagagatggggtttcaccatgctggccaggctggtcttgaactcctgacctcaggtgatctgtgtgccccagcctcccaaagcgctgggattacaggtgtgagccactgagcccagccatttaggaagtattataaaggcccttaaagtttgtaaggaaatgaaagggctttgtattaccttttcaataggcaacaatgtactttttctttccttagactttggcttactggaagatttaattaaaaggtagaggagaagtaaatttgctgtaataattttgctgtaaataaaacaaagagtttattttattagataaagaatgtgaagtaagcatgaagagacaggctttgggagaaataccagaaagggatttttcaaagatggcattgtttaatctccgtgtggccctcggttgtgcaatcacagatgagccagaagagggccagccccctacttgtttgggctccgaaactcttaccaaacatcaatttttattcttgggatagaaaaatagtatgtgctatctctaatacgctacttcgatatttattaaagaagtatttttaatgtagtgtccacaggctcatttcattgaaaacaactgactatgatgatagacagctcctgattggcaaaagttcgatggtatattcagaattaaattttgcctgcgcacctaaacactgacaacatttagcttaaaggttttccatggagaagagtggtaagagctgtagttagcaaaattggcatcctctttagggtgtcaattctgtgctgctttgcaaattgttgaaacttttgattttctgtttggcaatgctagtcagtgttcacttcttacagattagccaagaatttttatctaaatgcagaaacttattaatgaaatccatttaaactatacttacacaacattttgggaggccctgctggtaaaattatatatggatgcagaagtattgcaagagtccattttccatttttaaatctgcaatatctgattacattgatgaattccgttgtattgtatgtgtgaatataaatatctgaattctcccgggggacttggttttcgtccaaggatgttggcagtggacacttagtttacctcaggaattgcaatcatgtaagactatattcggaaaaaatgctggagtatataattttggatactgatataaaatcatcaagatggaagttaagcagaattgtcacgtgtagtccatagcgcttttatatgcattattctgtaatttgtttgtactgcggcaactttttatactttcaatgtatcatttaataaaaaaaataagcaagtcactttggtgcaaagggt

SEQ ID NO: 432099 - DNA, 2376 bp, Homo sapiens
cgcgtgcgcaggccgcggtgcggccctggcggccgttgaaaaatggcgactgtggcagagttgaaggctgttttaaaggacaccttggaaaaaaagggggtattagggcatttaaaagcaaggatccgagctgaagttttcaatgccctagatgatgaccgtgaaccccgaccatcattgtctcatgaaaaccttctaattaatgaattaattcgagagtatttagaattcaacaaatataagtatacagcatctgtcctcatagcagctcactgcatcctccgcctcctgggttcaagcagttctcctgcctcagcctcccgagtacctggaactacagaatctggtcaacctgtagttccgttggacagacagtttctcatccatgaactaaatgcatttgaagaatcaaaggataatacaatacctcttttatatgggattttagcccatttcttgcgtggaactaaggatggcatccagaatgcatttctgaaagggccttcacttcagccttcagacccaagtcttggcagacaacctagtagaagaaagccaatggatgaccacctaagaaaggaggaacagaaaagtactaacattgaagatcttcatgtttctcaggcagtcaacagataatgctttgtttggggtatcttttgtcttaaaattgtattattaattaaataacttatttattgtcccaatgttaccaaaatgcaccactaatgtttgtagaaattggagtttctacaaaacacccctcatgtttaactacatttgtgaataaaagctaactcttgtcatctagcttattggatttgacttgaaaaaaaaagtattgtttttacgaagtattttttgtttttttgagatggagtctcgctctgtcacccagactggagtgcagtggcacgatctcggctcactgcaatctctgcctcccggattcaagtgattctcctgcctcagcctcccaagtagctgggaaaacaggcctgtgccaccacaccggagtagtttttgtatttttagtagagatggggtttcaccatgctggccaggctggtcttgaactcctgacctcaggtgatctgtgtgccccagcctcccaaagcgctgggattacaggtgtgagccactgagcccagccatttaggaagtattataaaggcccttaaagtttgtaaggaaatgaaagggctttgtattaccttttcaataggcaacaatgtactttttctttccttagactttggcttactggaagatttaattaaaaggtagaggagaagtaaatttgctgtaataattttgctgtaaataaaacaaagagtttattttattagataaagaatgtgaagtaagcatgaagagacaggctttgggagaaataccagaaagggatttttcaaagatggcattgtttaatctccgtgtggccctcggttgtgcaatcacagatgagccagaagagggccagccccctacttgtttgggctccgaaactcttaccaaacatcaatttttattcttgggatagaaaaatagtatgtgctatctctaatacgctacttcgatatttattaaagaagtatttttaatgtagtgtccacaggctcatttcattgaaaacaactgactatgatgatagacagctcctgattggcaaaagttcgatggtatattcagaattaaattttgcctgcgcacctaaacactgacaacatttagcttaaaggttttccatggagaagagtggtaagagctgtagttagcaaaattggcatcctctttagggtgtcaattctgtgctgctttgcaaattgttgaaacttttgattttctgtttggcaatgctagtcagtgttcacttcttacagattagccaagaatttttatctaaatgcagaaacttattaatgaaatccatttaaactatacttacacaacattttgggaggccctgctggtaaaattatatatggatgcagaagtattgcaagagtccattttccatttttaaatctgcaatatctgattacattgatgaattccgttgtattgtatgtgtgaatataaatatctgaattctcccgggggacttggttttcgtccaaggatgttggcagtggacacttagtttacctcaggaattgcaatcatgtaagactatattcggaaaaaatgctggagtatataattttggatactgatataaaatcatcaagatggaagttaagcagaattgtcacgtgtagtccatagcgcttttatatgcattattctgtaatttgtttgtactgcggcaactttttatactttcaatgtatcatttaataaaaaaaataagcaagtcactttggtgcaaagggt

SEQ ID NO: 432100 - DNA, 2470 bp, Homo sapiens
gaagtgccttaagtagactcttcatttacttttctggtaatggtttaaatatcatttgttatgcatttttaagatacagttcagaatgacacattgatatggtcaaaaagcaaacagccagacatttgcgttgaaaaatggcgactgtggcagagttgaaggctgttttaaaggacaccttggaaaaaaagggggtattagggcatttaaaagcaaggatccgagctgaagttttcaatgccctagatgatgaccgtgaaccccgaccatcattgtctcatgaaaaccttctaattaatgaattaattcgagagtatttagaattcaacaaatataagtatacagcatctgtcctcatagcagaatctggtcaacctgtagttccgttggacagacagtttctcatccatgaactaaatgcatttgaagaatcaaaggataatacaatacctcttttatatgggattttagcccatttcttgcgtggaactaaggatggcatccagaatgcatttctgaaagggccttcacttcagccttcagacccaagtcttggcagacaacctagtagaagaaagccaatggatgaccacctaagaaaggaggaacagaaaagtactaacattgaagatcttcatgtttctcaggcagtcaacagataatgctttgtttggggtatcttttgtcttaaaattgtattattaattaaataacttatttattgtcccaatgttaccaaaatgcaccactaatgtttgtagaaattggagtttctacaaaacacccctcatgtttaactacatttgtgaataaaagctaactcttgtcatctagcttattggatttgacttgaaaaaaaaagtattgtttttacgaagtattttttgtttttttgagatggagtctcgctctgtcacccagactggagtgcagtggcacgatctcggctcactgcaatctctgcctcccggattcaagtgattctcctgcctcagcctcccaagtagctgggaaaacaggcctgtgccaccacaccggagtagtttttgtatttttagtagagatggggtttcaccatgctggccaggctggtcttgaactcctgacctcaggtgatctgtgtgccccagcctcccaaagcgctgggattacaggtgtgagccactgagcccagccatttaggaagtattataaaggcccttaaagtttgtaaggaaatgaaagggctttgtattaccttttcaataggcaacaatgtactttttctttccttagactttggcttactggaagatttaattaaaaggtagaggagaagtaaatttgctgtaataattttgctgtaaataaaacaaagagtttattttattagataaagaatgtgaagtaagcatgaagagacaggctttgggagaaataccagaaagggatttttcaaagatggcattgtttaatctccgtgtggccctcggttgtgcaatcacagatgagccagaagagggccagccccctacttgtttgggctccgaaactcttaccaaacatcaatttttattcttgggatagaaaaatagtatgtgctatctctaatacgctacttcgatatttattaaagaagtatttttaatgtagtgtccacaggctcatttcattgaaaacaactgactatgatgatagacagctcctgattggcaaaagttcgatggtatattcagaattaaattttgcctgcgcacctaaacactgacaacatttagcttaaaggttttccatggagaagagtggtaagagctgtagttagcaaaattggcatcctctttagggtgtcaattctgtgctgctttgcaaattgttgaaacttttgattttctgtttggcaatgctagtcagtgttcacttcttacagattagccaagaatttttatctaaatgcagaaacttattaatgaaatccatttaaactatacttacacaacattttgggaggccctgctggtaaaattatatatggatgcagaagtattgcaagagtccattttccatttttaaatctgcaatatctgattacattgatgaattccgttgtattgtatgtgtgaatataaatatctgaattctcccgggggacttggttttcgtccaaggatgttggcagtggacacttagtttacctcaggaattgcaatcatgtttgcatggcttctggggcaaaaatgttcctcaaagcttggattaaatacatatggatgttactctcttgcaccaaattatcttgatacattcaaatttgtctggttaaaaaataggtggtagatattgaggccaagaatattgcaaaatacatgaagcttcatgcacttaaagaagtatttttagaataagaatttgcatacttacctagtgaaactttcctagaattatttttcactctaagtcatgtatgtttctcttcgactatttgcatgttatg

SEQ ID NO: 432101 - DNA, 367 bp, Homo sapiens
gagacgagggcgggcgctcagggacggttcgaacagtctgggcctagtcaatgtaaagacaatgaggatgaagacctttatgaagatgacttccacttaatgaatacagcattctacatccaggtaccagctttatgatagtgagagaagaggaacaagacaccatgtcttgccaatgcccgtctagcatgcgtggagtgcatatacagctacaagtcctagtggcagcccactcctgattcctggctcacacagtggtgccctcctgaagccaacagttcctgtggaagctgcctgacactctacagtgactttcctgattgtgatagaggtggcagccattaaaaaaaaaaagaaaaaagaatgg

SEQ ID NO: 432102 - DNA, 2205 bp, Homo sapiens
tgcgcggttgcgtagcagctgcgaggacgcggggcgagccggaagtggagtgcgctgcggcgcgagctgggccggcgggcgtggttcgagagcgcgcagagtccagactggcggcagggcccgaggggccgacccgcagcgtccctggtctctccagccctcactcggaaccgcactgacaataccctcccctcccttgggctggacccctctctacagctaggagccaatggcagaagacaaaaccaaaccgagtgagttggaccaagggaagtatgatgctgatgacaacgtgaagatcatctgcctgggagacagcgcagtgggcaaatccaaactcatggagagatttctcatggatggctttcagccacagcagctgtccacgtacgccctgaccctgtacaagcacacagccacggtagatggcaagaccatccttgtggacttttgggacacggcaggccaggagcggttccagagcatgcatgcctcctactaccacaaggcccatgcctgcatcatggtgtttgatatacagaggaaagtcacctataggaacctgagcacctggtatacagagcttcgggagttcaggccagagatcccatgcatcgtggtggccaataaaattgatgagacataaacgtgacccaaaaaagcttcaattttgccaagaagttctccctgcccctgtatttcgtctcggctgctgatggtaccaatgttgtgaagctcttcaatgatgcaattcgattagctgtgtcttacaaacagaactcccaggacttcatggatgagatttttcaggagctcgagaacttcagcttggagcaggaagaggaggacgtgccagaccaggaacagagcagcagcatcgagaccccatcagaggaggtggcctctccccacagctgaggggctggggctaggggtgggtggagcccttttaaaatacccttcccttcaacaactctccagctctgaatggagaaactctctaggccatcccctcttctacctcctgcaacccacccatcctattagcctcccacattcaaggcccgtgatacagggatgaggtcagcaccagcaaactctggactggtggaagaattccccaccagatctccttgaagcagaattagggatcagcatcattaacaccttccccaccccctccccccaggcagacagtgaagagaatcagaaaacatgattatgtgtcactttaatacaggaaatttaggtgttttttggtgtttttgtttttgtttttgttttctttccaaagctcacctcggggacaattccttgggcttctcctgaggtaatgattacccccccacccacagctgagtctgtgaggccccatcctttccctacgttttctcccatcttttttcctcttcagtctcccagtcatctggtttgtttgtttctttgttcgtcctgagacggagtctcgctctgtcgccaggctggagtgcagtggcgcagtctcggctcgctgcaacctctgactccctggttcaaacgattctcctgcctcagcctcccgagtggctggcatcaccacgcccagctaatttttgtatttttagtagagacggggtttcaccatgttgcccaggatggtctcgatctcctcacctcgtgatccgcccgcctcggcctcccaaagtgctgggattacaggcatgagccaccgcgcccggccccaatcatctgtttttaaacaatcgtttttgagcagatagctattcattccagatttccgtgtacccactctgtttcaggagctcttctaggtaaagctgagatcacaggaacagcaggtgacaggcctagctatagttaggaatacacaagcggtaaaatcgagtccttacagccataccacaaggtacgtccatttggactacaagaagagcttcctttaaagttcctatttcagcataaagaggctgtcctttttttttaggaatagtttggaccttgtgcctcctgtgggaggctgaggactgcaagaggagagctagcagatatgcctgttcacccctctctggtacttgtggcttgctagtatgtttttatgataatctcgggcattgtttgcattgtgtttattaatagggttttgtttttattgtttccttttttacagtaaaggctgaatgacataaacattgagtaaatgtatgt

SEQ ID NO: 432103 - DNA, 2123 bp, Homo sapiens
agacacccacctttctagccctacctcccacttagtgattgtctgtaaatacgcacggccttaccttggcactgagagagatgcatggctgagtaggtgtcatctcatctgtaagaagcaatagcagaggggatgcagaaggagctgctctgttctgctcattgtcacctgctcctctgcacaccttccttcatgctcttccctcagcctctccccagctcacacccctttatttgaaactctgctcatttttcaggccctgcttcaatgccaccacctccgtgcagcctcctctgatgtttgtcattagcttagctcttccgtgtgtgctcctgcaccactgatcccttccacaacatggactgtctgtgatgcacgtgtgcaggatgctgggaatgcccaggtggaaagacacacgtgctgcccccaggaactgactgactggtgtttgatatacagaggaaagtcacctataggaacctgagcacctggtatacagagcttcgggagttcaggccagagatcccatgcatcgtggtggccaataaaattgatgagacataaacgtgacccaaaaaagcttcaattttgccaagaagttctccctgcccctgtatttcgtctcggctgctgatggtaccaatgttgtgaagctcttcaatgatgcaattcgattagctgtgtcttacaaacagaactcccaggacttcatggatgagatttttcaggagctcgagaacttcagcttggagcaggaagaggaggacgtgccagaccaggaacagagcagcagcatcgagaccccatcagaggaggtggcctctccccacagctgaggggctggggctaggggtgggtggagcccttttaaaatacccttcccttcaacaactctccagctctgaatggagaaactctctaggccatcccctcttctacctcctgcaacccacccatcctattagcctcccacattcaaggcccgtgatacagggatgaggtcagcaccagcaaactctggactggtggaagaattccccaccagatctccttgaagcagaattagggatcagcatcattaacaccttccccaccccctccccccaggcagacagtgaagagaatcagaaaacatgattatgtgtcactttaatacaggaaatttaggtgttttttggtgtttttgtttttgtttttgttttctttccaaagctcacctcggggacaattccttgggcttctcctgaggtaatgattacccccccacccacagctgagtctgtgaggccccatcctttccctacgttttctcccatcttttttcctcttcagtctcccagtcatctggtttgtttgtttctttgttcgtcctgagacggagtctcgctctgtcgccaggctggagtgcagtggcgcagtctcggctcgctgcaacctctgactccctggttcaaacgattctcctgcctcagcctcccgagtggctggcatcaccacgcccagctaatttttgtatttttagtagagacggggtttcaccatgttgcccaggatggtctcgatctcctcacctcgtgatccgcccgcctcggcctcccaaagtgctgggattacaggcatgagccaccgcgcccggccccaatcatctgtttttaaacaatcgtttttgagcagatagctattcattccagatttccgtgtacccactctgtttcaggagctcttctaggtaaagctgagatcacaggaacagcaggtgacaggcctagctatagttaggaatacacaagcggtaaaatcgagtccttacagccataccacaaggtacgtccatttggactacaagaagagcttcctttaaagttcctatttcagcataaagaggctgtcctttttttttaggaatagtttggaccttgtgcctcctgtgggaggctgaggactgcaagaggagagctagcagatatgcctgttcacccctctctggtacttgtggcttgctagtatgtttttatgataatctcgggcattgtttgcattgtgtttattaatagggttttgtttttattgtttccttttttacagtaaaggctgaatgacataaacattgagtaaatgtatgt

SEQ ID NO: 432104 - DNA, 575 bp, Homo sapiens
  misc_feature (130)..(131): n is a, c, g, or t
  misc_feature (133)..(133): n is a, c, g, or t
  misc_feature (135)..(136): n is a, c, g, or t
cgcagggttctcttcttcttgtttctgggacatggcgggaccgggactgtggagtgtaaggggcccgggaaggcaaccggagaagggaagggggaggggaaacggggacaaccctgcgctgctgcttcgnngncnntccccgaattcggcacgagccactctgtttcaggagctcttctaggtaaagctgagatcacaggaacagcaggtgacaggcctagctatagttaggaatacacaagcggtaaaatcgagtccttacagccataccacaaggtacgtccatttggactacaagaagagcttcctttaaagttcctatttcagcataaagaggctgtcctttttttttaggaatagtttggaccttgtgcctcctgtgggaggctgaggactgcaagaggagagctagcagatatgcctgttcacccctctctggtacttgtggcttgctagtatgtttttatgataatctcgggcattgtttgcattgtgtttattaatagggttttgtttttattgtttccttttttacagtaaaggctgaatgacataaacattgagtaaatgtatgt

SEQ ID NO: 432105 - DNA, 873 bp, Homo sapiens
agacacccacctttctagccctacctcccacttagtgattgtctgtaaatacgcacggccttaccttggcactgagagagatgcatggctgagtaggtgtcatctcatctgtaagaagcaatagcagaggggatgcagaaggagctgctctgttctgctcattgtcacctgctcctctgcacaccttccttcatgctcttccctcagcctctccccagctcacacccctttatttgaaactctgctcatttttcaggccctgcttcaatgccaccacctccgtgcagcctcctctgatgtttgtcattagcttagctcttccgtgtgtgctcctgcaccactgatcccttccacaacatggactgtctgtgatgcacgtgtgcaggatgctgggaatgcccaggtggaaagacacacgtgctgcccccaggaactgactgactggtaggcacagtacagataccagtggtgaggacagtgaggattcttcccttctgaccctttgcagatggtaaaggaaggaactcgtcacctaattcccccgactgcccgttaagaacaaaatcccttgaaaaattccaaaagctttaactctgataactgttaaggtactaaacaagaggataatggggcaaggaaaatgggggcagtgtagtgcagaagtctgaccctcaagagcagaggagcttggtcctagccagtttggtttcaggcctacagtggcatttggtattttgagctcacctctctttttctcttggagtgactgcttcctgcatctgctgcatctccgtgggctcccctcagaccctcttctgaaggcctggggtgtctctcctgccaccatgcctgtgtctgcaggtgcctgccacc

SEQ ID NO: 432106 - DNA, 3832 bp, Homo sapiens
tgcgcggttgcgtagcagctgcgaggacgcggggcgagccggaagtggagtgcgctgcggcgcgagctgggccggcgggcgtggttcgagagcgcgcagagtccagactggcggcagggcccgaggggccgacccgcagcgtccctggtctctccagccctcactcggaaccgcacgtgagggcaaatccgccccggtggctggcttagcacgcggggacagcccctccgaggcctccctagcggtgtgggcgagagggcgtccgggtcgggggaagcacggaaaggtggcttcgcgaggctgttgtggggggcgggacgggcagcctggcgatgcctggacatggttggtggccaaaaacatttatcgaaagatagcatacccacttagatggcgaggacaccgacaagcaagtcttcgcccgtaagcggtggctcacgcctatagtccagggatgccgaggagggaggatcgcttgagtccaggagttggaggctgcagtgagccgtgatcgcgccactgcactccagcctgggcgacagagtgagaccctatctctaaacaaaagaaagaacgtcttcaagcatggagccatgaagctggatttggctttctgtcgctctctctacagggtacagtgacaataccctcccctcccttgggctggacccctctctacagctaggagccaatggcagaagacaaaaccaaaccgagtgagttggaccaagggaagtatgatgctgatgacaacgtgaagatcatctgcctgggagacagcgcagtgggcaaatccaaactcatggagagatttctcatggatggctttcagccacagcagctgtccacgtacgccctgaccctgtacaagcacacagccacggtagatggcaagaccatccttgtgggtaagtggcacagggccaagacatgctgaccctcaggaaagaggaaatgggagacgaggggaggtgaggcaaggttcataaggagagagtccagagggagaaaatgagaccccaggcagggacaaggggtgctagagagaacccagagagccaggagccaggagggtggaagggggcatgcaggggcaagtcccagccctctgacctggcgtccaggccagcacctgtgcaggacagggttcaggaaaggagaagtcagggggctgtacccacctcagggaagaagaacataagaggccttcgacgaggcagtagttttcctagcttcaggggttcttactcagccagtttgaaaaaataaatgtggtcagaacattatctcccacatcgggctgcgaccttccatcgggtcataatcttctccttggccgggcacacagcctgcctgactctgtctaccgtctgtggtcatcgcacgtgagaagttggaatagtttggaacttagaggaccctgcgtgtcacgtgggaaacggggaactgtcttctccctccttgggcttccagtgtgttgtccttcctcctggcccctgacccactgtcttcccatacacacaggtgaagacacacctctcacatcacactcaggtgcactgtgtcttgaagacacacgtgtggggctgtatagtctctgtttctccctgtgctccccatgtacactcacacatgtgctgtggtttgtgccgcatgtgtgttgtatcttagtgacttgcacagaaatgcaccaggcatgtaggtctgtctgtgttcacattgcagacttttgggacacggcaggccaggagcggttccagagcatgcatgcctcctactaccacaaggcccatgcctgcatcatggtgtttgatatacagaggaaagtcacctataggaacctgagcacctggtatacagagcttcgggagttcaggccagagatcccatgcatcgtggtggccaataaaattgatggtggggccatccctgcacctgggtgttagcaattcactggggacctgccctcatacatttcctcctccattccccgggcaggcaaccttcagtgattggtcctccctcccacgataagatacaacccttggttggttgcttgcattcttcccaccttataaagaagccagctaagccgacctgccctctttccaagacacagatccctattaactgagctctttctaggacatgtttcccaatcatccctgcctatcccactttctggaatgaaggcctccagtggccccccctccaaaccttcttcccttcccttgacagaccaatgtcctaccttctctctacagcagacataaacgtgacccaaaaaagcttcaattttgccaagaagttctccctgcccctgtatttcgtctcggctgctgatggtaccaatgttgtgaagctcttcaatgatgcaattcgattagctgtgtcttacaaacagaactcccaggacttcatggatgagatttttcaggagctcgagaacttcagcttggagcaggaagaggaggacgtgccagaccaggaacagagcagcagcatcgagaccccatcagaggaggtggcctctccccacagctgaggggctggggctaggggtgggtggagcccttttaaaatacccttcccttcaacaactctccagctctgaatggagaaactctctaggccatcccctcttctacctcctgcaacccacccatcctattagcctcccacattcaaggcccgtgatacagggatgaggtcagcaccagcaaactctggactggtggaagaattccccaccagatctccttgaagcagaattagggatcagcatcattaacaccttccccaccccctccccccaggcagacagtgaagagaatcagaaaacatgattatgtgtcactttaatacaggaaatttaggtgttttttggtgtttttgtttttgtttttgttttctttccaaagctcacctcggggacaattccttgggcttctcctgaggtaatgattacccccccacccacagctgagtctgtgaggccccatcctttccctacgttttctcccatcttttttcctcttcagtctcccagtcatctggtttgtttgtttctttgttcgtcctgagacggagtctcgctctgtcgccaggctggagtgcagtggcgcagtctcggctcgctgcaacctctgactccctggttcaaacgattctcctgcctcagcctcccgagtggctggcatcaccacgcccagctaatttttgtatttttagtagagacggggtttcaccatgttgcccaggatggtctcgatctcctcacctcgtgatccgcccgcctcggcctcccaaagtgctgggattacaggcatgagccaccgcgcccggccccaatcatctgtttttaaacaatcgtttttgagcagatagctattcattccagatttccgtgtacccactctgtttcaggagctcttctaggtaaagctgagatcacaggaacagcaggtgacaggcctagctatagttaggaatacacaagcggtaaaatcgagtccttacagccataccacaaggtacgtccatttggactacaagaagagcttcctttaaagttcctatttcagcataaagaggctgtcctttttttttaggaatagtttggaccttgtgcctcctgtgggaggctgaggactgcaagaggagagctagcagatatgcctgttcacccctctctggtacttgtggcttgctagtatgtttttatgataatctcgggcattgtttgcattgtgtttattaatagggttttgtttttattgtttccttttttacagtaaaggctgaatgacataaacattgagtaaatgtatgt

SEQ ID NO: 432107 - DNA, 4102 bp, Homo sapiens
tgcgcggttgcgtagcagctgcgaggacgcggggcgagccggaagtggagtgcgctgcggcgcgagctgggccggcgggcgtggttcgagagcgcgcagagtccagactggcggcagggcccgaggggccgacccgcagcgtccctggtctctccagccctcactcggaaccgcacgtgagggcaaatccgccccggtggctggcttagcacgcggggacagcccctccgaggcctccctagcggtgtgggcgagagggcgtccgggtcgggggaagcacggaaaggtggcttcgcgaggctgttgtggggggcgggacgggcagcctggcgatgcctggacatggttggtggccaaaaacatttatcgaaagatagcatacccacttagatggcgaggacaccgacaagcaagtcttcgcccgtaagcggtggctcacgcctatagtccagggatgccgaggagggaggatcgcttgagtccaggagttggaggctgcagtgagccgtgatcgcgccactgcactccagcctgggcgacagagtgagaccctatctctaaacaaaagaaagaacgtcttcaagcatggagccatgaagctggatttggctttctgtcgctctctctacagggtacaggtgaaagggggcagacccctcatcatgctttccaggcatctgccacttcccaggaattgtctccctggataaacaaggcgaagtccctggctgtgcagaagcagtagctgtgtggtggcacagtcaggaaaactcgggggccctgttggtattttctacccctgacccgtgtgcatacttctgtcgtagctctcaccacagtagactctgctatcattgtgtcttccatcctctgaaccctgtgcaaggtctgctcatggtgaatgcccatgacaataccctcccctcccttgggctggacccctctctacagctaggagccaatggcagaagacaaaaccaaaccgagtgagttggaccaagggaagtatgatgctgatgacaacgtgaagatcatctgcctgggagacagcgcagtgggcaaatccaaactcatggagagatttctcatggatggctttcagccacagcagctgtccacgtacgccctgaccctgtacaagcacacagccacggtagatggcaagaccatccttgtgggtaagtggcacagggccaagacatgctgaccctcaggaaagaggaaatgggagacgaggggaggtgaggcaaggttcataaggagagagtccagagggagaaaatgagaccccaggcagggacaaggggtgctagagagaacccagagagccaggagccaggagggtggaagggggcatgcaggggcaagtcccagccctctgacctggcgtccaggccagcacctgtgcaggacagggttcaggaaaggagaagtcagggggctgtacccacctcagggaagaagaacataagaggccttcgacgaggcagtagttttcctagcttcaggggttcttactcagccagtttgaaaaaataaatgtggtcagaacattatctcccacatcgggctgcgaccttccatcgggtcataatcttctccttggccgggcacacagcctgcctgactctgtctaccgtctgtggtcatcgcacgtgagaagttggaatagtttggaacttagaggaccctgcgtgtcacgtgggaaacggggaactgtcttctccctccttgggcttccagtgtgttgtccttcctcctggcccctgacccactgtcttcccatacacacaggtgaagacacacctctcacatcacactcaggtgcactgtgtcttgaagacacacgtgtggggctgtatagtctctgtttctccctgtgctccccatgtacactcacacatgtgctgtggtttgtgccgcatgtgtgttgtatcttagtgacttgcacagaaatgcaccaggcatgtaggtctgtctgtgttcacattgcagacttttgggacacggcaggccaggagcggttccagagcatgcatgcctcctactaccacaaggcccatgcctgcatcatggtgtttgatatacagaggaaagtcacctataggaacctgagcacctggtatacagagcttcgggagttcaggccagagatcccatgcatcgtggtggccaataaaattgatggtggggccatccctgcacctgggtgttagcaattcactggggacctgccctcatacatttcctcctccattccccgggcaggcaaccttcagtgattggtcctccctcccacgataagatacaacccttggttggttgcttgcattcttcccaccttataaagaagccagctaagccgacctgccctctttccaagacacagatccctattaactgagctctttctaggacatgtttcccaatcatccctgcctatcccactttctggaatgaaggcctccagtggccccccctccaaaccttcttcccttcccttgacagaccaatgtcctaccttctctctacagcagacataaacgtgacccaaaaaagcttcaattttgccaagaagttctccctgcccctgtatttcgtctcggctgctgatggtaccaatgttgtgaagctcttcaatgatgcaattcgattagctgtgtcttacaaacagaactcccaggacttcatggatgagatttttcaggagctcgagaacttcagcttggagcaggaagaggaggacgtgccagaccaggaacagagcagcagcatcgagaccccatcagaggaggtggcctctccccacagctgaggggctggggctaggggtgggtggagcccttttaaaatacccttcccttcaacaactctccagctctgaatggagaaactctctaggccatcccctcttctacctcctgcaacccacccatcctattagcctcccacattcaaggcccgtgatacagggatgaggtcagcaccagcaaactctggactggtggaagaattccccaccagatctccttgaagcagaattagggatcagcatcattaacaccttccccaccccctccccccaggcagacagtgaagagaatcagaaaacatgattatgtgtcactttaatacaggaaatttaggtgttttttggtgtttttgtttttgtttttgttttctttccaaagctcacctcggggacaattccttgggcttctcctgaggtaatgattacccccccacccacagctgagtctgtgaggccccatcctttccctacgttttctcccatcttttttcctcttcagtctcccagtcatctggtttgtttgtttctttgttcgtcctgagacggagtctcgctctgtcgccaggctggagtgcagtggcgcagtctcggctcgctgcaacctctgactccctggttcaaacgattctcctgcctcagcctcccgagtggctggcatcaccacgcccagctaatttttgtatttttagtagagacggggtttcaccatgttgcccaggatggtctcgatctcctcacctcgtgatccgcccgcctcggcctcccaaagtgctgggattacaggcatgagccaccgcgcccggccccaatcatctgtttttaaacaatcgtttttgagcagatagctattcattccagatttccgtgtacccactctgtttcaggagctcttctaggtaaagctgagatcacaggaacagcaggtgacaggcctagctatagttaggaatacacaagcggtaaaatcgagtccttacagccataccacaaggtacgtccatttggactacaagaagagcttcctttaaagttcctatttcagcataaagaggctgtcctttttttttaggaatagtttggaccttgtgcctcctgtgggaggctgaggactgcaagaggagagctagcagatatgcctgttcacccctctctggtacttgtggcttgctagtatgtttttatgataatctcgggcattgtttgcattgtgtttattaatagggttttgtttttattgtttccttttttacagtaaaggctgaatgacataaacattgagtaaatgtatgt

SEQ ID NO: 432108 - DNA, 3253 bp, Homo sapiens
tggagatttggttgaggggacttatctctgacaacagcctcttgttgatcttcccagactgacaataccctcccctcccttgggctggacccctctctacagctaggagccaatggcagaagacaaaaccaaaccgagtgagttggaccaagggaagtatgatgctgatgacaacgtgaagatcatctgcctgggagacagcgcagtgggcaaatccaaactcatggagagatttctcatggatggctttcagccacagcagctgtccacgtacgccctgaccctgtacaagcacacagccacggtagatggcaagaccatccttgtgggtaagtggcacagggccaagacatgctgaccctcaggaaagaggaaatgggagacgaggggaggtgaggcaaggttcataaggagagagtccagagggagaaaatgagaccccaggcagggacaaggggtgctagagagaacccagagagccaggagccaggagggtggaagggggcatgcaggggcaagtcccagccctctgacctggcgtccaggccagcacctgtgcaggacagggttcaggaaaggagaagtcagggggctgtacccacctcagggaagaagaacataagaggccttcgacgaggcagtagttttcctagcttcaggggttcttactcagccagtttgaaaaaataaatgtggtcagaacattatctcccacatcgggctgcgaccttccatcgggtcataatcttctccttggccgggcacacagcctgcctgactctgtctaccgtctgtggtcatcgcacgtgagaagttggaatagtttggaacttagaggaccctgcgtgtcacgtgggaaacggggaactgtcttctccctccttgggcttccagtgtgttgtccttcctcctggcccctgacccactgtcttcccatacacacaggtgaagacacacctctcacatcacactcaggtgcactgtgtcttgaagacacacgtgtggggctgtatagtctctgtttctccctgtgctccccatgtacactcacacatgtgctgtggtttgtgccgcatgtgtgttgtatcttagtgacttgcacagaaatgcaccaggcatgtaggtctgtctgtgttcacattgcagacttttgggacacggcaggccaggagcggttccagagcatgcatgcctcctactaccacaaggcccatgcctgcatcatggtgtttgatatacagaggaaagtcacctataggaacctgagcacctggtatacagagcttcgggagttcaggccagagatcccatgcatcgtggtggccaataaaattgatggtggggccatccctgcacctgggtgttagcaattcactggggacctgccctcatacatttcctcctccattccccgggcaggcaaccttcagtgattggtcctccctcccacgataagatacaacccttggttggttgcttgcattcttcccaccttataaagaagccagctaagccgacctgccctctttccaagacacagatccctattaactgagctctttctaggacatgtttcccaatcatccctgcctatcccactttctggaatgaaggcctccagtggccccccctccaaaccttcttcccttcccttgacagaccaatgtcctaccttctctctacagcagacataaacgtgacccaaaaaagcttcaattttgccaagaagttctccctgcccctgtatttcgtctcggctgctgatggtaccaatgttgtgaagctcttcaatgatgcaattcgattagctgtgtcttacaaacagaactcccaggacttcatggatgagatttttcaggagctcgagaacttcagcttggagcaggaagaggaggacgtgccagaccaggaacagagcagcagcatcgagaccccatcagaggaggtggcctctccccacagctgaggggctggggctaggggtgggtggagcccttttaaaatacccttcccttcaacaactctccagctctgaatggagaaactctctaggccatcccctcttctacctcctgcaacccacccatcctattagcctcccacattcaaggcccgtgatacagggatgaggtcagcaccagcaaactctggactggtggaagaattccccaccagatctccttgaagcagaattagggatcagcatcattaacaccttccccaccccctccccccaggcagacagtgaagagaatcagaaaacatgattatgtgtcactttaatacaggaaatttaggtgttttttggtgtttttgtttttgtttttgttttctttccaaagctcacctcggggacaattccttgggcttctcctgaggtaatgattacccccccacccacagctgagtctgtgaggccccatcctttccctacgttttctcccatcttttttcctcttcagtctcccagtcatctggtttgtttgtttctttgttcgtcctgagacggagtctcgctctgtcgccaggctggagtgcagtggcgcagtctcggctcgctgcaacctctgactccctggttcaaacgattctcctgcctcagcctcccgagtggctggcatcaccacgcccagctaatttttgtatttttagtagagacggggtttcaccatgttgcccaggatggtctcgatctcctcacctcgtgatccgcccgcctcggcctcccaaagtgctgggattacaggcatgagccaccgcgcccggccccaatcatctgtttttaaacaatcgtttttgagcagatagctattcattccagatttccgtgtacccactctgtttcaggagctcttctaggtaaagctgagatcacaggaacagcaggtgacaggcctagctatagttaggaatacacaagcggtaaaatcgagtccttacagccataccacaaggtacgtccatttggactacaagaagagcttcctttaaagttcctatttcagcataaagaggctgtcctttttttttaggaatagtttggaccttgtgcctcctgtgggaggctgaggactgcaagaggagagctagcagatatgcctgttcacccctctctggtacttgtggcttgctagtatgtttttatgataatctcgggcattgtttgcattgtgtttattaatagggttttgtttttattgtttccttttttacagtaaaggctgaatgacataaacattgagtaaatgtatgt

SEQ ID NO: 432109 - DNA, 2634 bp, Homo sapiens
gactgcatcaattggcaaattgattccatttatgattgttaaaataggtgaataagattagatgacaagataacaaaaaaggaatacgttatttatttgtttatttcagacagagttttgctcttgttgcccaggctggagtgcaatggcatgatctgggctcactgcaacctctgtctccctagttcaagcaattctcctgcctcagcctcccaagtagctgagattaccggcatgcgccaccacgcccagctaattttttgcatttttagtagagacggaatttcaccatgttggccaggctggtctcgaactcctgacctcaggtgattgacccgcctcaacctcccaaagtgctgggattacaggtgtgagccactgcactgggccaagaataagatttttaaaaacattttcgcatctggaggctccagggggcttccctgagaaacggcagcctctgcggtcagagaggctgcaattcagagcgttcccacaaacagcaccatgtgctcatgcttacctgcttgggtgtgtgagtcacctggagatggggtgcagaaacattgacatacctgagctatctttcttcctctgccctttgcaggtgtttgatatacagaggaaagtcacctataggaacctgagcacctggtatacagagcttcgggagttcaggccagagatcccatgcatcgtggtggccaataaaattgatggtggggccatccctgcacctgggtgttagcaattcactggggacctgccctcatacatttcctcctccattccccgggcaggcaaccttcagtgattggtcctccctcccacgataagatacaacccttggttggttgcttgcattcttcccaccttataaagaagccagctaagccgacctgccctctttccaagacacagatccctattaactgagctctttctaggacatgtttcccaatcatccctgcctatcccactttctggaatgaaggcctccagtggccccccctccaaaccttcttcccttcccttgacagaccaatgtcctaccttctctctacagcagacataaacgtgacccaaaaaagcttcaattttgccaagaagttctccctgcccctgtatttcgtctcggctgctgatggtaccaatgttgtgaagctcttcaatgatgcaattcgattagctgtgtcttacaaacagaactcccaggacttcatggatgagatttttcaggagctcgagaacttcagcttggagcaggaagaggaggacgtgccagaccaggaacagagcagcagcatcgagaccccatcagaggaggtggcctctccccacagctgaggggctggggctaggggtgggtggagcccttttaaaatacccttcccttcaacaactctccagctctgaatggagaaactctctaggccatcccctcttctacctcctgcaacccacccatcctattagcctcccacattcaaggcccgtgatacagggatgaggtcagcaccagcaaactctggactggtggaagaattccccaccagatctccttgaagcagaattagggatcagcatcattaacaccttccccaccccctccccccaggcagacagtgaagagaatcagaaaacatgattatgtgtcactttaatacaggaaatttaggtgttttttggtgtttttgtttttgtttttgttttctttccaaagctcacctcggggacaattccttgggcttctcctgaggtaatgattacccccccacccacagctgagtctgtgaggccccatcctttccctacgttttctcccatcttttttcctcttcagtctcccagtcatctggtttgtttgtttctttgttcgtcctgagacggagtctcgctctgtcgccaggctggagtgcagtggcgcagtctcggctcgctgcaacctctgactccctggttcaaacgattctcctgcctcagcctcccgagtggctggcatcaccacgcccagctaatttttgtatttttagtagagacggggtttcaccatgttgcccaggatggtctcgatctcctcacctcgtgatccgcccgcctcggcctcccaaagtgctgggattacaggcatgagccaccgcgcccggccccaatcatctgtttttaaacaatcgtttttgagcagatagctattcattccagatttccgtgtacccactctgtttcaggagctcttctaggtaaagctgagatcacaggaacagcaggtgacaggcctagctatagttaggaatacacaagcggtaaaatcgagtccttacagccataccacaaggtacgtccatttggactacaagaagagcttcctttaaagttcctatttcagcataaagaggctgtcctttttttttaggaatagtttggaccttgtgcctcctgtgggaggctgaggactgcaagaggagagctagcagatatgcctgttcacccctctctggtacttgtggcttgctagtatgtttttatgataatctcgggcattgtttgcattgtgtttattaatagggttttgtttttattgtttccttttttacagtaaaggctgaatgacataaacattgagtaaatgtatgt

SEQ ID NO: 432110 - DNA, 3292 bp, Homo sapiens
tgcgcggttgcgtagcagctgcgaggacgcggggcgagccggaagtggagtgcgctgcggcgcgagctgggccggcgggcgtggttcgagagcgcgcagagtccagactggcggcagggcccgaggggccgacccgcagcgtccctggtctctccagccctcactcggaaccgcactgacaataccctcccctcccttgggctggacccctctctacagctaggagccaatggcagaagacaaaaccaaaccgagtgagttggaccaagggaagtatgatgctgatgacaacgtgaagatcatctgcctgggagacagcgcagtgggcaaatccaaactcatggagagatttctcatggatggctttcagccacagcagctgtccacgtacgccctgaccctgtacaagcacacagccacggtagatggcaagaccatccttgtgggtaagtggcacagggccaagacatgctgaccctcaggaaagaggaaatgggagacgaggggaggtgaggcaaggttcataaggagagagtccagagggagaaaatgagaccccaggcagggacaaggggtgctagagagaacccagagagccaggagccaggagggtggaagggggcatgcaggggcaagtcccagccctctgacctggcgtccaggccagcacctgtgcaggacagggttcaggaaaggagaagtcagggggctgtacccacctcagggaagaagaacataagaggccttcgacgaggcagtagttttcctagcttcaggggttcttactcagccagtttgaaaaaataaatgtggtcagaacattatctcccacatcgggctgcgaccttccatcgggtcataatcttctccttggccgggcacacagcctgcctgactctgtctaccgtctgtggtcatcgcacgtgagaagttggaatagtttggaacttagaggaccctgcgtgtcacgtgggaaacggggaactgtcttctccctccttgggcttccagtgtgttgtccttcctcctggcccctgacccactgtcttcccatacacacaggtgaagacacacctctcacatcacactcaggtgcactgtgtcttgaagacacacgtgtggggctgtatagtctctgtttctccctgtgctccccatgtacactcacacatgtgctgtggtttgtgccgcatgtgtgttgtatcttagtgacttgcacagaaatgcaccaggcatgtaggtctgtctgtgttcacattgcagacttttgggacacggcaggccaggagcggttccagagcatgcatgcctcctactaccacaaggcccatgcctgcatcatggtgtttgatatacagaggaaagtcacctataggaacctgagcacctggtatacagagcttcgggagttcaggccagagatcccatgcatcgtggtggccaataaaattgatggtggggccatccctgcacctgggtgttagcaattcactggggacctgccctcatacatttcctcctccattccccgggcaggcaaccttcagtgattggtcctccctcccacgataagatacaacccttggttggttgcttgcattcttcccaccttataaagaagccagctaagccgacctgccctctttccaagacacagatccctattaactgagctctttctaggacatgtttcccaatcatccctgcctatcccactttctggaatgaaggcctccagtggccccccctccaaaccttcttcccttcccttgacagaccaatgtcctaccttctctctacagcagacataaacgtgacccaaaaaagcttcaattttgccaagaagttctccctgcccctgtatttcgtctcggctgctgatggtaccaatgttgtgaagctcttcaatgatgcaattcgattagctgtgtcttacaaacagaactcccaggacttcatggatgagatttttcaggagctcgagaacttcagcttggagcaggaagaggaggacgtgccagaccaggaacagagcagcagcatcgagaccccatcagaggaggtggcctctccccacagctgaggggctggggctaggggtgggtggagcccttttaaaatacccttcccttcaacaactctccagctctgaatggagaaactctctaggccatcccctcttctacctcctgcaacccacccatcctattagcctcccacattcaaggcccgtgatacagggatgaggtcagcaccagcaaactctggactggtggaagaattccccaccagatctccttgaagcagaattagggatcagcatcattaacaccttccccaccccctccccccaggcagacagtgaagagaatcagaaaacatgattatgtgtcactttaatacaggaaatttaggtgttttttggtgtttttgtttttgtttttgttttctttccaaagctcacctcggggacaattccttgggcttctcctgaggtaatgattacccccccacccacagctgagtctgtgaggccccatcctttccctacgttttctcccatcttttttcctcttcagtctcccagtcatctggtttgtttgtttctttgttcgtcctgagacggagtctcgctctgtcgccaggctggagtgcagtggcgcagtctcggctcgctgcaacctctgactccctggttcaaacgattctcctgcctcagcctcccgagtggctggcatcaccacgcccagctaatttttgtatttttagtagagacggggtttcaccatgttgcccaggatggtctcgatctcctcacctcgtgatccgcccgcctcggcctcccaaagtgctgggattacaggcatgagccaccgcgcccggccccaatcatctgtttttaaacaatcgtttttgagcagatagctattcattccagatttccgtgtacccactctgtttcaggagctcttctaggtaaagctgagatcacaggaacagcaggtgacaggcctagctatagttaggaatacacaagcggtaaaatcgagtccttacagccataccacaaggaatagtttggaccttgtgcctcctgtgggaggctgaggactgcaagaggagagctagcagatatgcctgttcacccctctctggtacttgtggcttgctagtatgtttttatgataatctcgggcattgtttgcattgtgtttattaatagggttttgtttttattgtttccttttttacagtaaaggctgaatgacataaacattgagtaaatgtatgt

SEQ ID NO: 432111 - DNA, 1375 bp, Homo sapiens
tgcgcggttgcgtagcagctgcgaggacgcggggcgagccggaagtggagtgcgctgcggcgcgagctgggccggcgggcgtggttcgagagcgcgcagagtccagactggcggcagggcccgaggggccgacccgcagcgtccctggtctctccagccctcactcggaaccgcactgacaataccctcccctcccttgggctggacccctctctacagctaggagccaatggcagaagacaaaaccaaaccgagtgagttggaccaagggaagtatgatgctgatgacaacgtgaagatcatctgcctgggagacagcgcagtgggcaaatccaaactcatggagagatttctcatggatggctttcagccacagcagctgtccacgtacgccctgaccctgtacaagcacacagccacggtagatggcaagaccatccttgtgggtaagtggcacagggccaagacatgctgaccctcaggaaagaggaaatgggagacgaggggaggtgaggcaaggttcataaggagagagtccagagggagaaaatgagaccccaggcagggacaaggggtgctagagagaacccagagagccaggagccaggagggtggaagggggcatgcaggggcaagtcccagccctctgacctggcgtccaggccagcacctgtgcaggacagggttcaggaaaggagaagtcagggggctgtacccacctcagggaagaagaacataagaggccttcgacgaggcagtagttttcctagcttcaggggttcttactcagccagtttgaaaaaataaatgtggtcagaacattatctcccacatcgggctgcgaccttccatcgggtcataatcttctccttggccgggcacacagcctgcctgactctgtctaccgtctgtggtcatcgcacgtgagaagttggaatagtttggaacttagaggaccctgcgtgtcacgtgggaaacggggaactgtcttctccctccttgggcttccagtgtgttgtccttcctcctggcccctgacccactgtcttcccatacacacaggtgaagacacacctctcacatcacactcaggtgcactgtgtcttgaagacacacgtgtggggctgtatagtctctgtttctccctgtgctccccatgtacactcacacatgtgctgtggtttgtgccgcatgtgtgttgtatcttagtgacttgcacagaaatgcaccaggcatgtaggtctgtctgtgttcacattgcagacttttgggacacggcaggccaggagcggttccagagcatgcatgcctcctactaccacaaggcccatgcctgcatcatggtacgagacggtggggaggtggacaaaggcac

SEQ ID NO: 432112 - DNA, 1890 bp, Homo sapiens
tgcgcggttgcgtagcagctgcgaggacgcggggcgagccggaagtggagtgcgctgcggcgcgagctgggccggcgggcgtggttcgagagcgcgcagagtccagactggcggcagggcccgaggggccgacccgcagcgtccctggtctctccagccctcactcggaaccgcacgtgagggcaaatccgccccggtggctggcttagcacgcggggacagcccctccgaggcctccctagcggtgtgggcgagagggcgtccgggtcgggggaagcacggaaaggtggcttcgcgaggctgttgtggggggcgggacgggcagcctggcgatgcctggacatggttggtggccaaaaacatttatcgaaagatagcatacccacttagatggcgaggacaccgacaagcaagtcttcgcccgtaagcggtggctcacgcctatagtccagggatgccgaggagggaggatcgcttgagtccaggagttggaggctgcagtgagccgtgatcgcgccactgcactccagcctgggcgacagagtgagaccctatctctaaacaaaagaaagaacgtcttcaagcatggagccatgaagctggatttggctttctgtcgctctctctacagggtacaggtgaaagggggcagacccctcatcatgctttccaggcatctgccacttcccaggaattgtctccctggataaacaaggcgaagtccctggctgtgcagaagcagtagctgtgtggtggcacagtcaggaaaactcgggggccctgttggtattttctacccctgacccgtgtgcatacttctgtcgtagctctcaccacagtagactctgctatcattgtgtcttccatcctctgaaccctgtgcaaggtctgctcatggtgaatgcccatgacaataccctcccctcccttgggctggacccctctctacagctaggagccaatggcagaagacaaaaccaaaccgagtgagttggaccaagggaagtatgatgctgatgacaacgtgaagatcatctgcctgggagacagcgcagtgggcaaatccaaactcatggagagatttctcatggatggcttgtatccttcaaggtttgaagtactccttgttcctgtgggtcttcccacgctcatgtatcagtgtcccactgcccacccctttgtaccagcagcccaggaacaggaaggaggattgggtaagtgaacgcacaggttttgttctgcacttgtttcttgccgattgacccacatggcattgcacaatcagtgctgtatattttggaccttactcatatttggattgttttatattaagagggcagtagaatggcaaacagcaaatggtttggatctaatgcctggattcaaaccccacctcctcctcctcagtagcttctgatactggccaagtcatttaacctctctaacctcaaagcttgggccccctactattgaaaaaaatctctgatatgaatgaactttgtttggagtgagttcctccccgcaactgggagatttttaaacagcttcccaagtggatccactgagaaccacaggtgagaggagcccctggagcctgctgctgcctgtcctaggctcggcaccccaaggctcagttgccttaagatctgagtatgtgttactccaccttgtaccaagtgctcctgcacacccagcccacctgcgtcatttggctctgctttttacactgtccagcttcttgcagcctcggaaggtgttaatccccagagtttaaccctttttctcagggtttcacacatagacagactccaaattgattgacagcttgtcaactgtatggcttgtgggagcttctgtccctggaatggtcatgttgctacctagggttag

SEQ ID NO: 432113 - DNA, 637 bp, Homo sapiens
tgcgcggttgcgtagcagctgcgaggacgcggggcgagccggaagtggagtgcgctgcggcgcgagctgggccggcgggcgtggttcgagagcgcgcagagtccagactggcggcagggcccgaggggccgacccgcagcgtccctggtctcgatctcctcacctcgtgatccgcccgcctcggcctcccaaagtgctgggattacaggcatgagccaccgcgcccggccccaatcatctgtttttaaacaatcgtttttgagcagatagctattcattccagatttccgtgtacccactctgtttcaggagctcttctaggtaaagctgagatcacaggaacagcaggtgacaggcctagctatagttaggaatacacaagcggtaaaatcgagtccttacagccataccacaaggaatagtttggaccttgtgcctcctgtgggaggctgaggactgcaagaggagagctagcagatatgcctgttcacccctctctggtacttgtggcttgctagtatgtttttatgataatctcgggcattgtttgcattgtgtttattaatagggttttgtttttattgtttccttttttacagtaaaggctgaatgacataaacattgagtaaatgtatgt

SEQ ID NO: 432114 - DNA, 1155 bp, Homo sapiens
tgcgcggttgcgtagcagctgcgaggacgcggggcgagccggaagtggagtgcgctgcggcgcgagctgggccggcgggcgtggttcgagagcgcgcagagtccagactggcggcagggcccgaggggccgacccgcagcgtccctggtctctccagccctcactcggaaccgcactgacaataccctcccctcccttgggctggacccctctctacagctaggagccaatggcagaagacaaaaccaaaccgagtgagttggaccaagggaagtatgatgctgatgacaacgtgaagatcatctgcctgggagacagcgcagtgggcaaatccaaactcatggagagatttctcatggatggctttcagccacagcagctgtccacgtacgccctgaccctgtacaagcacacagccacggtagatggcaagaccatccttgtggacttttgggacacggcaggccaggagcggttccagagcatgcatgcctcctactaccacaaggcccatgcctgcatcatggtgtttgatatacagaggaaagtcacctataggaacctgagcacctggtatacagagcttcgggagttcaggccagagatcccatgcatcgtggtggccaataaaattgatgagacataaacgtgacccaaaaaagcttcaattttgccaagaagttctccctgcccctgtatttcgtctcggctgctgatggtaccaatgttgtgaagctcttcaatgatgcaattcgattagctgtgtcttacaaacagaactcccaggacttcatggatgagatttttcaggagctcgagaacttcagcttggagcaggaagaggaggacgtgccagaccaggaacagagcagcagcatcgagaccccatcagaggaggtggcctctccccacagctgaggggctggggctaggggaatagtttggaccttgtgcctcctgtgggaggctgaggactgcaagaggagagctagcagatatgcctgttcacccctctctggtacttgtggcttgctagtatgtttttatgataatctcgggcattgtttgcattgtgtttattaatagggttttgtttttattgtttccttttttacagtaaaggctgaatgacataaacattgagtaaatgtatgt

SEQ ID NO: 432115 - DNA, 3370 bp, Homo sapiens
tgcgcggttgcgtagcagctgcgaggacgcggggcgagccggaagtggagtgcgctgcggcgcgagctgggccggcgggcgtggttcgagagcgcgcagagtccagactggcggcagggcccgaggggccgacccgcagcgtccctggtctctccagccctcactcggaaccgcactgacaataccctcccctcccttgggctggacccctctctacagctaggagccaatggcagaagacaaaaccaaaccgagtgagttggaccaagggaagtatgatgctgatgacaacgtgaagatcatctgcctgggagacagcgcagtgggcaaatccaaactcatggagagatttctcatggatggctttcagccacagcagctgtccacgtacgccctgaccctgtacaagcacacagccacggtagatggcaagaccatccttgtgggtaagtggcacagggccaagacatgctgaccctcaggaaagaggaaatgggagacgaggggaggtgaggcaaggttcataaggagagagtccagagggagaaaatgagaccccaggcagggacaaggggtgctagagagaacccagagagccaggagccaggagggtggaagggggcatgcaggggcaagtcccagccctctgacctggcgtccaggccagcacctgtgcaggacagggttcaggaaaggagaagtcagggggctgtacccacctcagggaagaagaacataagaggccttcgacgaggcagtagttttcctagcttcaggggttcttactcagccagtttgaaaaaataaatgtggtcagaacattatctcccacatcgggctgcgaccttccatcgggtcataatcttctccttggccgggcacacagcctgcctgactctgtctaccgtctgtggtcatcgcacgtgagaagttggaatagtttggaacttagaggaccctgcgtgtcacgtgggaaacggggaactgtcttctccctccttgggcttccagtgtgttgtccttcctcctggcccctgacccactgtcttcccatacacacaggtgaagacacacctctcacatcacactcaggtgcactgtgtcttgaagacacacgtgtggggctgtatagtctctgtttctccctgtgctccccatgtacactcacacatgtgctgtggtttgtgccgcatgtgtgttgtatcttagtgacttgcacagaaatgcaccaggcatgtaggtctgtctgtgttcacattgcagacttttgggacacggcaggccaggagcggttccagagcatgcatgcctcctactaccacaaggcccatgcctgcatcatggtgtttgatatacagaggaaagtcacctataggaacctgagcacctggtatacagagcttcgggagttcaggccagagatcccatgcatcgtggtggccaataaaattgatggtggggccatccctgcacctgggtgttagcaattcactggggacctgccctcatacatttcctcctccattccccgggcaggcaaccttcagtgattggtcctccctcccacgataagatacaacccttggttggttgcttgcattcttcccaccttataaagaagccagctaagccgacctgccctctttccaagacacagatccctattaactgagctctttctaggacatgtttcccaatcatccctgcctatcccactttctggaatgaaggcctccagtggccccccctccaaaccttcttcccttcccttgacagaccaatgtcctaccttctctctacagcagacataaacgtgacccaaaaaagcttcaattttgccaagaagttctccctgcccctgtatttcgtctcggctgctgatggtaccaatgttgtgaagctcttcaatgatgcaattcgattagctgtgtcttacaaacagaactcccaggacttcatggatgagatttttcaggagctcgagaacttcagcttggagcaggaagaggaggacgtgccagaccaggaacagagcagcagcatcgagaccccatcagaggaggtggcctctccccacagctgaggggctggggctaggggtgggtggagcccttttaaaatacccttcccttcaacaactctccagctctgaatggagaaactctctaggccatcccctcttctacctcctgcaacccacccatcctattagcctcccacattcaaggcccgtgatacagggatgaggtcagcaccagcaaactctggactggtggaagaattccccaccagatctccttgaagcagaattagggatcagcatcattaacaccttccccaccccctccccccaggcagacagtgaagagaatcagaaaacatgattatgtgtcactttaatacaggaaatttaggtgttttttggtgtttttgtttttgtttttgttttctttccaaagctcacctcggggacaattccttgggcttctcctgaggtaatgattacccccccacccacagctgagtctgtgaggccccatcctttccctacgttttctcccatcttttttcctcttcagtctcccagtcatctggtttgtttgtttctttgttcgtcctgagacggagtctcgctctgtcgccaggctggagtgcagtggcgcagtctcggctcgctgcaacctctgactccctggttcaaacgattctcctgcctcagcctcccgagtggctggcatcaccacgcccagctaatttttgtatttttagtagagacggggtttcaccatgttgcccaggatggtctcgatctcctcacctcgtgatccgcccgcctcggcctcccaaagtgctgggattacaggcatgagccaccgcgcccggccccaatcatctgtttttaaacaatcgtttttgagcagatagctattcattccagatttccgtgtacccactctgtttcaggagctcttctaggtaaagctgagatcacaggaacagcaggtgacaggcctagctatagttaggaatacacaagcggtaaaatcgagtccttacagccataccacaaggtacgtccatttggactacaagaagagcttcctttaaagttcctatttcagcataaagaggctgtcctttttttttaggaatagtttggaccttgtgcctcctgtgggaggctgaggactgcaagaggagagctagcagatatgcctgttcacccctctctggtacttgtggcttgctagtatgtttttatgataatctcgggcattgtttgcattgtgtttattaatagggttttgtttttattgtttccttttttacagtaaaggctgaatgacataaacattgagtaaatgtatgt

SEQ ID NO: 432116 - DNA, 2013 bp, Homo sapiens
tgcgcggttgcgtagcagctgcgaggacgcggggcgagccggaagtggagtgcgctgcggcgcgagctgggccggcgggcgtggttcgagagcgcgcagagtccagactggcggcagggcccgaggggccgacccgcagcgtccctggtctctccagccctcactcggaaccgcactgacaataccctcccctcccttgggctggacccctctctacagctaggagccaatggcagaagacaaaaccaaaccgagtgagttggaccaagggaagtatgatgctgatgacaacgtgaagatcatctgcctgggagacagcgcagtgggcaaatccaaactcatggagagatttctcatggatggctttcagccacagcagctgtccacgtacgccctgaccctgtacaagcacacagccacggtagatggcaagaccatccttgtggagacataaacgtgacccaaaaaagcttcaattttgccaagaagttctccctgcccctgtatttcgtctcggctgctgatggtaccaatgttgtgaagctcttcaatgatgcaattcgattagctgtgtcttacaaacagaactcccaggacttcatggatgagatttttcaggagctcgagaacttcagcttggagcaggaagaggaggacgtgccagaccaggaacagagcagcagcatcgagaccccatcagaggaggtggcctctccccacagctgaggggctggggctaggggtgggtggagcccttttaaaatacccttcccttcaacaactctccagctctgaatggagaaactctctaggccatcccctcttctacctcctgcaacccacccatcctattagcctcccacattcaaggcccgtgatacagggatgaggtcagcaccagcaaactctggactggtggaagaattccccaccagatctccttgaagcagaattagggatcagcatcattaacaccttccccaccccctccccccaggcagacagtgaagagaatcagaaaacatgattatgtgtcactttaatacaggaaatttaggtgttttttggtgtttttgtttttgtttttgttttctttccaaagctcacctcggggacaattccttgggcttctcctgaggtaatgattacccccccacccacagctgagtctgtgaggccccatcctttccctacgttttctcccatcttttttcctcttcagtctcccagtcatctggtttgtttgtttctttgttcgtcctgagacggagtctcgctctgtcgccaggctggagtgcagtggcgcagtctcggctcgctgcaacctctgactccctggttcaaacgattctcctgcctcagcctcccgagtggctggcatcaccacgcccagctaatttttgtatttttagtagagacggggtttcaccatgttgcccaggatggtctcgatctcctcacctcgtgatccgcccgcctcggcctcccaaagtgctgggattacaggcatgagccaccgcgcccggccccaatcatctgtttttaaacaatcgtttttgagcagatagctattcattccagatttccgtgtacccactctgtttcaggagctcttctaggtaaagctgagatcacaggaacagcaggtgacaggcctagctatagttaggaatacacaagcggtaaaatcgagtccttacagccataccacaaggtacgtccatttggactacaagaagagcttcctttaaagttcctatttcagcataaagaggctgtcctttttttttaggaatagtttggaccttgtgcctcctgtgggaggctgaggactgcaagaggagagctagcagatatgcctgttcacccctctctggtacttgtggcttgctagtatgtttttatgataatctcgggcattgtttgcattgtgtttattaatagggttttgtttttattgtttccttttttacagtaaaggctgaatgacataaacattgagtaaatgtatgt

SEQ ID NO: 432117 - DNA, 975 bp, Homo sapiens
tgcgcggttgcgtagcagctgcgaggacgcggggcgagccggaagtggagtgcgctgcggcgcgagctgggccggcgggcgtggttcgagagcgcgcagagtccagactggcggcagggcccgaggggccgacccgcagcgtccctggtctctccagccctcactcggaaccgcacgtgagggcaaatccgccccggtggctggcttagcacgcggggacagcccctccgaggcctccctagcggtgtgggcgagagggcgtccgggtcgggggaagcacggaaaggtggcttcgcgaggctgttgtggggggcgggacgggcagcctggcgatgcctggacatggttggtggccaaaaacatttatcgaaagatagcatacccacttagatggcgaggacaccgacaagcaagtcttcgcccgtaagcggtggctcacgcctatagtccagggatgccgaggagggaggatcgcttgagtccaggagttggaggctgcagtgagccgtgatcgcgccactgcactccagcctgggcgacagagtgagaccctatctctaaacaaaagaaagaacgtcttcaagcatggagccatgaagctggatttggctttctgtcgctctctctacagggtacaggtgaaagggggcagacccctcatcatgctttccaggcatctgccacttcccaggaattgtctccctggataaacaaggcgaagtccctggctgtgcagaagcagtagctgtgtggtggcacagtcaggaaaactcgggggccctgttggtattttctacccctgacccgtgtgcatacttctgtcgtagctctcaccacagtagactctgctatcattgtgtcttccatcctctgaaccctgtgcaaggtctgctcatggtgaatgcccagtaaggctcacctattgctgctatctcatcatcatatcatttctatgtgcccccctagctaagagtc

SEQ ID NO: 432118 - DNA, 1537 bp, Homo sapiens
tgcgcggttgcgtagcagctgcgaggacgcggggcgagccggaagtggagtgcgctgcggcgcgagctgggccggcgggcgtggttcgagagcgcgcagagtccagactggcggcagggcccgaggggccgacccgcagcgtccctggtctctccagccctcactcggaaccgcacgtgagggcaaatccgccccggtggctggcttagcacgcggggacagcccctccgaggcctccctagcggtgtgggcgagagggcgtccgggtcgggggaagcacggaaaggtggcttcgcgaggctgttgtggggggcgggacgggcagcctggcgatgcctggacatggttggtggccaaaaacatttatcgaaagatagcatacccacttagatggcgaggacaccgacaagcaagtcttcgcccgtaagcggtggctcacgcctatagtccagggatgccgaggagggaggatcgcttgagtccaggagttggaggctgcagtgagccgtgatcgcgccactgcactccagcctgggcgacagagtgagaccctatctctaaacaaaagaaagaacgtcttcaagcatggagccatgaagctggatttggctttctgtcgctctctctacagggtacaggtgaaagggggcagacccctcatcatgctttccaggcatctgccacttcccaggaattgtctccctggataaacaaggcgaagtccctggctgtgcagaagcagtagctgtgtggtggcacagtcaggaaaactcgggggccctgttggtattttctacccctgacccgtgtgcatacttctgtcgtagctctcaccacagtagactctgctatcattgtgtcttccatcctctgaaccctgtgcaaggtctgctcatggtgaatgcccatgacaataccctcccctcccttgggctggacccctctctacagctaggagccaatggcagaagacaaaaccaaaccgagtgagttggaccaagggaagtatgatgctgatgacaacgtgaagatcatctgcctgggagacagcgcagtgggcaaatccaaactcatggagagatttctcatggatggcttgtatccttcaaggtttgaagtactccttgttcctgtgggtcttcccacgctcatgtatcagtgtcccactgcccacccctttgtaccagcagcccaggaacaggaaggaggattgggtaagtgaacgcacaggttttgttctgcacttgtttcttgccgattgacccacatggcattgcacaatcagtgctgtatattttggaccttactcatatttggattgttttatattaagagggcagtagaatggcaaacagcaaatggtttggatctaatgcctggattcaaaccccacctcctcctcctcagtagcttctgatactggccaagtcatttaacctctctaacctcaaagcttgggccccctactattgaaaaaaatctctgatatgaatgaactttgtaaaataggagctgccagccccacctttctcccatg

SEQ ID NO: 432119 - DNA, 1050 bp, Homo sapiens
ggcggagccgcctgagcggagtcccacccgggagccggcagggagcggagctgcggagccgcctggtctcccgcgtccatcggtccattcctgcgtcgttctgtccttccgaacgcacacttcaggagcagccgcgagggtggcatggcagcgagcacagacatggctgggctggaggagagcttccgcaagtttgccatccatggtgaccccaaggccagtgggcaagagatgaatggcaagaactgggccaagctgtgcaaggactgcaaggtggctgacggaaagtccgtgacagggaccgatgtggacatcgtcttctccaaagtcaaggggaagtctgctcgggtcatcaactatgaggagttcaagaaggccctggaagagctggcgaccaagagattcaaggggaagagcaaggaggaggccttcgatgccatctgccagctggtggcaggcaaagagccagccaatgtgggcgtcactaaagcaaaaacagggggtgctgtagaccggctgacggacaccagcagatacacgggctcccacaaggagcgcttcgatgagagcggcaagggcaagggcattgcgggacggcaggacatcctggacgacagtggctacgtgagcgcctacaagaatgcaggcacctacgatgccaaggtgaagaagtgaggcttgggaagaccgccctgccaagtgcggctgcccctgccagaggctcaggcctgggtctaaggggcacgtggagcaagagatcctggtcccctccctgctggacctgccacccagagcttcctgcctagtcccactgggctggcccaccaggcctctgacccaggctgctctgcggccccttcctcctcctcttcctgctccaacttctgtccacctggggacagtctgtgcctgtagcctcatgaccccaacccagccccaggcatggctaacccctgactgcttgcctcatatttaagctgctgctctggccaagtgcctaattttaacccagacctcaataaagacaccttttgtaccaaaaaaaaaaaa

SEQ ID NO: 432120 - DNA, 1485 bp, Homo sapiens
ggcggagccgcctgagcggagtcccacccgggagccggcagggagcggagctgcggagccgcctggtctcccgcgtccatcggtccattcctgcgtcgttctgtccttccgaacgcacacttcaggagcagccgcgaggtagaagcccataggagacccagatgcccgccaccccaatcagtatcctgcacgatgagggttggggggagcagcctggaaagggtcccaacctccggcggtcccagccgaggagccagctgagcggccctgccctggccccaagcattccacctcgcagcccccacctcctggtccggctgattgatgactccagctgtcccagtgggagcgggacgggtggctccagttcacgggtgtggccactccatccatggcctgcagacccatggggctgcggcctgcaacccagcgccacctgaccgcgctgagatgagcggaagaatccatctttccacggacaggagtgagcactgcacgcaggatccgcccagtgcttgggccaagcaccctgtggcatccaagctcccctggacgttacccttggtgaaccaaggtggcatggcagcgagcacagacatggctgggctggaggagagcttccgcaagtttgccatccatggtgaccccaaggccagtgggcaagagatgaatggcaagaactgggccaagctgtgcaaggactgcaaggtggctgacggaaagtccgtgacagggaccgatgtggacatcgtcttctccaaagtcaaggggaagtctgctcgggtcatcaactatgaggagttcaagaaggccctggaagagctggcgaccaagagattcaaggggaagagcaaggaggaggccttcgatgccatctgccagctggtggcaggcaaagagccagccaatgtgggcgtcactaaagcaaaaacagggggtgctgtagaccggctgacggacaccagcagatacacgggctcccacaaggagcgcttcgatgagagcggcaagggcaagggcattgcgggacggcaggacatcctggacgacagtggctacgtgagcgcctacaagaatgcaggcacctacgatgccaaggtgaagaagtgaggcttgggaagaccgccctgccaagtgcggctgcccctgccagaggctcaggcctgggtctaaggggcacgtggagcaagagatcctggtcccctccctgctggacctgccacccagagcttcctgcctagtcccactgggctggcccaccaggcctctgacccaggctgctctgcggccccttcctcctcctcttcctgctccaacttctgtccacctggggacagtctgtgcctgtagcctcatgaccccaacccagccccaggcatggctaacccctgactgcttgcctcatatttaagctgctgctctggccaagtgcctaattttaacccagacctcaataaagacaccttttgtaccaaaaaaaaaaaa

SEQ ID NO: 432121 - DNA, 1107 bp, Homo sapiens
ctcccggggctcttccttggggctctgtggcccagggcgacagtgacgggcccctctccccaggcagctccagcaccaactctgtagcagaacctgcccaggtcttgcaggtttgaggtagaggctgggatgttctgggcttgggggaggggaagggcagattggctgggagatgacccaggtgggtctctatagggtggcatggcagcgagcacagacatggctgggctggaggagagcttccgcaagtttgccatccatggtgaccccaaggccagtgggcaagagatgaatggcaagaactgggccaagctgtgcaaggactgcaaggtggctgacggaaagtccgtgacagggaccgatgtggacatcgtcttctccaaagtcaaggggaagtctgctcgggtcatcaactatgaggagttcaagaaggccctggaagagctggcgaccaagagattcaaggggaagagcaaggaggaggccttcgatgccatctgccagctggtggcaggcaaagagccagccaatgtgggcgtcactaaagcaaaaacagggggtgctgtagaccggctgacggacaccagcagatacacgggctcccacaaggagcgcttcgatgagagcggcaagggcaagggcattgcgggacggcaggacatcctggacgacagtggctacgtgagcgcctacaagaatgcaggcacctacgatgccaaggtgaagaagtgaggcttgggaagaccgccctgccaagtgcggctgcccctgccagaggctcaggcctgggtctaaggggcacgtggagcaagagatcctggtcccctccctgctggacctgccacccagagcttcctgcctagtcccactgggctggcccaccaggcctctgacccaggctgctctgcggccccttcctcctcctcttcctgctccaacttctgtccacctggggacagtctgtgcctgtagcctcatgaccccaacccagccccaggcatggctaacccctgactgcttgcctcatatttaagctgctgctctggccaagtgcctaattttaacccagacctcaataaagacaccttttgtaccaaaaaaaaaaaa

SEQ ID NO: 432122 - DNA, 1121 bp, Homo sapiens
tgtcaatagacatacacagtctaggcattgtgtaaactggctgtgttcccagcagagatactgcaccctcctgaccgagcagtcaggcttccctttcctagccatcctaggttgcgttctaggaaactctggatctcagcctcatctccagctttgcctggaccttgctagggggagggagggacaggagcacagaggaggagaggagagggatgtgatgtctttcttaggaaagaaaaaaaggcacagtgatgagctataaaggtagtgatgagagctataaaggtagtgatgaaagcaaggaataattttcattcaccccaaatcctactgttttttttttgcatccatacggaaagtccgtgacagggaccgatgtggacatcgtcttctccaaagtcaaggggaagtctgctcgggtcatcaactatgaggagttcaagaaggccctggaagagctggcgaccaagagattcaaggggaagagcaaggaggaggccttcgatgccatctgccagctggtggcaggcaaagagccagccaatgtgggcgtcactaaagcaaaaacagggggtgctgtagaccggctgacggacaccagcagatacacgggctcccacaaggagcgcttcgatgagagcggcaagggcaagggcattgcgggacggcaggacatcctggacgacagtggctacgtgagcgcctacaagaatgcaggcacctacgatgccaaggtgaagaagtgaggcttgggaagaccgccctgccaagtgcggctgcccctgccagaggctcaggcctgggtctaaggggcacgtggagcaagagatcctggtcccctccctgctggacctgccacccagagcttcctgcctagtcccactgggctggcccaccaggcctctgacccaggctgctctgcggccccttcctcctcctcttcctgctccaacttctgtccacctggggacagtctgtgcctgtagcctcatgaccccaacccagccccaggcatggctaacccctgactgcttgcctcatatttaagctgctgctctggccaagtgcctaattttaacccagacctcaataaagacaccttttgtaccaaaaaaaaaaaa

SEQ ID NO: 432123 - DNA, 1341 bp, Homo sapiens
ggcggagccgcctgagcggagtcccacccgggagccggcagggagcggagctgcggagccgcctggtctcccgcgtccatcggtccattcctgcgtcgttctgtccttccgaacgcacacttcaggagcagccgcgagggtggcatggcagcgagcacagacatggctgggctggaggagagcttccgcaagtttgccatccatggtgaccccaaggccagtgggcaagagatgaatggcaagaactgggccaagctgtgcaaggactgcaaggtggctgacggaaagtccgtgacagggaccgatgtggacatcgtcttctccaaagtcaagtgagccctaagcagcccctgcttctcatgttcccaggaggtggggaactggggggctggaaccagggaggacatcaagaaggggtcagggaaacaccatgatcacgaaggtcgttcttccagggcaaaccttgtatctattgccctccagagttgctgacccctgcgacttccccaaacgtgggaaagaaacgcaattgcataatttgtggtggcagcaaatgtgtttgagctttcccctgggggagaaaaaagaaaggggaaccctcatggtgcccacatgcctgtcagggggaagtctgctcgggtcatcaactatgaggagttcaagaaggccctggaagagctggcgaccaagagattcaaggggaagagcaaggaggaggccttcgatgccatctgccagctggtggcaggcaaagagccagccaatgtgggcgtcactaaagcaaaaacagggggtgctgtagaccggctgacggacaccagcagatacacgggctcccacaaggagcgcttcgatgagagcggcaagggcaagggcattgcgggacggcaggacatcctggacgacagtggctacgtgagcgcctacaagaatgcaggcacctacgatgccaaggtgaagaagtgaggcttgggaagaccgccctgccaagtgcggctgcccctgccagaggctcaggcctgggtctaaggggcacgtggagcaagagatcctggtcccctccctgctggacctgccacccagagcttcctgcctagtcccactgggctggcccaccaggcctctgacccaggctgctctgcggccccttcctcctcctcttcctgctccaacttctgtccacctggggacagtctgtgcctgtagcctcatgaccccaacccagccccaggcatggctaacccctgactgcttgcctcatatttaagctgctgctctggccaagtgcctaattttaacccagacctcaataaagacaccttttgtaccaaaaaaaaaaaa

SEQ ID NO: 432124 - DNA, 897 bp, Homo sapiens
  misc_feature (875)..(875): n is a, c, g, or t
ggcggagccgcctgagcggagtcccacccgggagccggcagggagcggagctgcggagccgcctggtctcccgcgtccatcggtccattcctgcgtcgttctgtccttccgaacgcacacttcaggagcagccgcgagggtggcatggcagcgagcacagacatggctgggctggaggagagcttccgcaagtttgccatccatggtgaccccaaggccagtgggcaagagatgaatggcaagaactgggccaagctgtgcaaggactgcaaggtggctgacggaaagtccgtgacagggaccgatgtggacatcgtcttctccaaagtcaaggggaagtctgctcgggtcatcaactatgaggagttcaagaaggccctggaagagctggcgaccaagagattcaaggggaagagcaaggaggaggccttcgatgccatctgccagctggtggcaggcaaagagccagccaatgtgggcgtcactaaagcaaaaacagggggtgctgtagaccggctgacggacaccagcagatacacgggctcccacaaggagcgcttcgatgagagcggcaagggcaagggcattgcgggacggcaggacatcctggacgacagtggctacgtgagcgcctacaagaatgcaggcacctacgatgccaaggtgaagaagtgaggcttgggaagaccgccctgccaagtgcggctgcccctgccagaggctcaggcctgggtctaaggggcacgtggagcaagagatcctggtcccctccctgctggacctgccacccagagcttcctgcctagtcccactgggctggcccaccaggcctctgacccaggctgctctgcggccccttcctccggtggcagtcnagcagggaggggaccaggatgt

SEQ ID NO: 432125 - DNA, 950 bp, Homo sapiens
ggcggagccgcctgagcggagtcccacccgggagccggcagggagcggagctgcggagccgcctggtctcccgcgtccatcggtccattcctgcgtcgttctgtccttccgaacgcacacttcaggagcagccgcgaggtagaagcccataggagacccagatgcccgccaccccaatcagtatcctgcacgatgagggttggggggagcagcctggaaagggtcccaacctccggcggtcccagccgaggagccagctgagcggccctgccctggccccaagcattccacctcgcagcccccacctcctggtccggctgattgatgactccagctgtcccagtgggagcgggacgggtggctccagttcacgggtgtggccactccatccatggcctgcagacccatggggctgcggcctgcaacccagcgccacctgaccgcgctgagatgagcggaagaatccatctttccacggacaggagtgagcactgcacgcaggatccgcccagtgcttgggccaagcaccctgtggcatccaagctcccctggacgttacccttggtgaaccaaggtggcatggcagcgagcacagacatggctgggtgcccctgccagaggctcaggcctgggtctaaggggcacgtggagcaagagatcctggtcccctccctgctggacctgccacccagagcttcctgcctagtcccactgggctggcccaccaggcctctgacccaggctgctctgcggccccttcctcctcctcttcctgctccaacttctgtccacctggggacagtctgtgcctgtagcctcatgaccccaacccagccccaggcatggctaacccctgactgcttgcctcatatttaagctgctgctctggccaagtgcctaattttaacccagacctcaataaagacaccttttgtaccaaaaaaaaaaaa

SEQ ID NO: 432126 - DNA, 1054 bp, Homo sapiens
ggcggagccgcctgagcggagtcccacccgggagccggcagggagcggagctgcggagccgcctggtctcccgcgtccatcggtccattcctgcgtcgttctgtccttccgaacgcacacttcaggagcagccgcgaggtagaagcccataggagacccagatgcccgccaccccaatcagtatcctgcacgatgagggttggggggagcagcctggaaagggtcccaacctccggcggtcccagccgaggagccagctgagcggccctgccctggccccaagcattccacctcgcagcccccacctcctggtccggctgattgatgactccagctgtcccagtgggagcgggacgggtggctccagttcacgggtgtggccactccatccatggcctgcagacccatggggctgcggcctgcaacccagcgccacctgaccgcgctgagatgagcggaagaatccatctttccacggacaggagtgagcactgcacgcaggatccgcccagtgcttgggccaagcaccctgtggcatccaagctcccctggacgttacccttggtgaaccaaggtggcatggcagcgagcacagacatggctgggctggaggagagcttccgcaagtttgccatccatggtgaccccaaggccagtgggcaagagatgaatggcaagaactgggccaagctgtgcaaggactgcaaggtggctgacggaaagtccgtgacagggaccgatgtggacatcgtcttctccaaagtcaaggggaagtctgctcgggtcatcaactatgaggagttcaagaaggccctggaagagctggcgaccaagagattcaaggggaagagcaaggaggaggccttcgtcctcttcctgctccaacttctgtccacctggggacagtctgtgcctgtagcctcatgaccccaacccagccccaggcatggctaacccctgactgcttgcctcatatttaagctgctgctctggccaagtgcctaattttaacccagacctcaataaagacaccttttgtaccaaaaaaaaaaaa

SEQ ID NO: 432127 - DNA, 518 bp, Homo sapiens
ggcggagccgcctgagcggagtcccacccgggagccggcagggagcggagctgcggagccgcctggtctcccgcgtccatcggtccattcctgcgtcgttctgtccttccgaacgcacacttcaggagcagccgcgagggtggcatggcagcgagcacagacatggctgggctggaggagagcttccgcaagtttgccatccatggtgaccccaaggccagtgggcaagagatgaatggcaagaactgggccaagctgtgcaaggactgcaaggtggctgacggaaagtccgtgacagggaccgatgtggacatcgtcttctccaaagtcaatcctcttcctgctccaacttctgtccacctggggacagtctgtgcctgtagcctcatgaccccaacccagccccaggcatggctaacccctgactgcttgcctcatatttaagctgctgctctggccaagtgcctaattttaacccagacctcaataaagacaccttttgtaccaaaaaaaaaaaa

SEQ ID NO: 432128 - DNA, 901 bp, Homo sapiens
  misc_feature (6)..(6): n is a, c, g, or t
  misc_feature (12)..(12): n is a, c, g, or t
  misc_feature (62)..(62): n is a, c, g, or t
attcgngcacgngggcaaggaggaggccttcgatgccatctgccagctggtggaggcaaagngccagccaatgtgggcgtcactaaagcaaaaacagggggtgctgtagaccggctgacggacaccagcagatacacgggctcccacaaggagcgcttcgatgagagcggcaagggcaagggcattgcgggacggcaggacatcctggacgacagtggctacgtgagcgcctacaagaatgcaggcacctacgatgccaaggtgaagaaggtggcatggcagcgagcacagacatggctgggctggaggagagcttccgcaagtttgccatccatggtgaccccaaggccagtgggcaagagatgaatggcaagaactgggccaagctgtgcaaggactgcaaggtggctgacggaaagtccgtgacagggaccgatgtggacatcgtcttctccaaagtcaaggggaagtctgctcgggtcatcaactatgaggagttcaagaaggccctggaagagctggcgaccaagagattcaaggggaagagcaaggaggaggccttcgagcttcctgcctagtcccactgggctggcccaccaggcctctgacccaggctgctctgcggccccttcctcctcctcttcctgctccaacttctgtccacctggggacagtctgtgcctgtagcctcatgaccccaacccagccccaggcatggctaacccctgactgcttgcctcatatttaagctgctgctctggccaagtgcctaattttaacccagactcataagacctttgtcaaaaaaaagaacccacggtgaacggaaaggcgactaaggggccggacaattggcctaaggaacaacgggacaggaacttcgtggagtctctcaaaaaag

SEQ ID NO: 432129 - DNA, 1141 bp, Homo sapiens
ggcggagccgcctgagcggagtcccacccgggagccggcagggagcggagctgcggagccgcctggtctcccgcgtccatcggtccattcctgcgtcgttctgtccttccgaacgcacacttcaggagcagccgcgaggagtgagcactgcacgcaggatccgcccagtgcttgggccaagcaccctgtggcatccaagctcccctggacgttacccttggtgaaccaaggtggcatggcagcgagcacagacatggctgggctggaggagagcttccgcaagtttgccatccatggtgaccccaaggccagtgggcaagagatgaatggcaagaactgggccaagctgtgcaaggactgcaaggtggctgacggaaagtccgtgacagggaccgatgtggacatcgtcttctccaaagtcaaggggaagtctgctcgggtcatcaactatgaggagttcaagaaggccctggaagagctggcgaccaagagattcaaggggaagagcaaggaggaggccttcgatgccatctgccagctggtggcaggcaaagagccagccaatgtgggcgtcactaaagcaaaaacagggggtgctgtagaccggctgacggacaccagcagatacacgggctcccacaaggagcgcttcgatgagagcggcaagggcaagggcattgcgggacggcaggacatcctggacgacagtggctacgtgagcgcctacaagaatgcaggcacctacgatgccaaggtgaagaagtgaggcttgggaagaccgccctgccaagtgcggctgcccctgccagaggctcaggcctgggtctaaggggcacgtggagcaagagatcctggtcccctccctgctggacctgccacccagagcttcctgcctagtcccactgggctggcccaccaggcctctgacccaggctgctctgcggccccttcctcctcctcttcctgctccaacttctgtccacctggggacagtctgtgcctgtagcctcatgaccccaacccagccccaggcatggctaacccctgactgcttgcctcatatttaagctgctgctctggccaagtgcctaattttaacccagacctcaataaagacaccttttgtaccaaaaaaaaaaaa

SEQ ID NO: 432130 - DNA, 1181 bp, Homo sapiens
  misc_feature (6)..(6): n is a, c, g, or t
  misc_feature (12)..(12): n is a, c, g, or t
  misc_feature (62)..(62): n is a, c, g, or t
attcgngcacgngggcaaggaggaggccttcgatgccatctgccagctggtggaggcaaagngccagccaatgtgggcgtcactaaagcaaaaacagggggtgctgtagaccggctgacggacaccagcagatacacgggctcccacaaggagcgcttcgatgagagcggcaagggcaagggcattgcgggacggcaggacatcctggacgacagtggctacgtgagcgcctacaagaatgcaggcacctacgatgccaaggtgaagaaggtggcatggcagcgagcacagacatggctgggctggaggagagcttccgcaagtttgccatccatggtgaccccaaggccagtgggcaagagatgaatggcaagaactgggccaagctgtgcaaggactgcaaggtggctgacggaaagtccgtgacagggaccgatgtggacatcgtcttctccaaagtcaaggggaagtctgctcgggtcatcaactatgaggagttcaagaaggccctggaagagctggcgaccaagagattcaaggggaagagcaaggaggaggccttcgatgccatctgccagctggtggcaggcaaagagccagccaatgtgggcgtcactaaagcaaaaacagggggtgctgtagaccggctgacggacaccagcagatacacgggctcccacaaggagcgcttcgatgagagcggcaagggcaagggcattgcgggacggcaggacatcctggacgacagtggctacgtgagcgcctacaagaatgcaggcacctacgatgccaaggtgaagaagtgaggcttgggaagaccgccctgccaagtgcggctgcccctgccagaggctcaggcctgggtctaaggggcacgtggagcaagagatcctggtcccctccctgctggacctgccacccagagcttcctgcctagtcccactgggctggcccaccaggcctctgacccaggctgctctgcggccccttcctcctcctcttcctgctccaacttctgtccacctggggacagtctgtgcctgtagcctcatgaccccaacccagccccaggcatggctaacccctgactgcttgcctcatatttaagctgctgctctggccaagtgcctaattttaacccagacctcaataaagacaccttttgtaccaaaaaaaaaaaa

SEQ ID NO: 432131 - DNA, 1398 bp, Homo sapiens
ctcccggggctcttccttggggctctgtggcccagggcgacagtgacgggcccctctccccaggcagctccagcaccaactctgtagcagaacctgcccaggtcttgcaggtttgaggtagaggctgggatgttctgggcttgggggaggggaagggcagattggctgggagatgacccaggtgggtctctatagggtggcatggcagcgagcacagacatggctgggctggaggagagcttccgcaagtttgccatccatggtgaccccaaggccagtgggcaagagatgaatggcaagaactgggccaagctgtgcaaggactgcaaggtggctgacggaaagtccgtgacagggaccgatgtggacatcgtcttctccaaagtcaagtgagccctaagcagcccctgcttctcatgttcccaggaggtggggaactggggggctggaaccagggaggacatcaagaaggggtcagggaaacaccatgatcacgaaggtcgttcttccagggcaaaccttgtatctattgccctccagagttgctgacccctgcgacttccccaaacgtgggaaagaaacgcaattgcataatttgtggtggcagcaaatgtgtttgagctttcccctgggggagaaaaaagaaaggggaaccctcatggtgcccacatgcctgtcagggggaagtctgctcgggtcatcaactatgaggagttcaagaaggccctggaagagctggcgaccaagagattcaaggggaagagcaaggaggaggccttcgatgccatctgccagctggtggcaggcaaagagccagccaatgtgggcgtcactaaagcaaaaacagggggtgctgtagaccggctgacggacaccagcagatacacgggctcccacaaggagcgcttcgatgagagcggcaagggcaagggcattgcgggacggcaggacatcctggacgacagtggctacgtgagcgcctacaagaatgcaggcacctacgatgccaaggtgaagaagtgaggcttgggaagaccgccctgccaagtgcggctgcccctgccagaggctcaggcctgggtctaaggggcacgtggagcaagagatcctggtcccctccctgctggacctgccacccagagcttcctgcctagtcccactgggctggcccaccaggcctctgacccaggctgctctgcggccccttcctcctcctcttcctgctccaacttctgtccacctggggacagtctgtgcctgtagcctcatgaccccaacccagccccaggcatggctaacccctgactgcttgcctcatatttaagctgctgctctggccaagtgcctaattttaacccagacctcaataaagacaccttttgtaccaaaaaaaaaaaa

SEQ ID NO: 432132 - DNA, 918 bp, Homo sapiens
ggcggagccgcctgagcggagtcccacccgggagccggcagggagcggagctgcggagccgcctggtctcccgcgtccatcggtccattcctgcgtcgttctgtccttccgaacgcacacttcaggagcagccgcgagggtggcatggcagcgagcacagacatggctgggctggaggagagcttccgcaagtttgccatccatggtgaccccaaggccagtgggcaagagatgaatggcaagaactgggccaagctgtgcaaggactgcaaggtggctgacggaaagtccgtgacagggaccgatgtggacatcgtcttctccaaagtcaaggggaagtctgctcgggtcatcaactatgaggagttcaagaaggccctggaagagctggcgaccaagagatacacgggctcccacaaggagcgcttcgatgagagcggcaagggcaagggcattgcgggacggcaggacatcctggacgacagtggctacgtgagcgcctacaagaatgcaggcacctacgatgccaaggtgaagaagtgaggcttgggaagaccgccctgccaagtgcggctgcccctgccagaggctcaggcctgggtctaaggggcacgtggagcaagagatcctggtcccctccctgctggacctgccacccagagcttcctgcctagtcccactgggctggcccaccaggcctctgacccaggctgctctgcggccccttcctcctcctcttcctgctccaacttctgtccacctggggacagtctgtgcctgtagcctcatgaccccaacccagccccaggcatggctaacccctgactgcttgcctcatatttaagctgctgctctggccaagtgcctaattttaacccagacctcaataaagacaccttttgtaccaaaaaaaaaaaa

SEQ ID NO: 432133 - DNA, 1227 bp, Homo sapiens
ggcggagccgcctgagcggagtcccacccgggagccggcagggagcggagctgcggagccgcctggtctcccgcgtccatcggtccattcctgcgtcgttctgtccttccgaacgcacacttcaggagcagccgcgaggtagaagcccataggagacccagatgcccgccaccccaatcagtatcctgcacgatgagggttggggggagcagcctggaaagggtcccaacctccggcggtcccagccgaggagccagctgagcggccctgccctggccccaagcattccacctcgcagcccccacctcctggtccggctgattgatgactccagctgtcccagtgggagcgggacgggtggctccagttcacgggtgtggccactccatccatggcctgcagacccatggggctgcggcctgcaacccagcgccacctgaccgcgctgagatgagcggaagaatccatctttccacggacaggagtgagcactgcacgcaggatccgcccagtgcttgggccaagcaccctgtggcatccaagctcccctggacgttacccttggtgaaccaaggtggcatggcagcgagcacagacatggctgggctggaggagagcttccgcaagtttgccatccatggtgaccccaaggccagtgggcaagagatgaatggcaagaactgggccaagctgtgcaaggactgcaaggtggctgacggaaagtccgtgacagggaccgatgtggacatcgtcttctccaaagtcaaggggaagtctgctcgggtcatcaactatgaggagttcaagaaggccctggaagagctggcgaccaagagattcaaggggaagagcaaggaggaggccttcgatgccatctgccagctggtggcaggcaaagagccagccaatgtgggcgtcactaaagcaaaaacagggggtgctgtagaccggctgacggacaccagcagatacacgggctcccacaaggagcgcttcgatgagagcggcaagggcaagggcattgcgggacggcaggacatctcctcttcctgctccaacttctgtccacctggggacagtctgtgcctgtagcctcatgaccccaacccagccccaggcatggctaacccctgactgcttgcctcatatttaagctgctgctctggccaagtgcctaattttaacccagacctcaataaagacaccttttgtaccaaaaaaaaaaaa

SEQ ID NO: 432134 - DNA, 2068 bp, Homo sapiens
ggcacagatcagctgatgccggagggtttgaagccgcgccgcgagggagcgaggtcgcagtgacagcggcgggcgatcggacccaggctgccccgccgtacccgcctgcgtcccgcgctcccgccccagcatgacagccccggcgggtccgcgcggctcagagaccgagcggcttctgacccccaaccccgggtatgggacccaggcggggccttcaccggcccctccgacacccccagaagaggaagaccttcgccgtcgtctcaaatactttttcatgagtccctgcgacaagtttcgagccaagggccgcaagccctgcaagctgatgctgcaagtggtcaagatcctggtggtcacggtgcagctcatcctgtttgggctcagtaatcagctggctgtgacattccgggaagagaacaccatcgccttccgacacctcttcctgctgggctactcggacggagcggatgacaccttcgcagcctacacgcgggagcagctgtaccaggccatcttccatgctgtggaccagtacctggcgttgcctgacgtgtcactgggccggtatgcgtatgtccgtggtgggggtgacccttggaccaatggctcagggcttgctctctgccagcggtactaccaccgaggccacgtggacccggccaacgacacatttgacattgatccgatggtggttactgactgcatccaggtggatccccccgagcggccccctccgccccccagcgacgatctcaccctcttggaaagcagctccagttacaagaacctcacgctcaaattccacaagctggtcaatgtcaccatccacttccggctgaagaccattaacctccagagcctcatcaataatgagatcccggactgctataccttcagcgtcctgatcacgtttgacaacaaagcacacagtgggcggatccccatcagcctggagacccaggcccacatccaggagtgtaagcaccccagtgtcttccagcacggagacaacagcttccggctcctgtttgacgtggtggtcatcctcacctgctccctgtccttcctcctctgcgcccgctcactccttcgaggcttcctgctgcagaacgagtttgtggggttcatgtggcggcagcggggacgggtcatcagcctgtgggagcggctggaatttgtcaatggctggtacatcctgctcgtcaccagcgatgtgctcaccatctcgggcaccatcatgaagatcggcatcgaggccaagaacttggcgagctacgacgtctgcagcatcctcctgggcacctcgacgctgctggtgtgggtgggcgtgatccgctacctgaccttcttccacaactacaatatcctcatcgccacactgcgggtggccctgcccagcgtcatgcgcttctgctgctgcgtggctgtcatctacctgggctactgcttctgtggctggatcgtgctggggccctatcatgtgaagttccgctcactctccatggtgtctgagtgcctgttctcgctcatcaatggggacgacatgtttgtgacgttcgccgccatgcaggcgcagcagggccgcagcagcctggtgtggctcttctcccagctctacctttactccttcatcagcctcttcatctacatggtgctcagcctcttcatcgcgctcatcaccggcgcctacgacaccatcaagcatcccggcggcgcaggcgcagaggagagcgagctgcaggcctacatcgcacagtgccaggacagccccacctccggcaagttccgccgcgggagcggctcggcctgcagccttctctgctgctgcggaagggacccctcggaggagcattcgctgctggtgaattgattcgacctgactgccgttggaccgtaggccctggactgcagagacccccgcccccgaccccgcttatttatttgtagggtttgcttttaaggatcggctccctgtcgcgcccgaggagggcctggacctttcgtgtcggacccttgggggcggggagactgggtggggagggtgttgaataaaagggaaaataaa

SEQ ID NO: 432135 - DNA, 492 bp, Homo sapiens
caggcccagcaagtgcaaaggcccggaggtgggaagcgatgcagatatggctggaggggagggcggacttcaagggccttggaggttgggagccactttcaggctgagcctcccggcttctctccccagcatcccggcggcgcaggcgcagaggagagcgagctgcaggcctacatcgcacagtgccaggacagccccacctccggcaagttccgccgcgggagcggctcggcctgcagccttctctgctgctgcggaagggacccctcggaggagcattcgctgctggtgaattgattcgacctgactgccgttggaccgtaggccctggactgcagagacccccgcccccgaccccgcttatttatttgtagggtttgcttttaaggatcggctccctgtcgcgcccgaggagggcctggacctttcgtgtcggacccttgggggcggggagactgggtggggagggtgttgaataaaagggaaaataaa

SEQ ID NO: 432136 - DNA, 538 bp, Homo sapiens
aacctgggacgtagaggttgcagtgagccgagatcaagccactgcactccaacgtgggcgagagaccgagactctgcttcaaagacaaaacaacaattttttaaaaattttaattcaaatgaagtacaattgcaaatttagcctctgacttgcaccatcctgtatccagtgctcaaaagccagtgtggctggtggctgccatattggacagcatagatattgaatacttccatcgcctctagactgaagagatgggagcccaggggcagtgcaccgaggggaaggaatagctaaagcaaaggtctagtagcctgaaaaaacttggagaaaagatggcccctccatgaggccgagtgagaggaaggaagccttggctgggaccctgccacatccaatgtcaccggcagatgggtacacccccttttccccatgcatggattcagctgtcccacagacacattgactcaggcccttggaactacttcctgtcttgccttagcacgtagacatcacacacatgcatccactcaggtgggca

SEQ ID NO: 432137 - DNA, 2524 bp, Homo sapiens
ggcacagatcagctgatgccggagggtttgaagccgcgccgcgagggagcgaggtcgcagtgacagcggcgggcgatcggacccaggctgccccgccgtacccgcctgcgtcccgcgctcccgccccagcatgacagccccggcgggtccgcgcggctcagagaccgagcggcttctgacccccaaccccgggtatgggacccaggcggggccttcaccggcccctccgacacccccagaagaggaagaccttcgccgtcgtctcaaatactttttcatgagtccctgcgacaagtttcgagccaagggccgcaagccctgcaagctgatgctgcaagtggtcaagatcctggtggtcacggtgcagctcatcctgtttgggctcagtaatcagctggctgtgacattccgggaagagaacaccatcgccttccgacacctcttcctgctgggctactcggacggagcggatgacaccttcgcagcctacacgcgggagcagctgtaccaggccatcttccatgctgtggaccagtacctggcgttgcctgacgtgtcactgggccggtatgcgtatgtccgtggtgggggtgacccttggaccaatggctcagggcttgctctctgccagcggtactaccaccgaggccacgtggacccggccaacgacacatttgacattgatccgatggtggttactgactgcatccaggtggatccccccgagcggccccctccgccccccagcgacgatctcaccctcttggaaagcagctccagttacaagaacctcacgctcaaattccacaagctggtcaatgtcaccatccacttccggctgaagaccattaacctccagagcctcatcaataatgagatcccggactgctataccttcagcgtcctgatcacgtttgacaacaaagcacacagtgggcggatccccatcagcctggagacccaggcccacatccaggagtgtaagcaccccagtgtcttccagcacggtgagcccctgagccccagaccagcactgaccaggggccctggcctgtcctgggattccccaagccccagatcagcgctgcctgggggccgtgacctccccaggaatccgctgagcctcagatcagcacagaccagggaccccgtcctgtgctgagatcccccaagccccagaccagcactgaccggggttcttgactcaccccaagcaagccctgagcccactgaccaaccaaaaccagccgtgcagccccctaggtctccagcctggcctggcaccaatgctagcctcccaaggctccatgccatccttggccctacccgctctgccctccccgcaggagacaacagcttccggctcctgtttgacgtggtggtcatcctcacctgctccctgtccttcctcctctgcgcccgctcactccttcgaggcttcctgctgcagaacgtgaggcttctgcgtcatgtgtgctggtgtcctccccgcctggccctggggcgataaaagccagggctttgagggtcctgtgcctggtcaggccctcaccccgcctgccttctgcaggagtttgtggggttcatgtggcggcagcggggacgggtcatcagcctgtgggagcggctggaatttgtcaatggctggtacatcctgctcgtcaccagcgatgtgctcaccatctcgggcaccatcatgaagatcggcatcgaggccaagaacttggcgagctacgacgtctgcagcatcctcctgggcacctcgacgctgctggtgtgggtgggcgtgatccgctacctgaccttcttccacaactacaatatcctcatcgccacactgcgggtggccctgcccagcgtcatgcgcttctgctgctgcgtggctgtcatctacctgggctactgcttctgtggctggatcgtgctggggccctatcatgtgaagttccgctcactctccatggtgtctgagtgcctgttctcgctcatcaatggggacgacatgtttgtgacgttcgccgccatgcaggcgcagcagggccgcagcagcctggtgtggctcttctcccagctctacctttactccttcatcagcctcttcatctacatggtgctcagcctcttcatcgcgctcatcaccggcgcctacgacaccatcaagcatcccggcggcgcaggcgcagaggagagcgagctgcaggcctacatcgcacagtgccaggacagccccacctccggcaagttccgccgcgggagcggctcggcctgcagccttctctgctgctgcggaagggacccctcggaggagcattcgctgctggtgaattgattcgacctgactgccgttggaccgtaggccctggactgcagagacccccgcccccgaccccgcttatttatttgtagggtttgcttttaaggatcggctccctgtcgcgcccgaggagggcctggacctttcgtgtcggacccttgggggcggggagactgggtggggagggtgttgaataaaagggaaaataaa

SEQ ID NO: 432138 - DNA, 2896 bp, Homo sapiens
ggcacagatcagctgatgccggagggtttgaagccgcgccgcgagggagcgaggtcgcagtgacagcggcgggcgatcggacccaggctgccccgccgtacccgcctgcgtcccgcgctcccgccccagcatgacagccccggcgggtccgcgcggctcagagaccgagcggcttctgacccccaaccccgggtatgggacccaggcggggccttcaccggcccctccgacacccccagaagaggaagaccttcgccgtcgtctcaaatactttttcatgagtccctgcgacaagtttcgagccaagggccgcaagccctgcaagctgatgctgcaagtggtcaagatcctggtggtcacggtgcagctcatcctgtttgggctcagtaatcagctggctgtgacattccgggaagagaacaccatcgccttccgacacctcttcctgctgggctactcggacggagcggatgacaccttcgcagcctacacgcgggagcagctgtaccaggccatcttccatgctgtggaccagtacctggcgttgcctgacgtgtcactgggccggtatgcgtatgtccgtggtgggggtgacccttggaccaatggctcagggcttgctctctgccagcggtactaccaccgaggccacgtggacccggccaacgacacatttgacattgatccgatggtggttactggtgagtgggcaggacgaggcttcactgttgggagcctgagctgctgggattaaaatcaacagctgtggctgggcacggtggctcacgcctataataccagcactttgggaggctgaggaggaaggattgcttgaggccagaagtttgagaccagcctgggccacgtaggaagaccttgtctctacgcacaaacaaattagctgggcgtggtggcgtgcccctgtggtcccagctactcaggaggctgaggcaggaggatcgcttgagtccgggaggttgaggctgcagtaagctatgaccacgctgctgcactccaccctgggtgacagagtgagaccctgtctcaaaaaaaaaaaaaaaaaaaaaaaacaagtatgcttagtgtgagtgtgactcttgccacgtagaaagcaccagatgttatattttaatatggctcattcagtaaaacatccgcaggcccagagagtgccaggcctgtaggaatgacccaaccctggggaagcacagggaagaaggccactggggactctggggagaccagcctggcctccccggccccctgaggcccttccctgactccctgtccttagactgcatccaggtggatccccccgagcggccccctccgccccccagcgacgatctcaccctcttggaaagcagctccagttacaagaacctcacgctcaaattccacaagtactgcctgctcactcgaggggggcccagggtgggggaggcagcacactaggcactctcaccccagcaactacttccctaaggtggggacagggcccccccgcccgcgctggtgcctgctgggtgagcacttcccctgccagctgcagagtcagcacgtggcaggggacgctggcacttggggccggaagggacccgaagacgcccctgaccctcacccgagcctcctgcctaggctggtcaatgtcaccatccacttccggctgaagaccattaacctccagagcctcatcaataatgagatcccggactgctataccttcagcgtcctgatcacgtttgacaacaaagcacacagtgggcggatccccatcagcctggagacccaggcccacatccaggagtgtaagcaccccagtgtcttccagcacggagacaacagcttccggctcctgtttgacgtggtggtcatcctcacctgctccctgtccttcctcctctgcgcccgctcactccttcgaggcttcctgctgcagaacgagtttgtggggttcatgtggcggcagcggggacgggtcatcagcctgtgggagcggctggaatttgtcaatggctggtacatcctgctcgtcaccagcgatgtgctcaccatctcgggcaccatcatgaagatcggcatcgaggccaagaacttggcgagctacgacgtctgcagcatcctcctgggcacctcgacgctgctggtgtgggtgggcgtgatccgctacctgaccttcttccacaactacaatatcctcatcgccacactgcgggtggccctgcccagcgtcatgcgcttctgctgctgcgtggctgtcatctacctgggctactgcttctgtggctggatcgtgctggggccctatcatgtgaagttccgctcactctccatggtgtctgagtgcctgttctcgctcatcaatggggacgacatgtttgtgacgttcgccgccatgcaggcgcagcagggccgcagcagcctggtgtggctcttctcccagctctacctttactccttcatcagcctcttcatctacatggtgctcagcctcttcatcgcgctcatcaccggcgcctacgacaccatcaagcatcccggcggcgcaggcgcagaggagagcgagctgcaggcctacatcgcacagtgccaggacagccccacctccggcaagttccgccgcgggagcggctcggcctgcagccttctctgctgctgcggaagggacccctcggaggagcattcgctgctggtgaattgattcgacctgactgccgttggaccgtaggccctggactgcagagacccccgcccccgaccccgcttatttatttgtagggtttgcttttaaggatcggctccctgtcgcgcccgaggagggcctggacctttcgtgtcggacccttgggggcggggagactgggtggggagggtgttgaataaaagggaaaataaa

SEQ ID NO: 432139 - DNA, 2333 bp, Homo sapiens
acagagtgagactctgtctcaaaaaagaaaagaaaagggacccagtcatggtacttaccctgaaagtttgggtttaacacagaatcggacatccagtaaacatttaatgaacgttagtccctgcagtgagatagatgagtccccaccctgtgttgtacgggggaggacacagtggtgggcgtggcatggagcttatgccaggaggtggggtgaaattaatcaaagcaaagaaatgcacaagtgaaatccgtgtttgtggcccaagttagcagggccctgccccaccccagtggacatctgcagggccctccctgtcctcttccagggcctgtgccctgagggagatacaccccaacccccatcctagccatgccaacctctactaccctctccccagctcatcctgtttgggctcagtaatcagctggctgtgacattccgggaagagaacaccatcgccttccgacacctcttcctgctgggctactcggacggagcggatgacaccttcgcagcctacacgcgggagcagctgtaccaggccatcttccatgctgtggaccagtacctggcgttgcctgacgtgtcactgggccggtatgcgtatgtccgtggtgggggtgacccttggaccaatggctcagggcttgctctctgccagcggtactaccaccgaggccacgtggacccggccaacgacacatttgacattgatccgatggtggttactgactgcatccaggtggatccccccgagcggccccctccgccccccagcgacgatctcaccctcttggaaagcagctccagttacaagaacctcacgctcaaattccacaagtactgcctgctcactcgaggggggcccagggtgggggaggcagcacactaggcactctcaccccagcaactacttccctaaggtggggacagggcccccccgcccgcgctggtgcctgctgggtgagcacttcccctgccagctgcagagtcagcacgtggcaggggacgctggcacttggggccggaagggacccgaagacgcccctgaccctcacccgagcctcctgcctaggctggtcaatgtcaccatccacttccggctgaagaccattaacctccagagcctcatcaataatgagatcccggactgctataccttcagcgtcctgatcacgtttgacaacaaagcacacagtgggcggatccccatcagcctggagacccaggcccacatccaggagtgtaagcaccccagtgtcttccagcacggagacaacagcttccggctcctgtttgacgtggtggtcatcctcacctgctccctgtccttcctcctctgcgcccgctcactccttcgaggcttcctgctgcagaacgagtttgtggggttcatgtggcggcagcggggacgggtcatcagcctgtgggagcggctggaatttgtcaatggctggtacatcctgctcgtcaccagcgatgtgctcaccatctcgggcaccatcatgaagatcggcatcgaggccaagaacttggcgagctacgacgtctgcagcatcctcctgggcacctcgacgctgctggtgtgggtgggcgtgatccgctacctgaccttcttccacaactacaatatcctcatcgccacactgcgggtggccctgcccagcgtcatgcgcttctgctgctgcgtggctgtcatctacctgggctactgcttctgtggctggatcgtgctggggccctatcatgtgaagttccgctcactctccatggtgtctgagtgcctgttctcgctcatcaatggggacgacatgtttgtgacgttcgccgccatgcaggcgcagcagggccgcagcagcctggtgtggctcttctcccagctctacctttactccttcatcagcctcttcatctacatggtgctcagcctcttcatcgcgctcatcaccggcgcctacgacaccatcaagcatcccggcggcgcaggcgcagaggagagcgagctgcaggcctacatcgcacagtgccaggacagccccacctccggcaagttccgccgcgggagcggctcggcctgcagccttctctgctgctgcggaagggacccctcggaggagcattcgctgctggtgaattgattcgacctgactgccgttggaccgtaggccctggactgcagagacccccgcccccgaccccgcttatttatttgtagggtttgcttttaaggatcggctccctgtcgcgcccgaggagggcctggacctttcgtgtcggacccttgggggcggggagactgggtggggagggtgttgaataaaagggaaaataaa

SEQ ID NO: 432140 - DNA, 2099 bp, Homo sapiens
ggcacagatcagctgatgccggagggtttgaagccgcgccgcgagggagcgaggtcgcagtgacagcggcgggcgatcggacccaggctgccccgccgtacccgcctgcgtcccgcgctcccgccccagcatgacagccccggcgggtccgcgcggctcagagaccgagcggcttctgacccccaaccccgggtatgggacccaggcggggccttcaccggcccctccgacacccccagaagaggaagaccttcgccgtcgtctcaaatactttttcatgagtccctgcgacaagtttcgagccaagggccgcaagccctgcaagctgatgctgcaagtggtcaagatcctggtggtcacggtgcagctcatcctgtttgggctcagtaatcagctggctgtgacattccgggaagagaacaccatcgccttccgacacctcttcctgctgggctactcggacggagcggatgacaccttcgcagcctacacgcgggagcagctgtaccaggccatcttccatgctgtggaccagtacctggcgttgcctgacgtgtcactgggccggtatgcgtatgtccgtggtgggggtgacccttggaccaatggctcagggcttgctctctgccagcggtactaccaccgaggccacgtggacccggccaacgacacatttgacattgatccgatggtggttactgactgcatccaggtggatccccccgagcggccccctccgccccccagcgacgatctcaccctcttggaaagcagctccagttacaagaacctcacgctcaaattccacaagctggtcaatgtcaccatccacttccggctgaagaccattaacctccagagcctcatcaataatgagatcccggactgctataccttcagcgtcctgatcacgtttgacaacaaagcacacagtgggcggatccccatcagcctggagacccaggcccacatccaggagtgtaagcaccccagtgtcttccagcacggagacaacagcttccggctcctgtttgacgtggtggtcatcctcacctgctccctgtccttcctcctctgcgcccgctcactccttcgaggcttcctgctgcagaacgagtttgtggggttcatgtggcggcagcggggacgggtcatcagcctgtgggagcggctggaatttgtcaatggctggtacatcctgctcgtcaccagcgatgtgctcaccatctcgggcaccatcatgaagatcggcatcgaggccaagaacttggcgagctacgacgtctgcagcatcctcctgggcacctcgacgctgctggtgtgggtgggcgtgatccgctacctgaccttcttccacaactacaatatcctcatcgccacactgcgggtggccctgcccagcgtcatgcgcttctgctgctgcgtggctgtcatctacctgggctactgcttctgtggctggatcgtgctggggccctatcatgtgaagttccgctcactctccatggtgtctgagtgcctgttctcgctcatcaatggggacgacatgtttgtgacgttcgccgccatgcaggcgcagcagggccgcagcagcctggtgtggctcttctcccagctctacctttactccttcatcagcctcttcatctacatggtgctcagcctcttcatcgcgctcatcaccggcgcctacgacaccatcaagcatcccggcggcgcaggcgcagaggagagcgagctgcaggcctacatcgcacagtgccaggacagccccacctccggcaagttccgccgcgggagcggctcggcctgcagccttctctgctgctgcggaagggacccctcggaggagcattcgctgctggtgaattgattcgacctgactgccgttggaccgtaggccctggactgcagagacccccgcccccgaccccgcttatttatttgtagggtttgcttttaaggatcggctccctgtcgcgcccgaggagggcctggacctttcgtgtcggacccttgggggcggggagactgggtggggagggtgttgaataaaagggaaaataaaacaaaaaaaacacacaaaaaaaaacaaaaag

SEQ ID NO: 432141 - DNA, 862 bp, Homo sapiens
gaggatccctggatgtgcgtgcatgtgggcacatcatgaagatggcactgaggccaagaacttggcgagctacgacgtctgcagcatcctcctgggcacctcgacgctgctggtgtgggtgggcgtgatccgctacctgaccttcttccacaactacaatatcctcatcgccacactgcgggtggccctgcccagcgtcatgcgcttctgctgctgcgtggctgtcatctacctgggctactgcttctgtggctggatcgtgctggggccctatcatgtgaagttccgctcactctccatggtgtctgagtgcctgttctcgctcatcaatggggacgacatgtttgtgacgttcgccgccatgcaggcgcagcagggccgcagcagcctggtgtggctcttctcccagctctacctttactccttcatcagcctcttcatctacatggtgctcagcctcttcatcgcgctcatcaccggcgcctacgacaccatcaagcatcccggcggcgcaggcgcagaggagagcgagctgcaggcctacatcgcacagtgccaggacagccccacctccggcaagttccgccgcgggagcggctcggcctgcagccttctctgctgctgcggaagggacccctcggaggagcattcgctgctggtgaattgattcgacctgactgccgttggaccgtaggccctggactgcagagacccccgcccccgaccccgcttatttatttgtagggtttgcttttaaggatcggctccctgtcgcgcccgaggagggcctggacctttcgtgtcggacccttgggggcggggagactgggtggggagggtgttgaataaaagggaaaataaa

SEQ ID NO: 432142 - DNA, 1048 bp, Homo sapiens
ggcacagatcagctgatgccggagggtttgaagccgcgccgcgagggagcgaggtcgcagtgacagcggcgggcgatcggacccaggctgccccgccgtacccgcctgcgtcccgcgctcccgccccagcatgacagccccggcgggtccgcgcggctcagagaccgagcggcttctgacccccaaccccgggtatgggacccaggcggggccttcaccggcccctccgacacccccagaagaggaagaccttcgccgtcgtctcaaatactttttcatgagtccctgcgacaagtttcgagccaagggccgcaagccctgcaagctgatgctgcaagtggtcaagatcctggtggtcacggtgcagctcatcctgtttgggctcagtaatcagctggctgtgacattccgggaagagaacaccatcgccttccgacacctcttcctgctgggctactcggacggagcggatgacaccttcgcagcctacacgcgggagcagctgtaccaggccatcttccatgctgtggaccagtacctggcgttgcctgacgtgtcactgggccggtatgcgtatgtccgtggtgggggtgacccttggaccaatggctcagggcttgctctctgccagcggtactaccaccgaggccacgtggacccggccaacgacacatttgacattgatccgatggtggttactggtgagtgggcaggacgaggcttcactgttgggagcctgagctgctgggattaaaatcaacagctgtggctgggcacggtggctcacgcctataataccagcactttgggattacttgcacgtgccaccacacctggctaatttttgtatttttactagagatggggtttcaccacgttggccaggctggtctcgaactcctgacctcaggtgatccacctgccttggcctcccaaggtgctgggatttcaggcatgagccactgaacccagctaagtcatacagtttcaatgaccttgtcattgaccctgggacgttgccattaacatggtgatcctcagctggccc

SEQ ID NO: 432143 - DNA, 740 bp, Homo sapiens
aacctgggacgtagaggttgcagtgagccgagatcaagccactgcactccaacgtgggcgagagaccgagactctgcttcaaagacaaaacaacaattttttaaaaattttaattcaaatgaagtacaattgcaaatttagcctctgacttgcaccatcctgtatccagtgctcaaaagccagtgtggctggtggctgccatattggacagcatagatattgaatacttccatcgcctctagactgaagagatgggagcccaggggcagtgcaccgaggggaaggaatagctaaagcaaaggtctagtagcctgaaaaaacttggagaaaagatggcccctccatgaggccgagtgagaggaaggaagccttggtcgagtcccgggtctggcacattcagattggaggttacggaatggggaaaggggagcgagccagagaaaactgacgcccctcttccctgcttccttcctccagggacccctcggaggagcattcgctgctggtgaattgattcgacctgactgccgttggaccgtaggccctggactgcagagacccccgcccccgaccccgcttatttatttgtagggtttgcttttaaggatcggctccctgtcgcgcccgaggagggcctggacctttcgtgtcggacccttgggggcggggagactgggtggggagggtgttgaataaaagggaaaataaaacaaaaaaaacacacaaaaaaaaacaaaaag

SEQ ID NO: 432144 - DNA, 2303 bp, Homo sapiens
ggcacagatcagctgatgccggagggtttgaagccgcgccgcgagggagcgaggtcgcagtgacagcggcgggcgatcggacccaggctgccccgccgtacccgcctgcgtcccgcgctcccgccccagcatgacagccccggcgggtccgcgcggctcagagaccgagcggcttctgacccccaaccccgggtatgggacccaggcggggccttcaccggcccctccgacacccccagaagaggaagaccttcgccgtcgtctcaaatactttttcatgagtccctgcgacaagtttcgagccaagggccgcaagccctgcaagctgatgctgcaagtggtcaagatcctggtggtcacggtgcagctcatcctgtttgggctcagtaatcagctggctgtgacattccgggaagagaacaccatcgccttccgacacctcttcctgctgggctactcggacggagcggatgacaccttcgcagcctacacgcgggagcagctgtaccaggccatcttccatgctgtggaccagtacctggcgttgcctgacgtgtcactgggccggtatgcgtatgtccgtggtgggggtgacccttggaccaatggctcagggcttgctctctgccagcggtactaccaccgaggccacgtggacccggccaacgacacatttgacattgatccgatggtggttactgactgcatccaggtggatccccccgagcggccccctccgccccccagcgacgatctcaccctcttggaaagcagctccagttacaagaacctcacgctcaaattccacaagtactgcctgctcactcgaggggggcccagggtgggggaggcagcacactaggcactctcaccccagcaactacttccctaaggtggggacagggcccccccgcccgcgctggtgcctgctgggtgagcacttcccctgccagctgcagagtcagcacgtggcaggggacgctggcacttggggccggaagggacccgaagacgcccctgaccctcacccgagcctcctgcctaggctggtcaatgtcaccatccacttccggctgaagaccattaacctccagagcctcatcaataatgagatcccggactgctataccttcagcgtcctgatcacgtttgacaacaaagcacacagtgggcggatccccatcagcctggagacccaggcccacatccaggagtgtaagcaccccagtgtcttccagcacggagacaacagcttccggctcctgtttgacgtggtggtcatcctcacctgctccctgtccttcctcctctgcgcccgctcactccttcgaggcttcctgctgcagaacgagtttgtggggttcatgtggcggcagcggggacgggtcatcagcctgtgggagcggctggaatttgtcaatggctggtacatcctgctcgtcaccagcgatgtgctcaccatctcgggcaccatcatgaagatcggcatcgaggccaagaacttggcgagctacgacgtctgcagcatcctcctgggcacctcgacgctgctggtgtgggtgggcgtgatccgctacctgaccttcttccacaactacaatatcctcatcgccacactgcgggtggccctgcccagcgtcatgcgcttctgctgctgcgtggctgtcatctacctgggctactgcttctgtggctggatcgtgctggggccctatcatgtgaagttccgctcactctccatggtgtctgagtgcctgttctcgctcatcaatggggacgacatgtttgtgacgttcgccgccatgcaggcgcagcagggccgcagcagcctggtgtggctcttctcccagctctacctttactccttcatcagcctcttcatctacatggtgctcagcctcttcatcgcgctcatcaccggcgcctacgacaccatcaagcatcccggcggcgcaggcgcagaggagagcgagctgcaggcctacatcgcacagtgccaggacagccccacctccggcaagttccgccgcgggagcggctcggcctgcagccttctctgctgctgcggaagggacccctcggaggagcattcgctgctggtgaattgattcgacctgactgccgttggaccgtaggccctggactgcagagacccccgcccccgaccccgcttatttatttgtagggtttgcttttaaggatcggctccctgtcgcgcccgaggagggcctggacctttcgtgtcggacccttgggggcggggagactgggtggggagggtgttgaataaaagggaaaataaa

SEQ ID NO: 432145 - DNA, 907 bp, Homo sapiens
ggcacagatcagctgatgccggagggtttgaagccgcgccgcgagggagcgaggtcgcagtgacagcggcgggcgatcggacccaggctgccccgccgtacccgcctgcgtcccgcgctcccgccccagcatgacagccccggcgggtccgcgcggctcagagaccgagcggcttctgacccccaaccccgggtatgggacccaggcggggccttcaccggcccctccgacacccccagaagaggaagaccttcgccgtcgtctcaaatactttttcatgagtccctgcgacaagtttcgagccaagggccgcaagccctgcaagctgatgctgcaagtggtcaagatcctggtggtcacggtgcaggtgaggccagccaagcaggggccccagctgaaggccacctgtggctgctgtgctccttgaagagagtcttaaagcagcactttggaaggccgaggccggtggatcgcttgaggctgggagttcaagaccagtctggccagcatggtgaaaccccatctctactaaaaatacaaaaaaattagccgtgcgtggtggcgggtgcctgtaatcccagctacttggcaggctgaggcaggagaatcgcttgaattgggaggcggaggttgccgtgagctgaaatcatgccactgcactccagcctgggcaacagagcaagactgtctcaaaaaaaaaaagaagccgactctgaggctcagagaggttaggagacttgcccaaagtcacacagcaatagaacattgggagctgggatttgaacccaggcagtctgacaccatgttgacccaatggctgcacagatagttctccctcccccatgccagaccctgtgctgggctctgggaaccccaagatgaatcagacccagccactgccctaagt

SEQ ID NO: 432146 - DNA, 1919 bp, Homo sapiens
ggcacagatcagctgatgccggagggtttgaagccgcgccgcgagggagcgaggtcgcagtgacagcggcgggcgatcggacccaggctgccccgccgtacccgcctgcgtcccgcgctcccgccccagcatgacagccccggcgggtccgcgcggctcagagaccgagcggcttctgacccccaaccccgggtatgggacccaggcggggccttcaccggcccctccgacacccccagaagaggaagaccttcgccgtcgtctcaaatactttttcatgagtccctgcgacaagtttcgagccaagggccgcaagccctgcaagctgatgctgcaagtggtcaagatcctggtggtcacggtgcagctcatcctgtttgggctcagtaatcagctggctgtgacattccgggaagagaacaccatcgccttccgacacctcttcctgctgggctactcggacggagcggatgacaccttcgcagcctacacgcgggagcagctgtaccaggccatcttccatgctgtggaccagtacctggcgttgcctgacgtgtcactgggccggtatgcgtatgtccgtggtgggggtgacccttggaccaatggctcagggcttgctctctgccagcggtactaccaccgaggccacgtggacccggccaacgacacatttgacattgatccgatggtggttactgactgcatccaggtggatccccccgagcggccccctccgccccccagcgacgatctcaccctcttggaaagcagctccagttacaagaacctcacgctcaaattccacaagctggtcaatgtcaccatccacttccggctgaagaccattaacctccagagcctcatcaataatgagatcccggactgctataccttcagcgtcctgatcacgtttgacaacaaagcacacagtgggcggatccccatcagcctggagacccaggcccacatccaggagtgtaagcaccccagtgtcttccagcacggagacaacagcttccggctcctgtttgacgtggtggtcatcctcacctgctccctgtccttcctcctctgcgcccgctcactccttcgaggcttcctgctgcagaacgagtttgtggggttcatgtggcggcagcggggacgggtcatcagcctgtgggagcggctggaatttgtcaatggctggtacatcctgctcgtcaccagcgatgtgctcaccatctcgggcaccatcatgaagatcggcatcgaggccaagaacttggcgagctacgacgtctgcagcatcctcctgggcacctcgacgctgctggtgtgggtgggcgtgatccgctacctgaccttcttccacaactacaatatcctcatcgccacactgcgggtggccctgcccagcgtcatgcgcttctgctgctgcgtggctgtcatctacctgggctactgcttctgtggctggatcgtgctggggccctatcatgtgaagcctcttcatctacatggtgctcagcctcttcatcgcgctcatcaccggcgcctacgacaccatcaagcatcccggcggcgcaggcgcagaggagagcgagctgcaggcctacatcgcacagtgccaggacagccccacctccggcaagttccgccgcgggagcggctcggcctgcagccttctctgctgctgcggaagggacccctcggaggagcattcgctgctggtgaattgattcgacctgactgccgttggaccgtaggccctggactgcagagacccccgcccccgaccccgcttatttatttgtagggtttgcttttaaggatcggctccctgtcgcgcccgaggagggcctggacctttcgtgtcggacccttgggggcggggagactgggtggggagggtgttgaataaaagggaaaataaa

SEQ ID NO: 432147 - DNA, 2113 bp, Homo sapiens
ggcacagatcagctgatgccggagggtttgaagccgcgccgcgagggagcgaggtcgcagtgacagcggcgggcgatcggacccaggctgccccgccgtacccgcctgcgtcccgcgctcccgccccagcatgacagccccggcgggtccgcgcggctcagagaccgagcggcttctgacccccaaccccgggtatgggacccaggcggggccttcaccggcccctccgacacccccagaagaggaagaccttcgccgtcgtctcaaatactttttcatgagtccctgcgacaagtttcgagccaagggccgcaagccctgcaagctgatgctgcaagtggtcaagatcctggtggtcacggtgcagctcatcctgtttgggctcagtaatcagctggctgtgacattccgggaagagaacaccatcgccttccgacacctcttcctgctgggctactcggacggagcggatgacaccttcgcagcctacacgcgggagcagctgtaccaggccatcttccatgctgtggaccagtacctggcgttgcctgacgtgtcactgggccggtatgcgtatgtccgtggtgggggtgacccttggaccaatggctcagggcttgctctctgccagcggtactaccaccgaggccacgtggacccggccaacgacacatttgacattgatccgatggtggttactgactgcatccaggtggatccccccgagcggccccctccgccccccagcgacgatctcaccctcttggaaagcagctccagttacaagaacctcacgctcaaattccacaagctggtcaatgtcaccatccacttccggctgaagaccattaacctccagagcctcatcaataatgagatcccggactgctataccttcagcgtcctgatcacgtttgacaacaaagcacacagtgggcggatccccatcagcctggagacccaggcccacatccaggagtgtaagcaccccagtgtcttccagcacggagacaacagcttccggctcctgtttgacgtggtggtcatcctcacctgctccctgtccttcctcctctgcgcccgctcactccttcgaggcttcctgctgcagaacgagtttgtggggttcatgtggcggcagcggggacgggtcatcagcctgtgggagcggctggaatttgtcaatggctggtacatcctgctcgtcaccagcgatgtgctcaccatctcgggcaccatcatgaagatcggcatcgaggccaagaacttggcgagctacgacgtctgcagcatcctcctgggcacctcgacgctgctggtgtgggtgggcgtgatccgctacctgaccttcttccacaactacaatatcctcatcgccacactgcgggtggccctgcccagcgtcatgcgcttctgctgctgcgtggctgtcatctacctgggctactgcttctgtggctggatcgtgctggggccctatcatgtgaagttccgctcactctccatggtgtctgagtgcctgttctcgctcatcaatggggacgacatgtttgtgacgttcgccgccatgcaggcgcagcagggccgcagcagcctggtgtggctcttctcccagctctacctttactccttcatcagcctcttcatctacatggtgctcagcctcttcatcgcgctcatcaccggcgcctacgacaccatcaagcatcccggcggcgcaggcgcagaggagagcgagctgcaggcctacatcgcacagtgccaggacagccccacctccggcaagttccgccgcgggagcggctcggcctgcagccttctctgctgctgcggaagggacccctcggaggagcattcgctgctggtgaattgattcgacctgactgccgttggaccgtaggccctggactgcagagacccccgcccccgaccccgcttatttatttgtagggtttgcttttaaggatcggctccctgtcgcgcccgaggagggcctggacctttcgtgtcggacccttgggggcggggagactgggtggggagggtgttgaataaaagggaaaataaatgtgtcgttttcatttttagcgggaggagcagtccttgcgttaag

SEQ ID NO: 432148 - DNA, 1190 bp, Homo sapiens
ggcacagatcagctgatgccggagggtttgaagccgcgccgcgagggagcgaggtcgcagtgacagcggcgggcgatcggacccaggctgccccgccgtacccgcctgcgtcccgcgctcccgccccagcatgacagccccggcgggtccgcgcggctcagagaccgagcggcttctgacccccaaccccgggtatgggacccaggcggggccttcaccggcccctccgacacccccagaagaggaagaccttcgccgtcgtctcaaatactttttcatgagtccctgcgacaagtttcgagccaagggccgcaagccctgcaagctgatgctgcaagtggtcaagatcctggtggtcacggtgcagctcatcctgtttgggctcagtaatcagctggctgtgacattccgggaagagaacaccatcgccttccgacacctcttcctgctgggctactcggacggagcggatgacaccttcgcagcctacacgcgggagcagctgtaccaggccatcttccatgctgtggaccagtacctggcgttgcctgacgtgtcactgggccggtatgcgtatgtccgtggtgggggtgacccttggaccaatggctcagggcttgctctctgccagcggtactaccaccgaggccacgtggacccggccaacgacacatttgacattgatccgatggtggttactgactgcatccaggtggatccccccgagcggccccctccgccccccagcgacgatctcacccctcttcatctacatggtgctcagcctcttcatcgcgctcatcaccggcgcctacgacaccatcaagcatcccggcggcgcaggcgcagaggagagcgagctgcaggcctacatcgcacagtgccaggacagccccacctccggcaagttccgccgcgggagcggctcggcctgcagccttctctgctgctgcggaagggacccctcggaggagcattcgctgctggtgaattgattcgacctgactgccgttggaccgtaggccctggactgcagagacccccgcccccgaccccgcttatttatttgtagggtttgcttttaaggatcggctccctgtcgcgcccgaggagggcctggacctttcgtgtcggacccttgggggcggggagactgggtggggagggtgttgaataaaagggaaaataaa

SEQ ID NO: 432149 - DNA, 783 bp, Homo sapiens
ttttcctcctttttggcttacatagcgttccagagactgaacttctcaaatcactgcttcaacagcttttaaaaatctggacctagttactcctgtcatctatgtgtaaagatttagaaaaaaaatcccaaacccaagggtgggcagccgcgaggatgtacagctcctggcagtgtgcgctcacccggagacctgaggtcaaagcccaaatgctgagcacctcctgggaggcgggagcatggtctgctcagtgccagacatctggatattgagaaaacatctgggtagctggggttttcaggtttctgcctgacatttaatatcacaaacattgagcctgctcctgtcccccaccagccacgcggcttctcctcccaaacatacccagctccttcccctgccttcctgacgggtaagaaacatccattctttccaattccccagccgttttccccctaccggaaatctgatgggcttatgacatcatggctggctgctgagcgatgaagtggatgccacaaagaaatccgacatatcagatagattctgaaatcggtttccctccagctgtagtaacaggcgtgaagtcaggagaatttgagctttgtttaaaaaataaataaataaataaataaaccataacaaagtcttgccctgtattaaatgcaattttcttaaaaacaagcaaaccttttggacatcattttattttaatagaaatgctgagttttatgaaactaaagtggctaataaatcagacctgaagctttgtgtgagtgttcc

SEQ ID NO: 432150 - DNA, 834 bp, Homo sapiens
tcctgagggccagagaaagggagaagggggtggggggacagccacgtggccgcaggaggatttacaacattttctttcgccatcgatgttatcgcaaaatgtgtgagagaagcggctgcgcagcccggacgggagcgtgagggtgcgggccaggtaagcagccccggcggtttcgccgcatacgggactgcggggcgaccgcgggcaccagccacgcgcagcggctccgcggggtctcggccgggtccgcgctctgaaggatctcgagagccatggatggtgcaggcgggaccctcgagctgcagcatctccggtgacccggggttgccgaggaggtggagaccagcacaggtggtccggcccgggcgcctccgaatccgggggtggtcaagacggatccccaaggctgaggtcggcagtcccggggactcgcagctgttgagcctgtggagacgcggccccgtgaccgaggcacccttcagcaacccgggggcagcgttttccccctaccggaaatctgatgggcttatgacatcatggctggctgctgagcgatgaagtggatgccacaaagaaatccgacatatcagatagattctgaaatcggtttccctccagctgtagtaacaggcgtgaagtcaggagaatttgagctttgtttaaaaaataaataaataaataaataaaccataacaaagtcttgccctgtattaaatgcaattttcttaaaaacaagcaaaccttttggacatcattttattttaatagaaatgctgagttttatgaaactaaagtggctaataaatcagacctgaagctttgtgtgagtgttcc

SEQ ID NO: 432151 - DNA, 1254 bp, Homo sapiens
tcctgagggccagagaaagggagaagggggtggggggacagccacgtggccgcaggaggatttacaacattttctttcgccatcgatgttatcgcaaaatgtgtgagagaagcggctgcgcagcccggacgggagcgtgagggtgcgggccaggtaagcagccccggcggtttcgccgcatacgggactgcggggcgaccgcgggcaccagccacgcgcagcggctccgcggggtctcggccgggtccgcgctctgaaggatctcgagagccatggatggtgcaggcgggaccctcgagctgcagcatctccggtgacccggggttgccgaggaggtggagaccagcacaggtggtccggcccgggcgcctccgaatccgggggtggtcaagacggatccccaaggctgaggtcggcagtcccggggactcgcagctgttgagcctgtggagacgcggccccgtgaccgaggcacccttcagcaacccgggggcagcgttccagagactgaacttctcaaatcactgcttcaacagcttttaaaaatctggacctagttactcctgtcatctatgtgtaaagatttagaaaaaaaatcccaaacccaagggtgggcagccgcgaggatgtacagctcctggcagtgtgcgctcacccggagacctgaggtcaaagcccaaatgctgagcacctcctgggaggcgggagcatggtctgctcagtgccagacatctggatattgagaaaacatctgggtagctggggttttcaggtttctgcctgacatttaatatcacaaacattgagcctgctcctgtcccccaccagccacgcggcttctcctcccaaacatacccagctccttcccctgccttcctgacgggtaagaaacatccattctttccaattccccagccgttttccccctaccggaaatctgatgggcttatgacatcatggctggctgctgagcgatgaagtggatgccacaaagaaatccgacatatcagatagattctgaaatcggtttccctccagctgtagtaacaggcgtgaagtcaggagaatttgagctttgtttaaaaaataaataaataaataaataaaccataacaaagtcttgccctgtattaaatgcaattttcttaaaaacaagcaaaccttttggacatcattttattttaatagaaatgctgagttttatgaaactaaagtggctaataaatcagacctgaagctttgtgtgagtgttcc

SEQ ID NO: 432152 - DNA, 1111 bp, Homo sapiens
tcctgagggccagagaaagggagaagggggtggggggacagccacgtggccgcaggaggatttacaacattttctttcgccatcgatgttatcgcaaaatgtgtgagagaagcggctgcgcagcccggacgggagcgtgagggtgcgggccaggtaagcagccccggcggtttcgccgcatacgggactgcggggcgaccgcgggcaccagccacgcgcagcggctccgcggggtctcggccgggtccgcgctctgaaggatctcgagagccatggatggtgcaggcgggaccctcgagctgcagcatctccggtgacccggggttgccgaggaggtggagaccagcacaggtggtccggcccgggcgcctccgaatccgggggtggtcaagacggatccccaaggctgaggtcggcagtcccggggactcgcagctgttgagcctgtggagacgcggccccgtgaccgaggcacccttcagcaacccgggggcagcgttccagagactgaacttctcaaatcactgcttcaacagcttttaaaaatctggacctagttactcctgtcatctatgtgtaaagatttagaaaaaaaatcccaaacccaagggtgggcagccgcgaggatgtacagctcctggcagtgtgcgctcacccggagacctgaggtcaaagcccaaatgctgagcacctcctgggaggcgggagcatggtctgctcagtgccagacatctggatattgagaaaacatctgggtagctggggttttcaggtttctgcctgacatttaatatcacaaacattgagcctgctcctgtcccccaccagccacgcggcttctcctcccaaacatacccagctccttcccctgccttcctgacgggtaagaaacatccattctttccaattccccagccgttttccccctaccggaaatctgatgggcttatgacatcatggctggctgctgagcgatgaagtggatgccacaaagaaatccgacatatcagatagattctgaaatcggtttccctccagctgtagtaacaggcgtgaagtcaggagaatttgagctttgtttaaaaaataaataaataaataaataaaccat

SEQ ID NO: 432153 - DNA, 691 bp, Homo sapiens
tcctgagggccagagaaagggagaagggggtggggggacagccacgtggccgcaggaggatttacaacattttctttcgccatcgatgttatcgcaaaatgtgtgagagaagcggctgcgcagcccggacgggagcgtgagggtgcgggccaggtaagcagccccggcggtttcgccgcatacgggactgcggggcgaccgcgggcaccagccacgcgcagcggctccgcggggtctcggccgggtccgcgctctgaaggatctcgagagccatggatggtgcaggcgggaccctcgagctgcagcatctccggtgacccggggttgccgaggaggtggagaccagcacaggtggtccggcccgggcgcctccgaatccgggggtggtcaagacggatccccaaggctgaggtcggcagtcccggggactcgcagctgttgagcctgtggagacgcggccccgtgaccgaggcacccttcagcaacccgggggcagcgttttccccctaccggaaatctgatgggcttatgacatcatggctggctgctgagcgatgaagtggatgccacaaagaaatccgacatatcagatagattctgaaatcggtttccctccagctgtagtaacaggcgtgaagtcaggagaatttgagctttgtttaaaaaataaataaataaataaataaaccat

SEQ ID NO: 432154 - DNA, 641 bp, Homo sapiens
tcctgagggccagagaaagggagaagggggtggggggacagccacgtggccgcaggaggatttacaacattttctttcgccatcgatgttatcgcaaaatgtgtgagagaagcggctgcgcagcccggacgggagcgtgagggtgcgggccaggtaagcagccccggcggtttcgccgcatacgggactgcggggcgaccgcgggcaccagccacgcgcagcggctccgcggggtctcggccgggtccgcgctctgaaggatctcgagagccatggatggtgcaggcgggaccctcgagctgcagcatctccggtgacccggggttgccgaggaggtggagaccagcacaggtggtccggcccgggcgcctccgaatccgggggtggtcaagacggatccccaaggctgaggtcggcagtcccggggactcgcagctgttgagcctcgttttccccctaccggaaatctgatgggcttatgacatcatggctggctgctgagcgatgaagtggatgccacaaagaaatccgacatatcagatagattctgaaatcggtttccctccagctgtagtaacaggcgtgaagtcaggagaatttgagctttgtttaaaaaataaataaataaataaataaaccat

SEQ ID NO: 432155 - DNA, 491 bp, Homo sapiens
tcctgagggccagagaaagggagaagggggtggggggacagccacgtggccgcaggaggatttacaacattttctttcgccatcgatgttatcgcaaaatgtgtgagagaagcggctgcgcagcccggacgggagcgtgagggtgcgggccagcgttttccccctaccggaaatctgatgggcttatgacatcatggctggctgctgagcgatgaagtggatgccacaaagaaatccgacatatcagatagattctgaaatcggtttccctccagctgtagtaacaggcgtgaagtcaggagaatttgagctttgtttaaaaaataaataaataaataaataaaccataacaaagtcttgccctgtattaaatgcaattttcttaaaaacaagcaaaccttttggacatcattttattttaatagaaatgctgagttttatgaaactaaagtggctaataaatcagacctgaagctttgtgtgagtgttcc

SEQ ID NO: 432156 - DNA, 348 bp, Homo sapiens
tcctgagggccagagaaagggagaagggggtggggggacagccacgtggccgcaggaggatttacaacattttctttcgccatcgatgttatcgcaaaatgtgtgagagaagcggctgcgcagcccggacgggagcgtgagggtgcgggccagcgttttccccctaccggaaatctgatgggcttatgacatcatggctggctgctgagcgatgaagtggatgccacaaagaaatccgacatatcagatagattctgaaatcggtttccctccagctgtagtaacaggcgtgaagtcaggagaatttgagctttgtttaaaaaataaataaataaataaataaaccat

SEQ ID NO: 432157 - DNA, 2068 bp, Homo sapiens
ggtccttcagcctcgttcccgggcagtataaagtttgctgtctcctttgttcgccctcggttgcgcagtagtgctagcggcttcgcggttcggtcctcgcacccggcagccgccactggtgctgagctgctaggaagcccctatcgccgagctcgttggagcttgaacccattgtcacccctccgactcaccggcccaaaaaaaaaaaaaaatggttgaagcagatcgcccaggaaagctcttcattggtgggcttaatacggaaacaaatgagaaagctcttgaagcagtatttggcaaatatggacgaatagtggaagtactcttgatgaaagaccgtgaaaccaacaaatcaagaggatttgcttttgtcacctttgaaagcccagcagacgctaaggatgcagccagagacatgaatggaaagtcattagatggaaaagccatcaaggtggaacaagccaccaaaccatcatttgaaagtggtagacgtggaccgcctccacctccaagaagtagaggccctccaagaggtcttagaggtggaagaggaggaagtggaggaaccaggggacctccctcacggggaggacacatggatgacggtggatattccatgaattttaacatgagttcttccaggggaccactcccagtaaaaagaggaccaccaccaagaagtgggggtcctcctcctaagagatctgcaccttcaggaccagttcgcagtagcagtggaatgggaggaagagctcctgtatcacgtggaagagatagttatggaggtccacctcgaagggaaccgctgccctctcgtagagatgtttatttgtccccaagagatgatgggtattctactaaagacagctattcaagcagagattacccaagttctcgtgatactagagattatgcaccaccaccacgagattatacttaccgtgattatggtcattccagttcacgtgatgactatccatcaagaggatatagcgatagagatggatatggtcgtgatcgtgactattcagatcatccaagtggaggttcctacagagattcatatgagagttatggtaactcacgtagtgctccacctacacgagggcccccgccatcttatggtggaagcagtcgctatgatgattacagcagctcacgtgacggatatggtggaagtcgagacagttactcaagcagccgaagtgatctctactcaagtggtcgtgatcgggttggcagacaagaaagagggcttcccccttctatggaaagggggtaccctcctccacgtgattcctacagcagttcaagccgcggagcaccaagaggtggtggccgtggaggaagccgatctgatagagggggaggcagaagcagatactagaaacaaacaaaactttggaccaaaatcccagttcaaagaaacaaaaagtggaaactattctatcataactacccaaggactactaaaaggaaaaattgtgttactttttttaaattccctgttaagttcccctccataatttttatgttcttgtgaggaaaaaagtaaaacatgtttaattttatttgactttcgcattgcttttcaacaagcaaatgttaaatgtgttaagacttgtactagtgttgtaactttccaagtaaaagtatcccctaaaggccacttcctatctgatttttcccagcaaatgaggcaggcaattctaagatcttccacaaaacatctagccatctaaaatggagagatgaatcattctacctatacaaacaagctagctattagagggtggttggggtatgctactcataagatttcagggtgtcttccaactgaaatctcaatgttctcagtacgaaaaacctgaaatcacatgcctatgtaaggaaagtgctattcacccagtaaacccaaaaaagcaaatggataatgctggccattttgcctttctgacatttccttgggaatctgcaagaacctcccctttcccttcccccaataagaccatttaagtgtgtgttaaacaactacagaatactaaataaaaagtttggccaaaaccaa

SEQ ID NO: 432158 - DNA, 921 bp, Homo sapiens
caagtgtcgccattttgtcttttacacgcggtttttaatgacgagttttaattaggttccgctgcagtcacggagtgtcgagtgttagtgtgtgcgtccgcgttccgttacttaatagcaaacgatgttgacgatttgtttttatctttttggccggatagtagaattttcggtagggcgggggccggtgaagaagaggggcggcataacttggcttaaacttcacatttctccttggatttagtagggaatcctaatgaggaaaagaggagtcgttggaagagggcttggtgttaaggtcctgtgtctagcctgtgaccttgggagtcttttaaaaccatcgttaggaagggtgtgatgagtaattgaatctttcaaaggcaagaggactggaactaaaagttgctttttcaaatgttaagcagctgttgcttaagaacagctaagggtgatcaagggtagtggtaaaagttaagttggcccttttaaccagttttatgtaaattgcagtgttactaaactacttagttcaaattgcttcctactgtggctgaggcttagctcgttatcgttttctttagttattaaggaacaatggttttagtggaaaatatgagaaatgtgcgaaagtaaaagtgtccaataaacttgaggaactttttgcagtgaggtaatactattccttttcaacagactcaccggcccaaaaaaaaaaaaaaatggttgaagcagatcgcccaggaaagctcttcattggtgggcttaatacggaaacaaatgagaaagctcttgaagcagtatttggcaaatatggacgaatagtggaaggtgagttgtctggcagtacaggctgggctattataattaaaatataagctatgatgaatttgattgcattgatcgtctgacatgataatgtat

SEQ ID NO: 432159 - DNA, 977 bp, Homo sapiens
gcggttcggtcctcgcacccggcagccgccactggtgctgagctgctaggaagcccctatcgccgagctcgttggagcttggcgaagcggcttcgcggttcggtcctcgcacccggcagccgccactggtgctgagctgctaggaagcccctatcgccgagctcgttggagcttgaacccattgtcacccctccgactcaccggcccaaaaaaaaaaaaaaaaaatctcgaaatatagtttttttctttctggggcccggaaccctcgtgttggaggggtggcgagtcaccttaaagccgggagcggcgggtaagaggcggggccgggcaccccccttttggacctcccagtgccgccgggccatcaaagatcaagactatgggcccagaaacttgaaggactagggcggggacaggctcgcccgccggggccccggggctatgggcacggccctgaagctggttggctgggagggccgggcgccagagggcctaacgagggtggcgcgaatctggtgtacaccgggggaatggcggggcacaagagccatcttcttcaacacggatcgggtgggagtgcagcaggaccactatcctgggccggagggccttcacttcaggaacccttggttccagtaaccccaattatctattgacatcgcgggccagaacctcgaaagattcccttcccctagtgggtccaaagacctaccggatggtggatatctccctgggagtgtgtgttctgcacccacatggtcagagagctccctaacagtggcacaggggctaaggcgtgggaaaggggacgatggtgcgcggccatgggccagggggcccagtggtgggggcagtcagcgctaggtgacaccacgggccggtaccggagacgcgggctcaaaaggcgggtaccatcgggtgggcacaaatgttccggtcagttgtaaccatggcgcggcattgaacagacgatgcgc

SEQ ID NO: 432160 - DNA, 927 bp, Homo sapiens
  misc_feature (541)..(541): n is a, c, g, or t
ggtccttcagcctcgttcccgggcagtataaagtttgctgtctcctttgttcgccctcggttgcgcagtagtgctagcggcttcgcggttcggtcctcgcacccggcagccgccactggtgctgagctgctaggaagcccctatcgccgagctcgttggagcttgaacccattgtcacccctccgactcaccggcccaaaaaaaaaaaaaaaaaaaaaaaaaaaaaattttgtggggcgcggcttgggccttggaaaagttttttaaaaccttttgtttgggggggggggcgccccttggttatttgtggaccctgtgggccaaggggttccaagggaaacccggggtcaagaaactaaggtggtcggtggttctctccaccaattataaaaaaacgcgccgggggggaacaccggcggcttttctgggaacaatcccagaagttgggtgttccgagaggggcactcaccggggatctatcacacgggaggctccaacgggacgccccggattatcaaaattctccgcgcgcgcgtggganaacgaagagagcacaaagaaaagacgaaagaaaaaacgaagacaagagccaaagcgaaagagagagaaagaaaagcagaagagaggaaaaaacacgaaaagaacagaggaaccaaaaaaaaagaaaggaagaaaacagaaaaaaaagaacaaaaaacaaagaaaaccaacagaaaccccaaagaacgacaagcaaagaacaaaaaaaagacaggagagaaagaacagaaaaggaacacgaaccagcaacacaaaaaacagcagaagaaagaacacaaaaaaaaaagaacgaaaaagaagaaagagcagagccaaaaaaaggaaaaagacaagaaccaaaaacgaagacaaaagagaagtacagaagaagaaagaaaccgaaaaaaa

SEQ ID NO: 432161 - DNA, 4487 bp, Homo sapiens
ggtccttcagcctcgttcccgggcagtataaagtttgctgtctcctttgttcgccctcggttgcgcagtagtgctagcggcttcgcggttcggtcctcgcacccggcagccgccactggtgctgagctgctaggaagcccctatcgccgagctcgttggagcttgaacccattgtcacccctccgactcaccggcccaaaaaaaaaaaaaaatggttgaagcagatcgcccaggaaagctcttcattggtgggcttaatacggaaacaaatgagaaagctcttgaagcagtatttggcaaatatggacgaatagtggaagtactcttgatgaaagaccgtgaaaccaacaaatcaagaggatttgcttttgtcacctttgaaagcccagcagacgctaaggatgcagccagagacatgaatggaaagtcattagatggaaaagccatcaaggtggaacaagccaccaaaccatcatttgaaagtggtagacgtggaccgcctccacctccaagaagtagaggccctccaagaggtcttagaggtggaagaggaggaagtggaggaaccaggggacctccctcacggggaggacacatggatgacggtggatattccatgaattttaacatgagttcttccaggggaccactcccagtaaaaagaggaccaccaccaagaagtgggggtcctcctcctaagagatctgcaccttcaggaccagttcgcagtagcagtggaatgggaggaagagctcctgtatcacgtggaagagatagttatggaggtccacctcgaagggaaccgctgccctctcgtagagatgtttatttgtccccaagagatgatgggtattctactaaagacagctattcaagcagagattacccaagttctcgtgatactagagattatgcaccaccaccacgagattatacttaccgtgattatggtcattccagttcacgtgatgactatccatcaagaggatatagcgatagagatggatatggtcgtgatcgtgactattcagatcatccaagtggaggttcctacagagattcatatgagagttatggtaactcacgtagtgctccacctacacgagggcccccgccatcttatggtggaagcagtcgctatgatgattacagcagctcacgtgacggatatggtggaagtcgagacagttactcaagcagccgaagtgatctctactcaagtggtcgtgatcgggttggcagacaagaaagagggcttcccccttctatggaaagggggtaccctcctccacgtgattcctacagcagttcaagccgcggagcaccaagaggtggtggccgtggaggaagccgatctgatagagggggaggcagaagcagatactagaaacaaacaaaactttggaccaaaatcccagttcaaagaaacaaaaagtggaaactattctatcataactacccaaggactactaaaaggaaaaattgtgttactttttttaaattccctgttaagttcccctccataatttttatgttcttgtgaggaaaaaagtaaaacatgtttaattttatttgactttcgcattgcttttcaacaagcaaatgttaaatgtgttaagacttgtactagtgttgtaactttccaagtaaaagtatcccctaaaggccacttcctatctgatttttcccagcaaatgaggcaggcaattctaagatcttccacaaaacatctagccatctaaaatggagagatgaatcattctacctatacaaacaagctagctattagagggtggttggggtatgctactcataagatttcagggtgtcttccaactgaaatctcaatgttctcagtacgaaaaacctgaaatcacatgcctatgtaaggaaagtgctattcacccagtaaacccaaaaaagcaaatggataatgctggccattttgcctttctgacatttccttgggaatctgcaagaacctcccctttcccttcccccaataagaccatttaagtgtgtgttaaacaactacagaatactaaataaaaagtttggccaaaaccaaccatgaagctgcaaaggtgcttgctcttactgtttcaaatttttgcaactctgtagtgtctcacttttaaaggaacagcttgattgcaaaggagaaaatagataagcaatgaagttatctccaacttcctaaaggcttatgacttctaaaaagtgaatctatcagcattccacatcagatttaaagcatcaaatgcctgtgaaacagcaaagatggtaagcaaagcaaactagtttttccgtctaagtcgaaattgaacacttaccttcctcatagtacagtgaaacatactgtacctcaaggcaatggaaatgccttctagattaaaaaaaacttttggaaaaaagaaatattcaatagcgtattagaagtcctccaaattcaacacttggattttttttttttttttttaaagcatgtgtgacacttaaaggctttattaatagagctgttgtttaccaatggcgatctggggcttgggagggggtatttttttcaaagtccatttttgatgaagacctttaaacatgcttcgtatgtttttaacatttttttcaaattagtcttttagtcaatataggaaatggcttaagtttggggtccccctttttacccctgtaagccattgcaaacttgacatttagttggatgcctgacttgtttttagttctatgaaactacactgtatggagaaaatctattgcaagtggtctttaaaaagcaaaacctgaggcagcatgacccaggtccagccatgaagttgaaaaagatgctcttgaatatagtaaacttgaagacctccaactaaaaatccttatactgcacttattccttcaaataagttttgttcgttcaacttatggatttaacgtggcagtgcaccattggaacagaatgacaatccataagccatgcaacttaacaatttaagccattccagtccatcccgagccagtgaatcttccaccacttaagacaaatagtagaacatgaaatatattaagctgcaagtctgaacttgccttttctttctggaaaagagggcagtaataggcaagttttaaaagaatttccttaagagagataactagttttcatttatttaacttttgcaggttggtgattttgctcattatggtcgtggagtgctgattgattcacagtagataaagctggcagtaagaaatgctaagagttgttgaagcagaaggcggctgattgtcaataagtcactacagttgcataagcagtgctgtcagaattggtttggtgcaggcaatagattttgccttcaggggttcctgtggatctgaggaaggcatcagtgttgattaacactcataactagggagtgactggtagttacttaaagcaagtaattgaccaaatggaaaaggggaagtaattaaggaaattggtaagtggaggtagtcaggaagttcttgtggttcttcacatagattttacagctttggctttcattttgtttagctaaagtcatggggacaactcttcaatttagaacttaagttgaattataaaaatgatggatataagtggtagctgtatctagtgaagtgtctgtcagtaagtgaaacattttttggtggtggcttatccacaaacagtttagttgtagaataaaacttatgagtgacatctggaaagtaaccatgctaagatggcaagcacactggaaacaattaggccacttggctttcttttgctgtattgttttataagcctactttacctcccagtcttggaaacaagttttagttttttattggtttggagactagagccaatagtataatgttctcaaaggaaacagacttgagttgttggattagaggaactaacccaacttatatgattttttttttgtttttgtcgtgtagttatggcactgtcttatttggaacatttgcaactagggataatacaacatttttaactctcatttgacaacctactactaatcacagaccacaagggtaatgaccaaatttatgtggtttttgcactccatagttgtcttagcccaatctttctatactcttacgattacttgggttaacgcttctgtgaggaccttctggctcttgagataccctaaatatttaagatatttagatatcttgaagatagtataggatatagagattgtaccaaataggaatataaggagtatgttaaaatgaccagatacctgtttgatagtttactgacctagcagatgtgtggaaaaggaatcagatcttgattcttctgggtttatactggttgtaaaacagaatgatacagaaaatgttttccttgtttaactggtagttgaacatagaacttgggtattatagatcacttttcactttttggaatgttttgtattgaaacttaataaaactttaacatggca

SEQ ID NO: 432162 - DNA, 3587 bp, Homo sapiens
ggtccttcagcctcgttcccgggcagtataaagtttgctgtctcctttgttcgccctcggttgcgcagtagtgctagcggcttcgcggttcggtcctcgcacccggcagccgccactggtgctgagctgctaggaagcccctatcgccgagctcgttggagcttgaacccattgtcacccctccgactcaccggcccaaaaaaaaaaaaaaatggttgaagcagatcgcccaggaaagctcttcattggtgggcttaatacggaaacaaatgagaaagctcttgaagcagtatttggcaaatatggacgaatagtggaagtactcttgatgaaagaccgtgaaaccaacaaatcaagaggatttgcttttgtcacctttgaaagcccagcagacgctaaggatgcagccagagacatgaatggaaagtcattagatggaaaagccatcaaggtggaacaagccaccaaaccatcatttgaaagtggtagacgtggaccgcctccacctccaagaagtagaggccctccaagaggtcttagaggtggaagaggaggaagtggaggaaccaggggacctccctcacggggaggacacatggatgacggtggatattccatgaattttaacatgagttcttccaggggaccactcccagtaaaaagaggaccaccaccaagaagtgggggtcctcctcctaagagatctgcaccttcaggaccagttcgcagtagcagtggaatgggaggaagagctcctgtatcacgtggaagagatagttatggaggtccacctcgaagggaaccgctgccctctcgtagagatgtttatttgtccccaagagatgatgggtattctactaaagacagctattcaagcagagattacccaagttctcgtgatactagagattatgcaccaccaccacgagattatacttaccgtgattatggtcattccagttcacgtgatgactatccatcaagaggatatagcgatagagatggatatggtcgtgatcgtgactattcagatcatccaagtggaggttcctacagagattcatatgagagttatggtaactcacgtagtgctccacctacacgagggcccccgccatcttatggtggaagcagtcgctatgatgattacagcagctcacgtgacggatatggtggaagtcgagacagttactcaagcagccgaagtgatctctactcaagtggtcgtgatcgggttggcagacaagaaagagggcttcccccttctatggaaagggggtaccctcctccacgtgattcctacagcagttcaagccgcggagcaccaagaggtggtggccgtggaggaagccgatctgatagagggggaggcagaagcagatactagaaacaaacaaaactttggaccaaaatcccagttcaaagaaacaaaaagtggaaactattctatcataactacccaaggactactaaaaggaaaaattgtgttactttttttaaattccctgttaagttcccctccataatttttatgttcttgtgaggaaaaaagtaaaacatgtttaattttatttgactttcgcattgcttttcaacaagcaaatgttaaatgtgttaagacttgtactagtgttgtaactttccaagtaaaagtatcccctaaaggccacttcctatctgatttttcccagcaaatgaggcaggcaattctaagatcttccacaaaacatctagccatctaaaatggagagatgaatcattctacctatacaaacaagctagctattagagggtggttggggtatgctactcataagatttcagggtgtcttccaactgaaatctcaatgttctcagtacgaaaaacctgaaatcacatgcctatgtaaggaaagtgctattcacccagtaaacccaaaaaagcaaatggataatgctggccattttgcctttctgacatttccttgggaatctgcaagaacctcccctttcccttcccccaataagaccatttaagtgtgtgttaaacaactacagaatactaaataaaaagtttggccaaaaccaaccatgaagctgcaaaggtgcttgctcttactgtttcaaatttttgcaactctgtagtgtctcacttttaaaggaacagcttgattgcaaaggagaaaatagataagcaatgaagttatctccaacttcctaaaggcttatgacttctaaaaagtgaatctatcagcattccacatcagatttaaagcatcaaatgcctgtgaaacagcaaagatggttggtgattttgctcattatggtcgtggagtgctgattgattcacagtagataaagctggcagtaagaaatgctaagagttgttgaagcagaaggcggctgattgtcaataagtcactacagttgcataagcagtgctgtcagaattggtttggtgcaggcaatagattttgccttcaggggttcctgtggatctgaggaaggcatcagtgttgattaacactcataactagggagtgactggtagttacttaaagcaagtaattgaccaaatggaaaaggggaagtaattaaggaaattggtaagtggaggtagtcaggaagttcttgtggttcttcacatagattttacagctttggctttcattttgtttagctaaagtcatggggacaactcttcaatttagaacttaagttgaattataaaaatgatggatataagtggtagctgtatctagtgaagtgtctgtcagtaagtgaaacattttttggtggtggcttatccacaaacagtttagttgtagaataaaacttatgagtgacatctggaaagtaaccatgctaagatggcaagcacactggaaacaattaggccacttggctttcttttgctgtattgttttataagcctactttacctcccagtcttggaaacaagttttagttttttattggtttggagactagagccaatagtataatgttctcaaaggaaacagacttgagttgttggattagaggaactaacccaacttatatgattttttttttgtttttgtcgtgtagttatggcactgtcttatttggaacatttgcaactagggataatacaacatttttaactctcatttgacaacctactactaatcacagaccacaagggtaatgaccaaatttatgtggtttttgcactccatagttgtcttagcccaatctttctatactcttacgattacttgggttaacgcttctgtgaggaccttctggctcttgagataccctaaatatttaagatatttagatatcttgaagatagtataggatatagagattgtaccaaataggaatataaggagtatgttaaaatgaccagatacctgtttgatagtttactgacctagcagatgtgtggaaaaggaatcagatcttgattcttctgggtttatactggttgtaaaacagaatgatacagaaaatgttttccttgtttaactggtagttgaacatagaacttgggtattatagatcacttttcactttttggaatgttttgtattgaaacttaataaaactttaacatggca

SEQ ID NO: 432163 - DNA, 4571 bp, Homo sapiens
ggtccttcagcctcgttcccgggcagtataaagtttgctgtctcctttgttcgccctcggttgcgcagtagtgctagcggcttcgcggttcggtcctcgcacccggcagccgccactggtgctgagctgctaggaagcccctatcgccgagctcgttggagcttgaacccattgtcacccctccgactcaccggcccaaaaaaaaaaaaaaatggttgaagcagatcgcccaggaaagctcttcattggtgggcttaatacggaaacaaatgagaaagctcttgaagcagtatttggcaaatatggacgaatagtggaagtactcttgatgaaagaccgtgaaaccaacaaatcaagaggatttgcttttgtcacctttgaaagcccagcagacgctaaggatgcagccagagacatgaatggaaagtcattagatggaaaagccatcaaggtggaacaagccaccaaaccatcatttgaaagtggtagacgtggaccgcctccacctccaagaagtagaggccctccaagaggtcttagaggtggaagaggaggaagtggaggaaccaggggacctccctcacggggaggacacatggatgacggtggatattccatgaattttaacatgagttcttccaggggaccactcccagtaaaaagaggaccaccaccaagaagtgggggtcctcctcctaagagatctgcaccttcaggaccagttcgcagtagcagtggaatgggaggaagagctcctgtatcacgtggaagagatagttatggaggtccacctcgaagggaaccgctgccctctcgtagagatgtttatttgtccccaagagatgatgggtattctactaaagacagctattcaagcagagattacccaagttctcgtgatactagagattatgcaccaccaccacgagattatacttaccgtgattatggtcattccagttcacgtgatgactatccatcaagaggatatagcgatagagatggatatggtcgtgatcgtgactattcagatcatccaagtggaggttcctacagagattcatatgagagttatggtaactcacgtagtgctccacctacacgagggcccccgccatcttatggtggaagcagtcgctatgatgattacagcagctcacgtgacggatatggtggaagtcgagacagttactcaagcagccgaagtgatctctactcaagtggtcgtgatcgggttggcagacaagaaagagggcttcccccttctatggaaagggggtaccctcctccacgtgattcctacagcagttcaagccgcggagcaccaagaggtggtggccgtggaggaagccgatctgatagagggggaggcagaagcagatactagaaacaaacaaaactttggaccaaaatcccagttcaaagaaacaaaaagtggaaactattctatcataactacccaaggactactaaaaggaaaaattgtgttactttttttaaattccctgttaagttcccctccataatttttatgttcttgtgaggaaaaaagtaaaacatgtttaattttatttgactttcgcattgcttttcaacaagcaaatgttaaatgtgttaagacttgtactagtgttgtaactttccaagtaaaagtatcccctaaaggccacttcctatctgatttttcccagcaaatgaggcaggcaattctaagatcttccacaaaacatctagccatctaaaatggagagatgaatcattctacctatacaaacaagctagctattagagggtggttggggtatgctactcataagatttcagggtgtcttccaactgaaatctcaatgttctcagtacgaaaaacctgaaatcacatgcctatgtaaggaaagtgctattcacccagtaaacccaaaaaagcaaatggataatgctggccattttgcctttctgacatttccttgggaatctgcaagaacctcccctttcccttcccccaataagaccatttaagtgtgtgttaaacaactacagaatactaaataaaaagtttggccaaaaccaaccatgaagctgcaaaggtgcttgctcttactgtttcaaatttttgcaactctgtagtgtctcacttttaaaggaacagcttgattgcaaaggagaaaatagataagcaatgaagttatctccaacttcctaaaggcttatgacttctaaaaagtgaatctatcagcattccacatcagatttaaagcatcaaatgcctgtgaaacagcaaagatggtaagcaaagcaaactagtttttccgtctaagtcgaaattgaacacttaccttcctcatagtacagtgaaacatactgtacctcaaggcaatggaaatgccttctagattaaaaaaaacttttggaaaaaagaaatattcaatagcgtattagaagtcctccaaattcaacacttggattttttttttttttttttaaagcatgtgtgacacttaaaggctttattaatagagctgttgtttaccaatggcgatctggggcttgggagggggtatttttttcaaagtccatttttgatgaagacctttaaacatgcttcgtatgtttttaacatttttttcaaattagtcttttagtcaatataggaaatggcttaagtttggggtccccctttttacccctgtaagccattgcaaacttgacatttagttggatgcctgacttgtttttagttctatgaaactacactgtatggagaaaatctattgcaagtggtctttaaaaagcaaaacctgaggcagcatgacccaggtccagccatgaagttgaaaaagatgctcttgaatatagtaaacttgaagacctccaactaaaaatccttatactgcacttattccttcaaataagttttgttcgttcaacttatggatttaacgtggcagtgcaccattggaacagaatgacaatccataagccatgcaacttaacaatttaagccattccagtccatcccgagccagtgaatcttccaccacttaagacaaatagtagaacatgaaatatattaagctgcaagtctgaacttgccttttctttctggaaaagagggcagtaataggcaagttttaaaagaatttccttaagagagataactagttttcatttatttaacttttgcaggttggtgattttgctcattatggtcgtggagtgctgattgattcacagtagataaagctggcagtaagaaatgctaagagttgttgaagcagaaggcggctgattgtcaataagtcactacagttgcataagcagtgctgtcagaattggtttggtgcaggcaatagattttgccttcaggggttcctgtggatctgaggaaggcatcagtgttgattaacactcataactagggagtgactggtagttacttaaagcaagtaattgaccaaatggaaaaggggaagtaattaaggaaattggtaagtggaggtagtcaggaagttcttgtggttcttcacatagattttacagctttggctttcattttgtttagctaaagtcatggggacaactcttcaatttagaacttaagttgaattataaaaatgatggatataagtggtagctgtatctagtgaagtgtctgtcagtaagtgaaacattttttggtggtggcttatccacaaacagtttagttgtagaataaaacttatgagtgacatctggaaagtaaccatgctaagatggcaagcacactggaaacaattaggccacttggctttcttttgctgtattgttttataagcctactttacctcccagtcttggaaacaagttttagttttttattggtttggagactagagccaatagtataatgttctcaaaggaaacagacttgagttgttggattagaggaactaacccaacttatatgattttttttttgtttttgtcgtgtagttatggcactgtcttatttggaacatttgcaactagggataatacaacatttttaactctcatttgacaacctactactaatcacagaccacaagggtaatgaccaaatttatgtggtttttgcactccatagttgtcttagcccaatctttctatactcttacgattacttgggttaacgcttctgtgaggaccttctggctcttgagataccctaaatatttaagatatttagatatcttgaagatagtataggatatagagattgtaccaaataggaatataaggagtatgttaaaatgaccagatacctgtttgatagtttactgacctagcagatgtgtggaaaaggaatcagatcttgattcttctgggtttatactggttgtaaaacagaatgatacagaaaatgttttccttgtttaactggtagttgaacatagaacttgggtattatagatcacttttcactttttggaatgttttgtattgaaacttaataaaactttaacatggcaaaaacaagaagcgaaacaaaacgaggcgcgacaaaaatacccaggggccacaataaacgtacaccgttatgaaacaggggccat

SEQ ID NO: 432164 - DNA, 4518 bp, Homo sapiens
ggtccttcagcctcgttcccgggcagtataaagtttgctgtctcctttgttcgccctcggttgcgcagtagtgctagcggcttcgcggttcggtcctcgcacccggcagccgccactggtgctgagctgctaggaagcccctatcgccgagctcgttggagcttgaacccattgtcacccctccgactcaccggcccaaaaaaaaaaaaaaatggttgaagcagatcgcccaggaaagctcttcattggtgggcttaatacggaaacaaatgagaaagctcttgaagcagtatttggcaaatatggacgaatagtggaagtactcttgatgaaagaccgtgaaaccaacaaatcaagaggatttgcttttgtcacctttgaaagcccagcagacgctaaggatgcagccagagacatgaatggaaagtcattagatggaaaagccatcaaggtggaacaagccaccaaaccatcatttgaaagtggtagacgtggaccgcctccacctccaagaagtagaggccctccaagaggtcttagaggtggaagaggaggaagtggaggaaccaggggacctccctcacggggaggacacatggatgacggtggatattccatgaattttaacatgagttcttccaggggaccactcccagtaaaaagaggaccaccaccaagaagtgggggtcctcctcctaagagatctgcaccttcaggaccagttcgcagtagcagtggaatgggaggaagagctcctgtatcacgtggaagagatagttatggaggtccacctcgaagggaaccgctgccctctcgtagagatgtttatttgtccccaagagatgatgggtattctactaaagacagctattcaagcagagattacccaagttctcgtgatactagagattatgcaccaccaccacgagattatacttaccgtgattatggtcattccagttcacgtgatgactatccatcaagaggatatagcgatagagatggatatggtcgtgatcgtgactattcagatcatccaagtggaggttcctacagagattcatatgagagttatggtaactcacgtagtgctccacctacacgagggcccccgccatcttatggtggaagcagtcgctatgatgattacagcagctcacgtgacggatatggtggaagtcgagacagttactcaagcagccgaagtgatctctactcaagtggtcgtgatcgggttggcagacaagaaagagggcttcccccttctatggaaagggggtaccctcctccacgtgattcctacagcagttcaagccgcggagcaccaagaggtggtggccgtggaggaagccgatctgatagagggggaggcagaagcagatactagaaacaaacaaaactttggaccaaaatcccagttcaaagaaacaaaaagtggaaactattctatcataactacccaaggactactaaaaggaaaaattgtgttactttttttaaattccctgttaagttcccctccataatttttatgttcttgtgaggaaaaaagtaaaacatgtttaattttatttgactttcgcattgcttttcaacaagcaaatgttaaatgtgttaagacttgtactagtgttgtaactttccaagtaaaagtatcccctaaaggccacttcctatctgatttttcccagcaaatgaggcaggcaattctaagatcttccacaaaacatctagccatctaaaatggagagatgaatcattctacctatacaaacaagctagctattagagggtggttggggtatgctactcataagatttcagggtgtcttccaactgaaatctcaatgttctcagtacgaaaaacctgaaatcacatgcctatgtaaggaaagtgctattcacccagtaaacccaaaaaagcaaatggataatgctggccattttgcctttctgacatttccttgggaatctgcaagaacctcccctttcccttcccccaataagaccatttaagtgtgtgttaaacaactacagaatactaaataaaaagtttggccaaaaccaaccatgaagctgcaaaggtgcttgctcttactgtttcaaatttttgcaactctgtagtgtctcacttttaaaggaacagcttgattgcaaaggagaaaatagataagcaatgaagttatctccaacttcctaaaggcttatgacttctaaaaagtgaatctatcagcattccacatcagatttaaagcatcaaatgcctgtgaaacagcaaagatggtaagcaaagcaaactagtttttccgtctaagtcgaaattgaacacttaccttcctcatagtacagtgaaacatactgtacctcaaggcaatggaaatgccttctagattaaaaaaaacttttggaaaaaagaaatattcaatagcgtattagaagtcctccaaattcaacacttggattttttttttttttttttaaagcatgtgtgacacttaaaggctttattaatagagctgttgtttaccaatggcgatctggggcttgggagggggtatttttttcaaagtccatttttgatgaagacctttaaacatgcttcgtatgtttttaacatttttttcaaattagtcttttagtcaatataggaaatggcttaagtttggggtccccctttttacccctgtaagccattgcaaacttgacatttagttggatgcctgacttgtttttagttctatgaaactacactgtatggagaaaatctattgcaagtggtctttaaaaagcaaaacctgaggcagcatgacccaggtccagccatgaagttgaaaaagatgctcttgaatatagtaaacttgaagacctccaactaaaaatccttatactgcacttattccttcaaataagttttgttcgttcaacttatggatttaacgtggcagtgcaccattggaacagaatgacaatccataagccatgcaacttaacaatttaagccattccagtccatcccgagccagtgaatcttccaccacttaagacaaatagtagaacatgaaatatattaagctgcaagtctgaacttgccttttctttctggaaaagagggcagtaataggcaagttttaaaagaatttccttaagagagataactagttttcatttatttaacttttgcaggttggtgattttgctcattatggtcgtggagtgctgattgattcacagtagataaagctggcagtaagaaatgctaagagttgttgaagcagaaggcggctgattgtcaataagtcactacagttgcataagcagtgctgtcagaattggtttggtgcaggcaatagattttgccttcaggggttcctgtggatctgaggaaggcatcagtgttgattaacactcataactagggagtgactggtagttacttaaagcaagtaattgaccaaatggaaaaggggaagtaattaaggaaattggtaagtggaggtagtcaggaagttcttgtggttcttcacatagattttacagctttggctttcattttgtttagctaaagtcatggggacaactcttcaatttagaacttaagttgaattataaaaatgatggatataagtggtagctgtatctagtgaagtgtctgtcagtaagtgaaacattttttggtggtggcttatccacaaacagtttagttgtagaataaaacttatgagtgacatctggaaagtaaccatgctaagatggcaagcacactggaaacaattaggccacttggctttcttttgctgtattgttttataagcctactttacctcccagtcttggaaacaagttttagttttttattggtttggagactagagccaatagtataatgttctcaaaggaaacagacttgagttgttggattagaggaactaacccaacttatatgattttttttttgtttttgtcgtgtagttatggcactgtcttatttggaacatttgcaactagggataatacaacatttttaactctcatttgacaacctactactaatcacagaccacaagggtaatgaccaaatttatgtggtttttgcactccatagttgtcttagcccaatctttctatactcttacgattacttgggttaacgcttctgtgaggaccttctggctcttgagataccctaaatatttaagatatttagatatcttgaagatagtataggatatagagattgtaccaaataggaatataaggagtatgttaaaatgaccagatacctgtttgatagtttactgacctagcagatgtgtggaaaaggaatcagatcttgattcttctgggtttatactggttgtaaaacagaatgatacagaaaatgttttccttgtttaactggtagttgaacatagaacttgggtattatagatcacttttcactttttggaatgttttgtattgaaacttaataaaactttaacatggcaacaaaacaaaaaaaacacaacaacaaaacaa

SEQ ID NO: 432165 - DNA, 4346 bp, Homo sapiens
ggtccttcagcctcgttcccgggcagtataaagtttgctgtctcctttgttcgccctcggttgcgcagtagtgctagcggcttcgcggttcggtcctcgcacccggcagccgccactggtgctgagctgctaggaagcccctatcgccgagctcgttggagcttgaacccattgtcacccctccgactcaccggcccaaaaaaaaaaaaaaatggttgaagcagatcgcccaggaaagctcttcattggtgggcttaatacggaaacaaatgagaaagctcttgaagcagtatttggcaaatatggacgaatagtggaagtactcttgatgaaagaccgtgaaaccaacaaatcaagaggatttgcttttgtcacctttgaaagcccagcagacgctaaggatgcagccagagacatgaatggaaagtcattagatggaaaagccatcaaggtggaacaagccaccaaaccatcatttgaaagtggtagacgtggaccgcctccacctccaagaagtagaggccctccaagaggtcttagaggtggaagaggaggaagtggaggaaccaggggacctccctcacggggaggacacatggatgacggtggatattccatgaattttaacatgagttcttccaggggaccactcccagtaaaaagaggaccaccaccaagaagtgggggtcctcctcctaagagatctgcaccttcaggaccagttcgcagtagcagtggaatgggaggaagagctcctgtatcacgtggaagagatagttatggaggtccacctcgaagggaaccgctgccctctcgtagagatgtttatttgtccccaagagatgatgggtattctactaaagacagctattcaagcagagattacccaagttctcgtgatactagagattatgcaccaccaccacgagattatacttaccgtgattatggtcattccagttcacgtgatgactatccatcaagaggatatagcgatagagatggatatggtcgtgatcgtgactattcagatcatccaagtggaggttcctacagagattcatatgagagttatggtaactcacgtagtgctccacctacacgagggcccccgccatcttatggtggaagcagtcgctatgatgattacagcagctcacgtgacggatatggtggaagtcgagacagttactcaagcagccgaagtgatctctactcaagtggtcgtgatcgggttggcagacaagaaagagggcttcccccttctatggaaagggggtaccctcctccacgtgattcctacagcagttcaagccgcggagcaccaagaggtggtggccgtggaggaagccgatctgatagagggggaggcagaagcagatactagaaacaaacaaaactttggaccaaaatcccagttcaaagaaacaaaaagtggaaactattctatcataactacccaaggactactaaaaggaaaaattgtgttactttttttaaattccctgttaagttcccctccataatttttatgttcttgtgaggaaaaaagtaaaacatgtttaattttatttgactttcgcattgcttttcaacaagcaaatgttaaatgtgttaagacttgtactagtgttgtaactttccaagtaaaagtatcccctaaaggccacttcctatctgatttttcccagcaaatgaggcaggcaattctaagatcttccacaaaacatctagccatctaaaatggagagatgaatcattctacctatacaaacaagctagctattagagggtggttggggtatgctactcataagatttcagggtgtcttccaactgaaatctcaatgttctcagtacgaaaaacctgaaatcacatgcctatgtaaggaaagtgctattcacccagtaaacccaaaaaagcaaatggataatgctggccattttgcctttctgacatttccttgggaatctgcaagaacctcccctttcccttcccccaataagaccatttaagtgtgtgttaaacaactacagaatactaaataaaaagtttggccaaaaccaaccatgaagctgcaaaggtgcttgctcttactgtttcaaatttttgcaactctgtagtgtctcacttttaaaggaacagcttgattgcaaaggagaaaatagataagcaatgaagttatctccaacttcctaaaggcttatgacttctaaaaagtgaatctatcagcattccacatcagatttaaagcatcaaatgcctgtgaaacagcaaagatggtaagcaaagcaaactagtttttccgtctaagtcgaaattgaacacttaccttcctcatagtacagtgaaacatactgtacctcaaggcaatggaaatgccttctagattaaaaaaaacttttggaaaaaagaaatattcaatagcgtattagaagtcctccaaattcaacacttggattttttttttttttttttaaagcatgtgtgacacttaaaggctttattaatagagctgttgtttaccaatggcgatctggggcttgggagggggtatttttttcaaagtccatttttgatgaagacctttaaacatgcttcgtatgtttttaacatttttttcaaattagtcttttagtcaatataggaaatggcttaagtttggggtccccctttttacccctgtaagccattgcaaacttgacatttagttggatgcctgacttgtttttagttctatgaaactacactgtatggagaaaatctattgcaagtggtctttaaaaagcaaaacctgaggcagcatgacccaggtccagccatgaagttgaaaaagatgctcttgaatatagtaaacttgaagacctccaactaaaaatccttatactgcacttattccttcaaataagttttgttcgttcaacttatggatttaacgtggcagtgcaccattggaacagaatgacaatccataagccatgcaacttaacaatttaagccattccagtccatcccgagccagtgaatcttccaccacttaagacaaatagtagaacatgaaatatattaagctgcaagtctgaacttgccttttctttctggaaaagagggcagtaataggcaagttttaaaagaatttccttaagagagataactagttttcatttatttaacttttgcaggttggtgattttgctcattatggtcgtggagtgctgattgattcacagtagataaagctggcagtaagaaatgctaagagttgttgaagcagaaggcggctgattgtcaataagtcactacagttgcataagcagtgctgtcagaattggtttggtgcaggcaatagattttgccttcaggggttcctgtggatctgaggaaggcatcagtgttgattaacactcataactagggagtgactggtagttacttaaagcaagtaattgaccaaatggaaaaggggaagtaattaaggaaattggtaagtggaggtagtcaggaagttcttgtggttcttcacatagattttacagctttggctttcattttgtttagctaaagtcatggggacaactcttcaatttagaacttaagttgaattataaaaatgatggatataagtggtagctgtatctagtgaagtgtctgtcagtaagtgaaacattttttggtggtggcttatccacaaacagtttagttgtagaataaaacttatgagtgacatctggaaagtaaccatgctaagatggcaagcacactggaaacaattaggccacttggctttcttttgctgtattgttttataagcctactttacctcccagtcttggaaacaagttttagttttttattggtttggagactagagccaatagtataatgttctcaaaggaaacagacttgagttgttggattagaggaactaacccaacttatatgattttttttttgtttttgtcgtgtagttatggcactgtcttatttggaacatttgcaactagggataatacaacatttttaactctcatttgacaacctactactaatcacagaccacaagggtaatgaccaaatttatgtggtttttgcactccatagttgtcttagcccaatctttctatactcttacgattacttgggttaacgcttctgtgaggaccttctggctcttgagataccctaaatatttaagatatttagatatcttgaagatagtataggatatagagattgtaccaaataggaatataaggagtatgttaaaatgaccagatacctgtttgatagtttactgacctagcagatgtgtgtgtggagcttcggcgtgtgcaggggatcctct

SEQ ID NO: 432166 - DNA, 3631 bp, Homo sapiens
ggtccttcagcctcgttcccgggcagtataaagtttgctgtctcctttgttcgccctcggttgcgcagtagtgctagcggcttcgcggttcggtcctcgcacccggcagccgccactggtgctgagctgctaggaagcccctatcgccgagctcgttggagcttgaacccattgtcacccctccgactcaccggcccaaaaaaaaaaaaaaatggttgaagcagatcgcccaggaaagctcttcattggtgggcttaatacggaaacaaatgagaaagctcttgaagcagtatttggcaaatatggacgaatagtggaagtactcttgatgaaagaccgtgaaaccaacaaatcaagaggatttgcttttgtcacctttgaaagcccagcagacgctaaggatgcagccagagacatgaatggaaagtcattagatggaaaagccatcaaggtggaacaagccaccaaaccatcatttgaaagtggtagacgtggaccgcctccacctccaagaagtagaggccctccaagaggtcttagaggtggaagaggaggaagtggaggaaccaggggacctccctcacggggaggacacatggatgacggtggatattccatgaattttaacatgagttcttccaggggaccactcccagtaaaaagaggaccaccaccaagaagtgggggtcctcctcctaagagatctgcaccttcaggaccagttcgcagtagcagtggaatgggaggaagagctcctgtatcacgtggaagagatagttatggaggtccacctcgaagggaaccgctgccctctcgtagagatgtttatttgtccccaagagatgatgggtattctactaaagacagctattcaagcagagattacccaagttctcgtgatactagagattatgcaccaccaccacgagattatacttaccgtgattatggtcattccagttcacgtgatgactatccatcaagaggatatagcgatagagatggatatggtcgtgatcgtgactattcagatcatccaagtggaggttcctacagagattcatatgagagttatggtaactcacgtagtgctccacctacacgagggcccccgccatcttatggtggaagcagtcgctatgatgattacagcagctcacgtgacggatatggtggaagtcgagacagttactcaagcagccgaagtgatctctactcaagtggtcgtgatcgggttggcagacaagaaagagggcttcccccttctatggaaagggggtaccctcctccacgtgattcctacagcagttcaagccgcggagcaccaagaggtggtggccgtggaggaagccgatctgatagagggggaggcagaagcagatactagaaacaaacaaaactttggaccaaaatcccagttcaaagaaacaaaaagtggaaactattctatcataactacccaaggactactaaaaggaaaaattgtgttactttttttaaattccctgttaagttcccctccataatttttatgttcttgtgaggaaaaaagtaaaacatgtttaattttatttgactttcgcattgcttttcaacaagcaaatgttaaatgtgttaagacttgtactagtgttgtaactttccaagtaaaagtatcccctaaaggccacttcctatctgatttttcccagcaaatgaggcaggcaattctaagatcttccacaaaacatctagccatctaaaatggagagatgaatcattctacctatacaaacaagctagctattagagggtggttggggtatgctactcataagatttcagggtgtcttccaactgaaatctcaatgttctcagtacgaaaaacctgaaatcacatgcctatgtaaggaaagtgctattcacccagtaaacccaaaaaagcaaatggataatgctggccattttgcctttctgacatttccttgggaatctgcaagaacctcccctttcccttcccccaataagaccatttaagtgtgtgttaaacaactacagaatactaaataaaaagtttggccaaaaccaaccatgaagctgcaaaggtgcttgctcttactgtttcaaatttttgcaactctgtagtgtctcacttttaaaggaacagcttgattgcaaaggagaaaatagataagcaatgaagttatctccaacttcctaaaggcttatgacttctaaaaagtgaatctatcagcattccacatcagatttaaagcatcaaatgcctgtgaaacagcaaagatggtaagcaaagcaaactagtttttccgtctaagtcgaaattgaacacttaccttcctcatagtacagtgaaacatactgtacctcaaggcaatggaaatgccttctagattaaaaaaaacttttggaaaaaagaaatattcaatagcgtattagaagtcctccaaattcaacacttggattttttttttttttttttaaagcatgtgtgacacttaaaggctttattaatagagctgttgtttaccaatggcgatctggggcttgggagggggtatttttttcaaagtccatttttgatgaagacctttaaacatgcttcgtatgtttttaacatttttttcaaattagtcttttagtcaatataggaaatggcttaagtttggggtccccctttttacccctgtaagccattgcaaacttgacatttagttggatgcctgacttgtttttagttctatgaaactacactgtatggagaaaatctattgcaagtggtctttaaaaagcaaaacctgaggcagcatgacccaggtccagccatgaagttgaaaaagatgctcttgaatatagtaaacttgaagacctccaactaaaaatccttatactgcacttattccttcaaataagttttgttcgttcaacttatggatttaacgtggcagtgcaccattggaacagaatgacaatccataagccatgcaacttaacaatttaagccattccagtccatcccgagccagtgaatcttccaccacttaagacaaatagtagaacatgaaatatattaagctgcaagtctgaacttgccttttctttctggaaaagagggcagtaataggcaagttttaaaagaatttccttaagagagataactagttttcatttatttaacttttgcaggttggtgattttgctcattatggtcgtggagtgctgattgattcacagtagataaagctggcagtaagaaatgctaagagttgttgaagcagaaggcggctgattgtcaataagtcactacagttgcataagcagtgctgtcagaattggtttggtgcaggcaatagattttgccttcaggggttcctgtggatctgaggaaggcatcagtgttgattaacactcataactagggagtgactggtagttacttaaagcaagtaattgaccaaatggaaaaggggaagtaattaaggaaattggtaagtggaggtagtcaggaagttcttgtggttcttcacatagattttacagctttggctttcattttgtttagctaaagtcatgggactcgtcagaggtggaactcgtcagaggtggactcgtcagagtgtggatcctctagagc

SEQ ID NO: 432167 - DNA, 3532 bp, Homo sapiens
ggtccttcagcctcgttcccgggcagtataaagtttgctgtctcctttgttcgccctcggttgcgcagtagtgctagcggcttcgcggttcggtcctcgcacccggcagccgccactggtgctgagctgctaggaagcccctatcgccgagctcgttggagcttgaacccattgtcacccctccgactcaccggcccaaaaaaaaaaaaaaatggttgaagcagatcgcccaggaaagctcttcattggtgggcttaatacggaaacaaatgagaaagctcttgaagcagtatttggcaaatatggacgaatagtggaagtactcttgatgaaagaccgtgaaaccaacaaatcaagaggatttgcttttgtcacctttgaaagcccagcagacgctaaggatgcagccagagacatgaatggaaagtcattagatggaaaagccatcaaggtggaacaagccaccaaaccatcatttgaaagtggtagacgtggaccgcctccacctccaagaagtagaggccctccaagaggtcttagaggtggaagaggaggaagtggaggaaccaggggacctccctcacggggaggacacatggatgacggtggatattccatgaattttaacatgagttcttccaggggaccactcccagtaaaaagaggaccaccaccaagaagtgggggtcctcctcctaagagatctgcaccttcaggaccagttcgcagtagcagtggaatgggaggaagagctcctgtatcacgtggaagagatagttatggaggtccacctcgaagggaaccgctgccctctcgtagagatgtttatttgtccccaagagatgatgggtattctactaaagacagctattcaagcagagattacccaagttctcgtgatactagagattatgcaccaccaccacgagattatacttaccgtgattatggtcattccagttcacgtgatgactatccatcaagaggatatagcgatagagatggatatggtcgtgatcgtgactattcagatcatccaagtggaggttcctacagagattcatatgagagttatggtaactcacgtagtgctccacctacacgagggcccccgccatcttatggtggaagcagtcgctatgatgattacagcagctcacgtgacggatatggtggaagtcgagacagttactcaagcagccgaagtgatctctactcaagtggtcgtgatcgggttggcagacaagaaagagggcttcccccttctatggaaagggggtaccctcctccacgtgattcctacagcagttcaagccgcggagcaccaagaggtggtggccgtggaggaagccgatctgatagagggggaggcagaagcagatactagaaacaaacaaaactttggaccaaaatcccagttcaaagaaacaaaaagtggaaactattctatcataactacccaaggactactaaaaggaaaaattgtgttactttttttaaattccctgttaagttcccctccataatttttatgttcttgtgaggaaaaaagtaaaacatgtttaattttatttgactttcgcattgcttttcaacaagcaaatgttaaatgtgttaagacttgtactagtgttgtaactttccaagtaaaagtatcccctaaaggccacttcctatctgatttttcccagcaaatgaggcaggcaattctaagatcttccacaaaacatctagccatctaaaatggagagatgaatcattctacctatacaaacaagctagctattagagggtggttggggtatgctactcataagatttcagggtgtcttccaactgaaatctcaatgttctcagtacgaaaaacctgaaatcacatgcctatgtaaggaaagtgctattcacccagtaaacccaaaaaagcaaatggataatgctggccattttgcctttctgacatttccttgggaatctgcaagaacctcccctttcccttcccccaataagaccatttaagtgtgtgttaaacaactacagaatactaaataaaaagtttggccaaaaccaaccatgaagctgcaaaggtgcttgctcttactgtttcaaatttttgcaactctgtagtgtctcacttttaaaggaacagcttgattgcaaaggagaaaatagataagcaatgaagttatctccaacttcctaaaggcttatgacttctaaaaagtgaatctatcagcattccacatcagatttaaagcatcaaatgcctgtgaaacagcaaagatggtaagcaaagcaaactagtttttccgtctaagtcgaaattgaacacttaccttcctcatagtacagtgaaacatactgtacctcaaggcaatggaaatgccttctagattaaaaaaaacttttggaaaaaagaaatattcaatagcgtattagaagtcctccaaattcaacacttggattttttttttttttttttaaagcatgtgtgacacttaaaggctttattaatagagctgttgtttaccaatggcgatctggggcttgggagggggtatttttttcaaagtccatttttgatgaagacctttaaacatgcttcgtatgtttttaacatttttttcaaattagtcttttagtcaatataggaaatggcttaagtttggggtccccctttttacccctgtaagccattgcaaacttgacatttagttggatgcctgacttgtttttagttctatgaaactacactgtatggagaaaatctattgcaagtggtctttaaaaagcaaaacctgaggcagcatgacccaggtccagccatgaagttgaaaaagatgctcttgaatatagtaaacttgaagacctccaactaaaaatccttatactgcacttattccttcaaataagttttgttcgttcaacttatggatttaacgtggcagtgcaccattggaacagaatgacaatccataagccatgcaacttaacaatttaagccattccagtccatcccgagccagtgaatcttccaccacttaagacaaatagtagaacatgaaatatattaagctgcaagtctgaacttgccttttctttctggaaaagagggcagtaataggcaagttttaaaagaatttccttaagagagataactagttttcatttatttaacttttgcaggttggtgattttgctcattatggtcgtggagtgctgattgattcacagtagataaagctggcagtaagaaatgctaagatggagtttcgctcttgttgcccaggctggagtgcaatggcgtgatctcggctcactgcaatctctgcctcccgggttcaagtgattctcctacctcagcctcccgtagctgggattacaggtgcacgccaccacgcccagctaattttgtatttttagtatagccagtgtttctccgtgttgatcaggctggtctcgaactcgtgacctcatgtgatctgcccacctcggcctcccaaagtgcagggattacaggcatgagccaccgcgc

SEQ ID NO: 432168 - DNA, 2516 bp, Homo sapiens
ggtccttcagcctcgttcccgggcagtataaagtttgctgtctcctttgttcgccctcggttgcgcagtagtgctagcggcttcgcggttcggtcctcgcacccggcagccgccactggtgctgagctgctaggaagcccctatcgccgagctcgttggagcttgaacccattgtcacccctccgactcaccggcccaaaaaaaaaaaaaaatggttgaagcagatcgcccaggaaagctcttcattggtgggcttaatacggaaacaaatgagaaagctcttgaagcagtatttggcaaatatggacgaatagtggaagtactcttgatgaaagaccgtgaaaccaacaaatcaagaggatttgcttttgtcacctttgaaagcccagcagacgctaaggatgcagccagagacatgaatggaaagtcattagatggaaaagccatcaaggtggaacaagccaccaaaccatcatttgaaagtggtagacgtggaccgcctccacctccaagaagtagaggccctccaagaggtcttagaggtggaagaggaggaagtggaggaaccaggggacctccctcacggggaggacacatggatgacggtggatattccatgaattttaacatgagttcttccaggggaccactcccagtaaaaagaggaccaccaccaagaagtgggggtcctcctcctaagagatctgcaccttcaggaccagttcgcagtagcagtggaatgggaggaagagctcctgtatcacgtggaagagatagttatggaggtccacctcgaagggaaccgctgccctctcgtagagatgtttatttgtccccaagagatgatgggtattctactaaagacagctattcaagcagagattacccaagttctcgtgatactagagattatgcaccaccaccacgagattatacttaccgtgattatggtcattccagttcacgtgatgactatccatcaagaggatatagcgatagagatggatatggtcgtgatcgtgactattcagatcatccaagtggaggttcctacagagattcatatgagagttatggtaactcacgtagtgctccacctacacgagggcccccgccatcttatggtggaagcagtcgctatgatgattacagcagctcacgtgacggatatggtggaagtcgagacagttactcaagcagccgaagtgatctctactcaagtggtcgtgatcgggttggcagacaagaaagagggcttcccccttctatggaaagggggtaccctcctccacgtgattcctacagcagttcaagccgcggagcaccaagaggtggtggccgtggaggaagccgatctgatagagggggaggcagaagcagatactagaaacaaacaaaactttggaccaaaatcccagttcaaagaaacaaaaagtggaaactattctatcataactacccaaggactactaaaaggaaaaattgtgttactttttttaaattccctgttaagttcccctccataatttttatgttcttgtgaggaaaaaagtaaaacatgtttaattttatttgactttcgcattgcttttcaacaagcaaatgttaaatgtgttaagacttgtactagtgttgtaactttccaagtaaaagtatcccctaaaggccacttcctatctgatttttcccagcaaatgaggcaggcaattctaagatcttccacaaaacatctagccatctaaaatggagagatgaatcattctacctatacaaacaagctagctattagagggtggttggggtatgctactcataagatttcagggtgtcttccaactgaaatctcaatgttctcagtacgaaaaacctgaaatcacatgcctatgtaaggaaagtgctattcacccagtaaacccaaaaaagcaaatggataatgctggccattttgcctttctgacatttccttgggaatctgcaagaacctcccctttcccttcccccaataagaccatttaagtgtgtgttaaacaactacagaatactaaataaaaagtttggccaaaaccaaccatgaagctgcaaaggtgcttgctcttactgtttcaaatttttgcaactctgtagtgtctcacttttaaaggaacagcttgattgcaaaggagaaaatagataagcaatgaagttatctccaacttcctaaaggcttatgacttctaaaaagtgaatctatcagcattccacatcagatttaaagcatcaaatgcctgtgaaacagcaaagatggtaagcaaagcaaactagtttttccgtctaagtcgaaattgaacacttaccttcctcatagtacagtgaaacatactgtacctcaaggcaatggaaatgccttctagattaaaaaaaacttttggaaaaaagaaatattcaatagcgtattagaagtcctcccaagccccagatcgccattggtaaacaacagctctattaataaagcctttaagtgtcacacatgctttaaa

SEQ ID NO: 432169 - DNA, 2381 bp, Homo sapiens
ggtccttcagcctcgttcccgggcagtataaagtttgctgtctcctttgttcgccctcggttgcgcagtagtgctagcggcttcgcggttcggtcctcgcacccggcagccgccactggtgctgagctgctaggaagcccctatcgccgagctcgttggagcttgaacccattgtcacccctccgactcaccggcccaaaaaaaaaaaaaaatggttgaagcagatcgcccaggaaagctcttcattggtgggcttaatacggaaacaaatgagaaagctcttgaagcagtatttggcaaatatggacgaatagtggaagtactcttgatgaaagaccgtgaaaccaacaaatcaagaggatttgcttttgtcacctttgaaagcccagcagacgctaaggatgcagccagagacatgaatggaaagtcattagatggaaaagccatcaaggtggaacaagccaccaaaccatcatttgaaagtggtagacgtggaccgcctccacctccaagaagtagaggccctccaagaggtcttagaggtggaagaggaggaagtggaggaaccaggggacctccctcacggggaggacacatggatgacggtggatattccatgaattttaacatgagttcttccaggggaccactcccagtaaaaagaggaccaccaccaagaagtgggggtcctcctcctaagagatctgcaccttcaggaccagttcgcagtagcagtggaatgggaggaagagctcctgtatcacgtggaagagatagttatggaggtccacctcgaagggaaccgctgccctctcgtagagatgtttatttgtccccaagagatgatgggtattctactaaagacagctattcaagcagagattacccaagttctcgtgatactagagattatgcaccaccaccacgagattatacttaccgtgattatggtcattccagttcacgtgatgactatccatcaagaggatatagcgatagagatggatatggtcgtgatcgtgactattcagatcatccaagtggaggttcctacagagattcatatgagagttatggtaactcacgtagtgctccacctacacgagggcccccgccatcttatggtggaagcagtcgctatgatgattacagcagctcacgtgacggatatggtggaagtcgagacagttactcaagcagccgaagtgatctctactcaagtggtcgtgatcgggttggcagacaagaaagagggcttcccccttctatggaaagggggtaccctcctccacgtgattcctacagcagttcaagccgcggagcaccaagaggtggtggccgtggaggaagccgatctgatagagggggaggcagaagcagatactagaaacaaacaaaactttggaccaaaatcccagttcaaagaaacaaaaagtggaaactattctatcataactacccaaggactactaaaaggaaaaattgtgttactttttttaaattccctgttaagttcccctccataatttttatgttcttgtgaggaaaaaagtaaaacatgtttaattttatttgactttcgcattgcttttcaacaagcaaatgttaaatgtgttaagacttgtactagtgttgtaactttccaagtaaaagtatcccctaaaggccacttcctatctgatttttcccagcaaatgaggcaggcaattctaagatcttccacaaaacatctagccatctaaaatggagagatgaatcattctacctatacaaacaagctagctattagagggtggttggggtatgctactcataagatttcagggtgtcttccaactgaaatctcaatgttctcagtacgaaaaacctgaaatcacatgcctatgtaaggaaagtgctattcacccagtaaacccaaaaaagcaaatggataatgctggccattttgcctttctgacatttccttgggaatctgcaagaacctcccctttcccttcccccaataagaccatttaagtgtgtgttaaacaactacagaatactaaataaaaagtttggccaaaaccaaccatgaagctgcaaaggtgcttgctcttactgtttcaaatttttgcaactctgtagtgtctcacttttaaaggaacagcttgattgcaaaggagaaaatagataagcaatgaagttatctccaacttcctaaaggcttatgacttctaaaaagtgaatctatcagcattccacatcagatttaaagcatcaaatgcctgtgaaacagcaaagatggttggtgattttgctcattatggtcgtggagtgctgattgattcacagtagataaagctggcagtaagaaatgctaaggtaagtgttgaaagcaatgg

SEQ ID NO: 432170 - DNA, 3553 bp, Homo sapiens
ggtccttcagcctcgttcccgggcagtataaagtttgctgtctcctttgttcgccctcggttgcgcagtagtgctagcggcttcgcggttcggtcctcgcacccggcagccgccactggtgctgagctgctaggaagcccctatcgccgagctcgttggagcttgaacccattgtcacccctccgactcaccggcccaaaaaaaaaaaaaaatggttgaagcagatcgcccaggaaagctcttcattggtgggcttaatacggaaacaaatgagaaagctcttgaagcagtatttggcaaatatggacgaatagtggaagtactcttgatgaaagaccgtgaaaccaacaaatcaagaggatttgcttttgtcacctttgaaagcccagcagacgctaaggatgcagccagagacatgaatggaaagtcattagatggaaaagccatcaaggtggaacaagccaccaaaccatcatttgaaagtggtagacgtggaccgcctccacctccaagaagtagaggccctccaagaggtcttagaggtggaagaggaggaagtggaggaaccaggggacctccctcacggggaggacacatggatgacggtggatattccatgaattttaacatgagttcttccaggggaccactcccagtaaaaagaggaccaccaccaagaagtgggggtcctcctcctaagagatctgcaccttcaggaccagttcgcagtagcagtggaatgggaggaagagctcctgtatcacgtggaagagatagttatggaggtccacctcgaagggaaccgctgccctctcgtagagatgtttatttgtccccaagagatgatgggtattctactaaagacagctattcaagcagagattacccaagttctcgtgatactagagattatgcaccaccaccacgagattatacttaccgtgattatggtcattccagttcacgtgatgactatccatcaagaggatatagcgatagagatggatatggtcgtgatcgtgactattcagatcatccaagtggaggttcctacagagattcatatgagagttatggtaactcacgtagtgctccacctacacgagggcccccgccatcttatggtggaagcagtcgctatgatgattacagcagctcacgtgacggatatggtggaagtcgagacagttactcaagcagccgaagtgatctctactcaagtggtcgtgatcgggttggcagacaagaaagagggcttcccccttctatggaaagggggtaccctcctccacgtgattcctacagcagttcaagccgcggagcaccaagaggtggtggccgtggaggaagccgatctgatagagggggaggcagaagcagatactagaaacaaacaaaactttggaccaaaatcccagttcaaagaaacaaaaagtggaaactattctatcataactacccaaggactactaaaaggaaaaattgtgttactttttttaaattccctgttaagttcccctccataatttttatgttcttgtgaggaaaaaagtaaaacatgtttaattttatttgactttcgcattgcttttcaacaagcaaatgttaaatgtgttaagacttgtactagtgttgtaactttccaagtaaaagtatcccctaaaggccacttcctatctgatttttcccagcaaatgaggcaggcaattctaagatcttccacaaaacatctagccatctaaaatggagagatgaatcattctacctatatgctactcataagatttcagggtgtcttccaactgaaatctcaatgttctcagtacgaaaaacctgaaatcacatgcctatgtaaggaaagtgctattcacccagtaaacccaaaaaagcaaatggataatgctggccattttgcctttctgacatttccttgggaatctgcaagaacctcccctttcccttcccccaataagaccatttaagtgtgtgttaaacaactacagaatactaaataaaaagtttggccaaaaccaaccatgaagctgcaaaggtgcttgctcttactgtttcaaatttttgcaactctgtagtgtctcacttttaaaggaacagcttgattgcaaaggagaaaatagataagcaatgaagttatctccaacttcctaaaggcttatgacttctaaaaagtgaatctatcagcattccacatcagatttaaagcatcaaatgcctgtgaaacagcaaagatggttggtgattttgctcattatggtcgtggagtgctgattgattcacagtagataaagctggcagtaagaaatgctaagagttgttgaagcagaaggcggctgattgtcaataagtcactacagttgcataagcagtgctgtcagaattggtttggtgcaggcaatagattttgccttcaggggttcctgtggatctgaggaaggcatcagtgttgattaacactcataactagggagtgactggtagttacttaaagcaagtaattgaccaaatggaaaaggggaagtaattaaggaaattggtaagtggaggtagtcaggaagttcttgtggttcttcacatagattttacagctttggctttcattttgtttagctaaagtcatggggacaactcttcaatttagaacttaagttgaattataaaaatgatggatataagtggtagctgtatctagtgaagtgtctgtcagtaagtgaaacattttttggtggtggcttatccacaaacagtttagttgtagaataaaacttatgagtgacatctggaaagtaaccatgctaagatggcaagcacactggaaacaattaggccacttggctttcttttgctgtattgttttataagcctactttacctcccagtcttggaaacaagttttagttttttattggtttggagactagagccaatagtataatgttctcaaaggaaacagacttgagttgttggattagaggaactaacccaacttatatgattttttttttgtttttgtcgtgtagttatggcactgtcttatttggaacatttgcaactagggataatacaacatttttaactctcatttgacaacctactactaatcacagaccacaagggtaatgaccaaatttatgtggtttttgcactccatagttgtcttagcccaatctttctatactcttacgattacttgggttaacgcttctgtgaggaccttctggctcttgagataccctaaatatttaagatatttagatatcttgaagatagtataggatatagagattgtaccaaataggaatataaggagtatgttaaaatgaccagatacctgtttgatagtttactgacctagcagatgtgtggaaaaggaatcagatcttgattcttctgggtttatactggttgtaaaacagaatgatacagaaaatgttttccttgtttaactggtagttgaacatagaacttgggtattatagatcacttttcactttttggaatgttttgtattgaaacttaataaaactttaacatggca

SEQ ID NO: 432171 - DNA, 4510 bp, Homo sapiens
  misc_feature (1771)..(1771): n is a, c, g, or t
  misc_feature (1774)..(1774): n is a, c, g, or t
  misc_feature (1778)..(1778): n is a, c, g, or t
  misc_feature (1806)..(1808): n is a, c, g, or t
  misc_feature (1810)..(1810): n is a, c, g, or t
  misc_feature (1812)..(1812): n is a, c, g, or t
  misc_feature (1814)..(1814): n is a, c, g, or t
  misc_feature (1817)..(1818): n is a, c, g, or t
  misc_feature (1840)..(1840): n is a, c, g, or t
  misc_feature (1849)..(1849): n is a, c, g, or t
  misc_feature (1851)..(1851): n is a, c, g, or t
  misc_feature (1858)..(1858): n is a, c, g, or t
  misc_feature (1860)..(1860): n is a, c, g, or t
  misc_feature (1863)..(1863): n is a, c, g, or t
  misc_feature (1867)..(1867): n is a, c, g, or t
  misc_feature (1871)..(1871): n is a, c, g, or t
  misc_feature (1874)..(1875): n is a, c, g, or t
ggtccttcagcctcgttcccgggcagtataaagtttgctgtctcctttgttcgccctcggttgcgcagtagtgctagcggcttcgcggttcggtcctcgcacccggcagccgccactggtgctgagctgctaggaagcccctatcgccgagctcgttggagcttgaacccattgtcacccctccgactcaccggcccaaaaaaaaaaaaaaatggttgaagcagatcgcccaggaaagctcttcattggtgggcttaatacggaaacaaatgagaaagctcttgaagcagtatttggcaaatatggacgaatagtggaagtactcttgatgaaagaccgtgaaaccaacaaatcaagaggatttgcttttgtcacctttgaaagcccagcagacgctaaggatgcagccagagacatgaatggaaagtcattagatggaaaagccatcaaggtggaacaagccaccaaaccatcatttgaaagtggtagacgtggaccgcctccacctccaagaagtagaggccctccaagaggtcttagaggtggaagaggaggaagtggaggaaccaggggacctccctcacggggaggacacatggatgacggtggatattccatgaattttaacatgagttcttccaggggaccactcccagtaaaaagaggaccaccaccaagaagtgggggtcctcctcctaagagatctgcaccttcaggaccagttcgcagtagcagtggaatgggaggaagagctcctgtatcacgtggaagagatagttatggaggtccacctcgaagggaaccgctgccctctcgtagagatgtttatttgtccccaagagatgatgggtattctactaaagacagctattcaagcagagattacccaagttctcgtgatactagagattatgcaccaccaccacgagattatacttaccgtgattatggtcattccagttcacgtgatgactatccatcaagaggatatagcgatagagatggatatggtcgtgatcgtgactattcagatcatccaagtggaggttcctacagagattcatatgagagttatggtaactcacgtagtgctccacctacacgagggcccccgccatcttatggtggaagcagtcgctatgatgattacagcagctcacgtgacggatatggtggaagtcgagacagttactcaagcagccgaagtgatctctactcaagtggtcgtgatcgggttggcagacaagaaagagggcttcccccttctatggaaagggggtaccctcctccacgtgattcctacagcagttcaagccgcggagcaccaagaggtggtggccgtggaggaagccgatctgatagagggggaggcagaagcagatactagaaacaaacaaaactttggaccaaaatcccagttcaaagaaacaaaaagtggaaactattctatcataactacccaaggactactaaaaggaaaaattgtgttactttttttaaattccctgttaagttcccctccataatttttatgttcttgtgaggaaaaaagtaaaacatgtttaattttatttgactttcgcattgcttttcaacaagcaaatgttaaatgtgttaagacttgtactagtgttgtaactttccaagtaaaagtatcccctaaaggccacttcctatctgatttttcccagcaaatgaggcaggcaattctaagatcttccacaaaacatctagccatctaaaatggagagatgaatcattctacctatanagnctgngcctcactctcagcagcgcgctcgcgcnnngngngnatnnccaccccatcacacgcaccccnaggcggggncngccgacngnaancccnaaantcnncccagtacgaaaaacctgaaatcacatgcctatgtaaggaaagtgctattcacccagtaaacccaaaaaagcaaatggataatgctggccattttgcctttctgacatttccttgggaatctgcaagaacctcccctttcccttcccccaataagaccatttaagtgtgtgttaaacaactacagaatactaaataaaaagtttggccaaaaccaaccatgaagctgcaaaggtgcttgctcttactgtttcaaatttttgcaactctgtagtgtctcacttttaaaggaacagcttgattgcaaaggagaaaatagataagcaatgaagttatctccaacttcctaaaggcttatgacttctaaaaagtgaatctatcagcattccacatcagatttaaagcatcaaatgcctgtgaaacagcaaagatggtaagcaaagcaaactagtttttccgtctaagtcgaaattgaacacttaccttcctcatagtacagtgaaacatactgtacctcaaggcaatggaaatgccttctagattaaaaaaaacttttggaaaaaagaaatattcaatagcgtattagaagtcctccaaattcaacacttggattttttttttttttttttaaagcatgtgtgacacttaaaggctttattaatagagctgttgtttaccaatggcgatctggggcttgggagggggtatttttttcaaagtccatttttgatgaagacctttaaacatgcttcgtatgtttttaacatttttttcaaattagtcttttagtcaatataggaaatggcttaagtttggggtccccctttttacccctgtaagccattgcaaacttgacatttagttggatgcctgacttgtttttagttctatgaaactacactgtatggagaaaatctattgcaagtggtctttaaaaagcaaaacctgaggcagcatgacccaggtccagccatgaagttgaaaaagatgctcttgaatatagtaaacttgaagacctccaactaaaaatccttatactgcacttattccttcaaataagttttgttcgttcaacttatggatttaacgtggcagtgcaccattggaacagaatgacaatccataagccatgcaacttaacaatttaagccattccagtccatcccgagccagtgaatcttccaccacttaagacaaatagtagaacatgaaatatattaagctgcaagtctgaacttgccttttctttctggaaaagagggcagtaataggcaagttttaaaagaatttccttaagagagataactagttttcatttatttaacttttgcaggttggtgattttgctcattatggtcgtggagtgctgattgattcacagtagataaagctggcagtaagaaatgctaagagttgttgaagcagaaggcggctgattgtcaataagtcactacagttgcataagcagtgctgtcagaattggtttggtgcaggcaatagattttgccttcaggggttcctgtggatctgaggaaggcatcagtgttgattaacactcataactagggagtgactggtagttacttaaagcaagtaattgaccaaatggaaaaggggaagtaattaaggaaattggtaagtggaggtagtcaggaagttcttgtggttcttcacatagattttacagctttggctttcattttgtttagctaaagtcatggggacaactcttcaatttagaacttaagttgaattataaaaatgatggatataagtggtagctgtatctagtgaagtgtctgtcagtaagtgaaacattttttggtggtggcttatccacaaacagtttagttgtagaataaaacttatgagtgacatctggaaagtaaccatgctaagatggcaagcacactggaaacaattaggccacttggctttcttttgctgtattgttttataagcctactttacctcccagtcttggaaacaagttttagttttttattggtttggagactagagccaatagtataatgttctcaaaggaaacagacttgagttgttggattagaggaactaacccaacttatatgattttttttttgtttttgtcgtgtagttatggcactgtcttatttggaacatttgcaactagggataatacaacatttttaactctcatttgacaacctactactaatcacagaccacaagggtaatgaccaaatttatgtggtttttgcactccatagttgtcttagcccaatctttctatactcttacgattacttgggttaacgcttctgtgaggaccttctggctcttgagataccctaaatatttaagatatttagatatcttgaagatagtataggatatagagattgtaccaaataggaatataaggagtatgttaaaatgaccagatacctgtttgatagtttactgacctagcagatgtgtggaaaaggaatcagatcttgattcttctgggtttatactggttgtaaaacagaatgatacagaaaatgttttccttgtttaactggtagttgaacatagaacttgggtattatagatcacttttcactttttggaatgttttgtattgaaacttaataaaactttaacatggca

SEQ ID NO: 432172 - DNA, 2049 bp, Homo sapiens
ggtccttcagcctcgttcccgggcagtataaagtttgctgtctcctttgttcgccctcggttgcgcagtagtgctagcggcttcgcggttcggtcctcgcacccggcagccgccactggtgctgagctgctaggaagcccctatcgccgagctcgttggagcttgaacccattgtcacccctccgactcaccggcccaaaaaaaaaaaaaaatggttgaagcagatcgcccaggaaagctcttcattggtgggcttaatacggaaacaaatgagaaagctcttgaagcagtatttggcaaatatggacgaatagtggaagtactcttgatgaaagaccgtgaaaccaacaaatcaagaggatttgcttttgtcacctttgaaagcccagcagacgctaaggatgcagccagagacatgaatggaaagtcattagatggaaaagccatcaaggtggaacaagccaccaaaccatcatttgaaagtggtagacgtggaccgcctccacctccaagaagtagaggccctccaagaggtcttagaggtggaagaggaggaagtggaggaaccaggggacctccctcacggggaggacacatggatgacggtggatattccatgaattttaacatgagttcttccaggggaccactcccagtaaaaagaggaccaccaccaagaagtgggggtcctcctcctaagagatctgcaccttcaggaccagttcgcagtagcagtggaatgggaggaagagctcctgtatcacgtggaagagatagttatggaggtccacctcgaagggaaccgctgccctctcgtagagatgtttatttgtccccaagagatgatgggtattctactaaagacagctattcaagcagagattacccaagttctcgtgatactagagattatgcaccaccaccacgagattatacttaccgtgattatggtcattccagttcacgtgatgactatccatcaagaggatatagcgatagagatggatatggtcgtgatcgtgactattcagatcatccaagtggaggttcctacagagattcatatgagagttatggtaactcacgtagtgctccacctacacgagggcccccgccatcttatggtggaagcagtcgctatgatgattacagcagctcacgtgacggatatggtggaagtcgagacagttactcaagcagccgaagtgatctctactcaagtggtcgtgatcgggttggcagacaagaaagagggcttcccccttctatggaaagggggtaccctcctccacgtgattcctacagcagttcaagccgcggagcaccaagaggtggtggccgtggaggaagccgatctgatagagggggaggcagaagcagatactagaaacaaacaaaactttggaccaaaatcccagttcaaagaaacaaaaagtggaaactattctatcataactacccaaggactactaaaaggaaaaattgtgttactttttttaaattccctgttaagttcccctccataatttttatgttcttgtgaggaaaaaagtaaaacatgtttaattttatttgactttcgcattgcttttcaacaagcaaatgttaaatgtgttaagacttgtactagtgttgtaactttccaagtaaaagtatcccctaaaggccacttcctatctgatttttcccagcaaatgaggcaggcaattctaagatcttccacaaaacatctagccatctaaaatggagagatgaatcattctacctatacaaacaagctagctattagagggtggttggggtatgctactcataagatttcagggtgtcttccaactgaaatctcaatgttctcagtacgaaaaacctgaaatcacatgcctatgtaaggaaagtgctattcacccagtaaacccaaaaaagcaaatggataatgctggccattttgcctttctgacatttccttgggaatctgcaagaacctcccctttcccttcccccaataagaccatttaagtgtgtgttattctgccgggtgatcctctagga

SEQ ID NO: 432173 - DNA, 5120 bp, Homo sapiens
ggtccttcagcctcgttcccgggcagtataaagtttgctgtctcctttgttcgccctcggttgcgcagtagtgctagcggcttcgcggttcggtcctcgcacccggcagccgccactggtgctgagctgctaggaagcccctatcgccgagctcgttggagcttgaacccattgtcacccctccgactcaccggcccaaaaaaaaaaaaaaatggttgaagcagatcgcccaggaaagctcttcattggtgggcttaatacggaaacaaatgagaaagctcttgaagcagtatttggcaaatatggacgaatagtggaagtactcttgatgaaagaccgtgaaaccaacaaatcaagaggatttgcttttgtcacctttgaaagcccagcagacgctaaggatgcagccagagacatgaatggaaagtcattagatggaaaagccatcaaggtggaacaagccaccaaaccatcatttgaaagtggtagacgtggaccgcctccacctccaagaagtagaggccctccaagaggtcttagaggtggaagaggaggaagtggaggaaccaggggacctccctcacggggaggacacatggatgacggtggatattccatgaattttaacatgagttcttccaggggaccactcccagtaaaaagaggaccaccaccaagaagtgggggtcctcctcctaagagatctgcaccttcaggaccagttcgcagtagcagtggaatgggaggaagagctcctgtatcacgtggaagagatagttatggaggtccacctcgaagggaaccgctgccctctcgtagagatgtttatttgtccccaagagatgatgggtattctactaaagacagctattcaagcagagattacccaagttctcgtgatactagagattatgcaccaccaccacgagattatacttaccgtgattatggtcattccagttcacgtgatgactatccatcaagaggatatagcgatagagatggatatggtcgtgatcgtgactattcagatcatccaagtggaggttcctacagagattcatatgagagttatggtaagatactggttaagggtctttagtatcaccagcttgagtttttaggttcgtgagccagtttattaggctgtgtggtgcttgcttttaaagggatgtttgcttgcttttaaaggggtaactttatcagctgggcttttcctagttttgtgaggggctttttttgtttttctaagtttcttttgaggctgtttgcttgctttggaggggattttgcttgcttaaattggcagccttatgtgttttcccccaacagtgaaaatacaatttaaaaattttattaacaagatcaaatatttaccattgcaatatgaaggcaagttctacagttcaaaattgcaacttatcactggaaagtggctgagtgtctactataaaataacaagctctctggaatatcctcttgaaatacacaccgtcttcagtcttttcaaacaaacattaaaatgaatccaattccatatctcagcagatgagcaaatccctgttatggccagcaatggcagagtttaaaacctcccacccagttgagaaagtaaacttttaatacaagaattctgtaaattcagatttaaaatgttgtatatatacaatttatagtgttgccatattacctgaccattgaccctgcaggtaactcacgtagtgctccacctacacgagggcccccgccatcttatggtggaagcagtcgctatgatgattacagcagctcacgtgacggatatggtggaagtcgagacagttactcaagcagccgaagtgatctctactcaagtggtcgtgatcgggttggcagacaagaaagagggcttcccccttctatggaaagggggtaccctcctccacgtgattcctacagcagttcaagccgcggagcaccaagaggtggtggccgtggaggaagccgatctgatagagggggaggcagaagcagatactagaaacaaacaaaactttggaccaaaatcccagttcaaagaaacaaaaagtggaaactattctatcataactacccaaggactactaaaaggaaaaattgtgttactttttttaaattccctgttaagttcccctccataatttttatgttcttgtgaggaaaaaagtaaaacatgtttaattttatttgactttcgcattgcttttcaacaagcaaatgttaaatgtgttaagacttgtactagtgttgtaactttccaagtaaaagtatcccctaaaggccacttcctatctgatttttcccagcaaatgaggcaggcaattctaagatcttccacaaaacatctagccatctaaaatggagagatgaatcattctacctatacaaacaagctagctattagagggtggttggggtatgctactcataagatttcagggtgtcttccaactgaaatctcaatgttctcagtacgaaaaacctgaaatcacatgcctatgtaaggaaagtgctattcacccagtaaacccaaaaaagcaaatggataatgctggccattttgcctttctgacatttccttgggaatctgcaagaacctcccctttcccttcccccaataagaccatttaagtgtgtgttaaacaactacagaatactaaataaaaagtttggccaaaaccaaccatgaagctgcaaaggtgcttgctcttactgtttcaaatttttgcaactctgtagtgtctcacttttaaaggaacagcttgattgcaaaggagaaaatagataagcaatgaagttatctccaacttcctaaaggcttatgacttctaaaaagtgaatctatcagcattccacatcagatttaaagcatcaaatgcctgtgaaacagcaaagatggtaagcaaagcaaactagtttttccgtctaagtcgaaattgaacacttaccttcctcatagtacagtgaaacatactgtacctcaaggcaatggaaatgccttctagattaaaaaaaacttttggaaaaaagaaatattcaatagcgtattagaagtcctccaaattcaacacttggattttttttttttttttttaaagcatgtgtgacacttaaaggctttattaatagagctgttgtttaccaatggcgatctggggcttgggagggggtatttttttcaaagtccatttttgatgaagacctttaaacatgcttcgtatgtttttaacatttttttcaaattagtcttttagtcaatataggaaatggcttaagtttggggtccccctttttacccctgtaagccattgcaaacttgacatttagttggatgcctgacttgtttttagttctatgaaactacactgtatggagaaaatctattgcaagtggtctttaaaaagcaaaacctgaggcagcatgacccaggtccagccatgaagttgaaaaagatgctcttgaatatagtaaacttgaagacctccaactaaaaatccttatactgcacttattccttcaaataagttttgttcgttcaacttatggatttaacgtggcagtgcaccattggaacagaatgacaatccataagccatgcaacttaacaatttaagccattccagtccatcccgagccagtgaatcttccaccacttaagacaaatagtagaacatgaaatatattaagctgcaagtctgaacttgccttttctttctggaaaagagggcagtaataggcaagttttaaaagaatttccttaagagagataactagttttcatttatttaacttttgcaggttggtgattttgctcattatggtcgtggagtgctgattgattcacagtagataaagctggcagtaagaaatgctaagagttgttgaagcagaaggcggctgattgtcaataagtcactacagttgcataagcagtgctgtcagaattggtttggtgcaggcaatagattttgccttcaggggttcctgtggatctgaggaaggcatcagtgttgattaacactcataactagggagtgactggtagttacttaaagcaagtaattgaccaaatggaaaaggggaagtaattaaggaaattggtaagtggaggtagtcaggaagttcttgtggttcttcacatagattttacagctttggctttcattttgtttagctaaagtcatggggacaactcttcaatttagaacttaagttgaattataaaaatgatggatataagtggtagctgtatctagtgaagtgtctgtcagtaagtgaaacattttttggtggtggcttatccacaaacagtttagttgtagaataaaacttatgagtgacatctggaaagtaaccatgctaagatggcaagcacactggaaacaattaggccacttggctttcttttgctgtattgttttataagcctactttacctcccagtcttggaaacaagttttagttttttattggtttggagactagagccaatagtataatgttctcaaaggaaacagacttgagttgttggattagaggaactaacccaacttatatgattttttttttgtttttgtcgtgtagttatggcactgtcttatttggaacatttgcaactagggataatacaacatttttaactctcatttgacaacctactactaatcacagaccacaagggtaatgaccaaatttatgtggtttttgcactccatagttgtcttagcccaatctttctatactcttacgattacttgggttaacgcttctgtgaggaccttctggctcttgagataccctaaatatttaagatatttagatatcttgaagatagtataggatatagagattgtaccaaataggaatataaggagtatgttaaaatgaccagatacctgtttgatagtttactgacctagcagatgtgtggaaaaggaatcagatcttgattcttctgggtttatactggttgtaaaacagaatgatacagaaaatgttttccttgtttaactggtagttgaacatagaacttgggtattatagatcacttttcactttttggaatgttttgtattgaaacttaataaaactttaacatggca

SEQ ID NO: 432174 - DNA, 2039 bp, Homo sapiens
ggtccttcagcctcgttcccgggcagtataaagtttgctgtctcctttgttcgccctcggttgcgcagtagtgctagcggcttcgcggttcggtcctcgcacccggcagccgccactggtgctgagctgctaggaagcccctatcgccgagctcgttggagcttgaacccattgtcacccctccgactcaccggcccaaaaaaaaaaaaaaatggttgaagcagatcgcccaggaaagctcttcattggtgggcttaatacggaaacaaatgagaaagctcttgaagcagtatttggcaaatatggacgaatagtggaagtactcttgatgaaagaccgtgaaaccaacaaatcaagaggatttgcttttgtcacctttgaaagcccagcagacgctaaggatgcagccagagacatgaatggaaagtcattagatggaaaagccatcaaggtggaacaagccaccaaaccatcatttgaaagtggtagacgtggaccgcctccacctccaagaagtagaggccctccaagaggtcttagaggtggaagaggaggaagtggaggaaccaggggacctccctcacggggaggacacatggatgacggtggatattccatgaattttaacatgagttcttccaggggaccactcccagtaaaaagaggaccaccaccaagaagtgggggtcctcctcctaagagatctgcaccttcaggaccagttcgcagtagcagtggaatgggaggaagagctcctgtatcacgtggaagagatagttatggaggtccacctcgaagggaaccgctgccctctcgtagagatgtttatttgtccccaagagatgatgggtattctactaaagacagctattcaagcagagattacccaagttctcgtgatactagagattatgcaccaccaccacgagattatacttaccgtgattatggtcattccagttcacgtgatgactatccatcaagaggatatagcgatagagatggatatggtcgtgatcgtgactattcagatcatccaagtggaggttcctacagagattcatatgagagttatggtaactcacgtagtgctccacctacacgagggcccccgccatcttatggtggaagcagtcgctatgatgattacagcagctcacgtgacggatatggtggaagtcgagacagttactcaagcagccgaagtgatctctactcaagtggtcgtgatcgggttggcagacaagaaagagggcttcccccttctatggaaagggggtaccctcctccacgtgattcctacagcagttcaagccgcggagcaccaagaggtggtggccgtggaggaagccgatctgatagagggggaggcagaagcagatactagaaacaaacaaaactttggaccaaaatcccagttcaaagaaacaaaaagtggaaactattctatcataactacccaaggactactaaaaggaaaaattgtgttactttttttaaattccctgttaagttcccctccataatttttatgttcttgtgaggaaaaaagtaaaacatgtttaattttatttgactttcgcattgcttttcaacaagcaaatgttaaatgtgttaagacttgtactagtgttgtaactttccaagtaaaagtatcccctaaaggccacttcctatctgatttttcccagcaaatgaggcaggcaattctaagatcttccacaaaacatctagccatctaaaatggagagatgaatcattctacctatacaaacaagctagctattagagggtggttggggtatgctactcataagatttcagggtgtcttccaactgaaatctcaatgttctcagtacgaaaaacctgaaatcacatgcctatgtaaggaaagtgctattcacccagtaaacccaaaaaagcaaatggataatgctggccattttgcctttctgacatttccttgggaatctgcaagaacctccccttcccatctttcctaatggtgagccttcgtgccccccttcccatctttcct

SEQ ID NO: 432175 - DNA, 2026 bp, Homo sapiens
  misc_feature (18)..(18): n is a, c, g, or t
ggcagtacccccggttantgtagcgaggctgggagcggcttcgcggttcggtcctcgcacccggcagccgccactggtgctgagctgctaggaagcccctatcgccgagctcgttggagcttgaacccattgtcacccctccgactcaccggcccaaaaaaaaaaaaaaatggttgaagcagatcgcccaggaaagctcttcattggtgggcttaatacggaaacaaatgagaaagctcttgaagcagtatttggcaaatatggacgaatagtggaagtactcttgatgaaagaccgtgaaaccaacaaatcaagaggatttgcttttgtcacctttgaaagcccagcagacgctaaggatgcagccagagacatgaatggaaagtcattagatggaaaagccatcaaggtggaacaagccaccaaaccatcatttgaaagtggtagacgtggaccgcctccacctccaagaagtagaggccctccaagaggtcttagaggtggaagaggaggaagtggaggaaccaggggacctccctcacggggaggacacatggatgacggtggatattccatgaattttaacatgagttcttccaggggaccactcccagtaaaaagaggaccaccaccaagaagtgggggtcctcctcctaagagatctgcaccttcaggaccagttcgcagtagcagtggaatgggaggaagagctcctgtatcacgtggaagagatagttatggaggtccacctcgaagggaaccgctgccctctcgtagagatgtttatttgtccccaagagatgatgggtattctactaaagacagctattcaagcagagattacccaagttctcgtgatactagagattatgcaccaccaccacgagattatacttaccgtgattatggtcattccagttcacgtgatgactatccatcaagaggatatagcgatagagatggatatggtcgtgatcgtgactattcagatcatccaagtggaggttcctacagagattcatatgagagttatggtaactcacgtagtgctccacctacacgagggcccccgccatcttatggtggaagcagtcgctatgatgattacagcagctcacgtgacggatatggtggaagtcgagacagttactcaagcagccgaagtgatctctactcaagtggtcgtgatcgggttggcagacaagaaagagggcttcccccttctatggaaagggggtaccctcctccacgtgattcctacagcagttcaagccgcggagcaccaagaggtggtggccgtggaggaagccgatctgatagagggggaggcagaagcagatactagaaacaaacaaaactttggaccaaaatcccagttcaaagaaacaaaaagtggaaactattctatcataactacccaaggactactaaaaggaaaaattgtgttactttttttaaattccctgttaagttcccctccataatttttatgttcttgtgaggaaaaaagtaaaacatgtttaattttatttgactttcgcattgcttttcaacaagcaaatgttaaatgtgttaagacttgtactagtgttgtaactttccaagtaaaagtatcccctaaaggccacttcctatctgatttttcccagcaaatgaggcaggcaattctaagatcttccacaaaacatctagccatctaaaatggagagatgaatcattctacctatacaaacaagctagctattagagggtggttggggtatgctactcataagatttcagggtgtcttccaactgaaatctcaatgttctcagtacgaaaaacctgaaatcacatgcctatgtaaggaaagtgctattcacccagtaaacccaaaaaagcaaatggataatgctggccattttgcctttctgacatttccttgggaatctgcaagaacctcccctttcccttcccccaataagaccatttaagtgtgtgttaaacaactacagaatactaaataaaaagtttggccaaaaccaa

SEQ ID NO: 432176 - DNA, 4276 bp, Homo sapiens
ggtccttcagcctcgttcccgggcagtataaagtttgctgtctcctttgttcgccctcggttgcgcagtagtgctagcggcttcgcggttcggtcctcgcacccggcagccgccactggtgctgagctgctaggaagcccctatcgccgagctcgttggagcttgaacccattgtcacccctccgactcaccggcccaaaaaaaaaaaaaaatggttgaagcagatcgcccaggaaagctcttcattggtgggcttaatacggaaacaaatgagaaagctcttgaagcagtatttggcaaatatggacgaatagtggaagtactcttgatgaaagaccgtgaaaccaacaaatcaagaggatttgcttttgtcacctttgaaagcccagcagacgctaaggatgcagccagagacatgaatggaaagtcattagatggaaaagccatcaaggtggaacaagccaccaaaccatcatttgaaagtggtagacgtggaccgcctccacctccaagaagtagaggccctccaagaggtcttagaggtggaagaggaggaagtggaggaaccaggggacctccctcacggggaggacacatggatgacggtggatattccatgaattttaacatgagttcttccaggggaccactcccagtaaaaagaggaccaccaccaagaagtgggggtcctcctcctaagagatctgcaccttcaggaccagttcgcagtagcagtggaatgggaggaagagctcctgtatcacgtggaagagatagttatggaggtccacctcgaagggaaccgctgccctctcgtagagatgtttatttgtccccaagagatgatgggtattctactaaagacagctattcaagcagagattacccaagttctcgtgatactagagattatgcaccaccaccacgagattatacttaccgtgattatggtcattccagttcacgtgatgactatccatcaagaggatatagcgatagagatggatatggtcgtgatcgtgactattcagacaagaaagagggcttcccccttctatggaaagggggtaccctcctccacgtgattcctacagcagttcaagccgcggagcaccaagaggtggtggccgtggaggaagccgatctgatagagggggaggcagaagcagatactagaaacaaacaaaactttggaccaaaatcccagttcaaagaaacaaaaagtggaaactattctatcataactacccaaggactactaaaaggaaaaattgtgttactttttttaaattccctgttaagttcccctccataatttttatgttcttgtgaggaaaaaagtaaaacatgtttaattttatttgactttcgcattgcttttcaacaagcaaatgttaaatgtgttaagacttgtactagtgttgtaactttccaagtaaaagtatcccctaaaggccacttcctatctgatttttcccagcaaatgaggcaggcaattctaagatcttccacaaaacatctagccatctaaaatggagagatgaatcattctacctatacaaacaagctagctattagagggtggttggggtatgctactcataagatttcagggtgtcttccaactgaaatctcaatgttctcagtacgaaaaacctgaaatcacatgcctatgtaaggaaagtgctattcacccagtaaacccaaaaaagcaaatggataatgctggccattttgcctttctgacatttccttgggaatctgcaagaacctcccctttcccttcccccaataagaccatttaagtgtgtgttaaacaactacagaatactaaataaaaagtttggccaaaaccaaccatgaagctgcaaaggtgcttgctcttactgtttcaaatttttgcaactctgtagtgtctcacttttaaaggaacagcttgattgcaaaggagaaaatagataagcaatgaagttatctccaacttcctaaaggcttatgacttctaaaaagtgaatctatcagcattccacatcagatttaaagcatcaaatgcctgtgaaacagcaaagatggtaagcaaagcaaactagtttttccgtctaagtcgaaattgaacacttaccttcctcatagtacagtgaaacatactgtacctcaaggcaatggaaatgccttctagattaaaaaaaacttttggaaaaaagaaatattcaatagcgtattagaagtcctccaaattcaacacttggattttttttttttttttttaaagcatgtgtgacacttaaaggctttattaatagagctgttgtttaccaatggcgatctggggcttgggagggggtatttttttcaaagtccatttttgatgaagacctttaaacatgcttcgtatgtttttaacatttttttcaaattagtcttttagtcaatataggaaatggcttaagtttggggtccccctttttacccctgtaagccattgcaaacttgacatttagttggatgcctgacttgtttttagttctatgaaactacactgtatggagaaaatctattgcaagtggtctttaaaaagcaaaacctgaggcagcatgacccaggtccagccatgaagttgaaaaagatgctcttgaatatagtaaacttgaagacctccaactaaaaatccttatactgcacttattccttcaaataagttttgttcgttcaacttatggatttaacgtggcagtgcaccattggaacagaatgacaatccataagccatgcaacttaacaatttaagccattccagtccatcccgagccagtgaatcttccaccacttaagacaaatagtagaacatgaaatatattaagctgcaagtctgaacttgccttttctttctggaaaagagggcagtaataggcaagttttaaaagaatttccttaagagagataactagttttcatttatttaacttttgcaggttggtgattttgctcattatggtcgtggagtgctgattgattcacagtagataaagctggcagtaagaaatgctaagagttgttgaagcagaaggcggctgattgtcaataagtcactacagttgcataagcagtgctgtcagaattggtttggtgcaggcaatagattttgccttcaggggttcctgtggatctgaggaaggcatcagtgttgattaacactcataactagggagtgactggtagttacttaaagcaagtaattgaccaaatggaaaaggggaagtaattaaggaaattggtaagtggaggtagtcaggaagttcttgtggttcttcacatagattttacagctttggctttcattttgtttagctaaagtcatggggacaactcttcaatttagaacttaagttgaattataaaaatgatggatataagtggtagctgtatctagtgaagtgtctgtcagtaagtgaaacattttttggtggtggcttatccacaaacagtttagttgtagaataaaacttatgagtgacatctggaaagtaaccatgctaagatggcaagcacactggaaacaattaggccacttggctttcttttgctgtattgttttataagcctactttacctcccagtcttggaaacaagttttagttttttattggtttggagactagagccaatagtataatgttctcaaaggaaacagacttgagttgttggattagaggaactaacccaacttatatgattttttttttgtttttgtcgtgtagttatggcactgtcttatttggaacatttgcaactagggataatacaacatttttaactctcatttgacaacctactactaatcacagaccacaagggtaatgaccaaatttatgtggtttttgcactccatagttgtcttagcccaatctttctatactcttacgattacttgggttaacgcttctgtgaggaccttctggctcttgagataccctaaatatttaagatatttagatatcttgaagatagtataggatatagagattgtaccaaataggaatataaggagtatgttaaaatgaccagatacctgtttgatagtttactgacctagcagatgtgtggaaaaggaatcagatcttgattcttctgggtttatactggttgtaaaacagaatgatacagaaaatgttttccttgtttaactggtagttgaacatagaacttgggtattatagatcacttttcactttttggaatgttttgtattgaaacttaataaaactttaacatggca

SEQ ID NO: 432177 - DNA, 1831 bp, Homo sapiens
ggtccttcagcctcgttcccgggcagtataaagtttgctgtctcctttgttcgccctcggttgcgcagtagtgctagcggcttcgcggttcggtcctcgcacccggcagccgccactggtgctgagctgctaggaagcccctatcgccgagctcgttggagcttgaacccattgtcacccctccgactcaccggcccaaaaaaaaaaaaaaatggttgaagcagatcgcccaggaaagctcttcattggtgggcttaatacggaaacaaatgagaaagctcttgaagcagtatttggcaaatatggacgaatagtggaagtactcttgatgaaagaccgtgaaaccaacaaatcaagaggatttgcttttgtcacctttgaaagcccagcagacgctaaggatgcagccagagacatgaatggaaagtcattagatggaaaagccatcaaggtggaacaagccaccaaaccatcatttgaaagtggtagacgtggaccgcctccacctccaagaagtagaggccctccaagaggtcttagaggtggaagaggaggaagtggaggaaccaggggacctccctcacggggaggacacatggatgacggtggatattccatgaattttaacatgagttcttccaggggaccactcccagtaaaaagaggaccaccaccaagaagtgggggtcctcctcctaagagatctgcaccttcaggaccagttcgcagtagcagtggaatgggaggaagagctcctgtatcacgtggaagagatagttatggaggtccacctcgaagggaaccgctgccctctcgtagagatgtttatttgtccccaagagatgatgggtattctactaaagacagctattcaagcagagattacccaagttctcgtgatactagagattatgcaccaccaccacgagattatacttaccgtgattatggtcattccagttcacgtgatgactatccatcaagaggatatagcgatagagatggatatggtcgtgatcgtgactattcagatcatccaagtggaggttcctacagagattcatatgagagttatggtaactcacgtagtgctccacctacacgagggcccccgccatcttatggtggaagcagtcgctatgatgattacagcagctcacgtgacggatatggtggaagtcgagacagttactcaagcagccgaagtgatctctactcaagtggtcgtgatcgggttggcagacaagaaagagggcttcccccttctatggaaagggggtaccctcctccacgtgattcctacagcagttcaagccgcggagcaccaagaggtggtggccgtggaggaagccgatctgatagagggggaggcagaagcagatactagaaacaaacaaaactttggaccaaaatcccagttcaaagaaacaaaaagtggaaactattctatcataactacccaaggactactaaaaggaaaaattgtgttactttttttaaattccctgttaagttcccctccataatttttatgttcttgtgaggaaaaaagtaaaacatgtttaattttatttgactttcgcattgcttttcaacaagcaaatgttaaatgtgttaagacttgtactagtgttgtaactttccaagtaaaagtatcccctaaaggccacttcctatctgatttttcccagcaaatgaggcaggcaattctaagatcttccacaaaacatctagccatctaaaatggagagatgaatcattctacctatacaaacaagctagctattagagggtggttggggtatgctactcggaaagtgggtccgagcag

SEQ ID NO: 432178 - DNA, 2576 bp, Homo sapiens
caagtgtcgccattttgtcttttacacgcggtttttaatgacgagttttaattaggttccgctgcagtcacggagtgtcgagtgttagtgtgtgcgtccgcgttccgttacttaatagcaaacgatgttgacgatttgtttttatctttttggccggatagtagaattttcggtagggcgggggccggtgaagaagaggggcggcataacttggcttaaacttcacatttctccttggatttagtagggaatcctaatgaggaaaagaggagtcgttggaagagggcttggtgttaaggtcctgtgtctagcctgtgaccttgggagtcttttaaaaccatcgttaggaagggtgtgatgagtaattgaatctttcaaaggcaagaggactggaactaaaagttgctttttcaaatgttaagcagctgttgcttaagaacagctaagggtgatcaagggtagtggtaaaagttaagttggcccttttaaccagttttatgtaaattgcagtgttactaaactacttagttcaaattgcttcctactgtggctgaggcttagctcgttatcgttttctttagttattaaggaacaatggttttagtggaaaatatgagaaatgtgcgaaagtaaaagtgtccaataaacttgaggaactttttgcagtgaggtaatactattccttttcaacagactcaccggcccaaaaaaaaaaaaaaatggttgaagcagatcgcccaggaaagctcttcattggtgggcttaatacggaaacaaatgagaaagctcttgaagcagtatttggcaaatatggacgaatagtggaagtactcttgatgaaagaccgtgaaaccaacaaatcaagaggatttgcttttgtcacctttgaaagcccagcagacgctaaggatgcagccagagacatgaatggaaagtcattagatggaaaagccatcaaggtggaacaagccaccaaaccatcatttgaaagtggtagacgtggaccgcctccacctccaagaagtagaggccctccaagaggtcttagaggtggaagaggaggaagtggaggaaccaggggacctccctcacggggaggacacatggatgacggtggatattccatgaattttaacatgagttcttccaggggaccactcccagtaaaaagaggaccaccaccaagaagtgggggtcctcctcctaagagatctgcaccttcaggaccagttcgcagtagcagtggaatgggaggaagagctcctgtatcacgtggaagagatagttatggaggtccacctcgaagggaaccgctgccctctcgtagagatgtttatttgtccccaagagatgatgggtattctactaaagacagctattcaagcagagattacccaagttctcgtgatactagagattatgcaccaccaccacgagattatacttaccgtgattatggtcattccagttcacgtgatgactatccatcaagaggatatagcgatagagatggatatggtcgtgatcgtgactattcagatcatccaagtggaggttcctacagagattcatatgagagttatggtaactcacgtagtgctccacctacacgagggcccccgccatcttatggtggaagcagtcgctatgatgattacagcagctcacgtgacggatatggtggaagtcgagacagttactcaagcagccgaagtgatctctactcaagtggtcgtgatcgggttggcagacaagaaagagggcttcccccttctatggaaagggggtaccctcctccacgtgattcctacagcagttcaagccgcggagcaccaagaggtggtggccgtggaggaagccgatctgatagagggggaggcagaagcagatactagaaacaaacaaaactttggaccaaaatcccagttcaaagaaacaaaaagtggaaactattctatcataactacccaaggactactaaaaggaaaaattgtgttactttttttaaattccctgttaagttcccctccataatttttatgttcttgtgaggaaaaaagtaaaacatgtttaattttatttgactttcgcattgcttttcaacaagcaaatgttaaatgtgttaagacttgtactagtgttgtaactttccaagtaaaagtatcccctaaaggccacttcctatctgatttttcccagcaaatgaggcaggcaattctaagatcttccacaaaacatctagccatctaaaatggagagatgaatcattctacctatacaaacaagctagctattagagggtggttggggtatgctactcataagatttcagggtgtcttccaactgaaatctcaatgttctcagtacgaaaaacctgaaatcacatgcctatgtaaggaaagtgctattcacccagtaaacccaaaaaagcaaatggataatgctggccattttgcctttctgacatttccttgggaatctgcaagaacctcccctttcccttcccccaataagaccatttaagtgtgtgttaaacaactacagaatactaaataaaaagtttggccaaaaccaa

SEQ ID NO: 432179 - DNA, 2380 bp, Homo sapiens
ggtccttcagcctcgttcccgggcagtataaagtttgctgtctcctttgttcgccctcggttgcgcagtagtgctagcggcttcgcggttcggtcctcgcacccggcagccgccactggtgctgagctgctaggaagcccctatcgccgagctcgttggagcttgaacccattgtcacccctccgactcaccggcccaaaaaaaaaaaaaaatggttgaagcagatcgcccaggaaagctcttcattggtgggcttaatacggaaacaaatgagaaagctcttgaagcagtatttggcaaatatggacgaatagtggaagtactcttgatgaaagaccgtgaaaccaacaaatcaagaggatttgcttttgtcacctttgaaagcccagcagacgctaaggatgcagccagagacatgaatggaaagtcattagatggaaaagccatcaaggtggaacaagccaccaaaccatcatttgaaagtggtagacgtggaccgcctccacctccaagaagtagaggccctccaagaggtcttagaggtggaagaggaggaagtggaggaaccaggggacctccctcacggggaggacacatggatgacggtggatattccatgaattttaacatgagttcttccaggggaccactcccagtaaaaagaggaccaccaccaagaagtgggggtcctcctcctaagagatctgcaccttcaggaccagttcgcagtagcagtggaatgggaggaagagctcctgtatcacgtggaagagatagttatggaggtccacctcgaagggaaccgctgccctctcgtagagatgtttatttgtccccaagagatgatgggtattctactaaagacagctattcaagcagagattacccaagttctcgtgatactagagattatgcaccaccaccacgagattatacttaccgtgattatggtcattccagttcacgtgatgactatccatcaagaggatatagcgatagagatggatatggtcgtgatcgtgactattcagatcatccaagtggaggttcctacagagattcatatgagagttatggttggtgattttgctcattatggtcgtggagtgctgattgattcacagtagataaagctggcagtaagaaatgctaagagttgttgaagcagaaggcggctgattgtcaataagtcactacagttgcataagcagtgctgtcagaattggtttggtgcaggcaatagattttgccttcaggggttcctgtggatctgaggaaggcatcagtgttgattaacactcataactagggagtgactggtagttacttaaagcaagtaattgaccaaatggaaaaggggaagtaattaaggaaattggtaagtggaggtagtcaggaagttcttgtggttcttcacatagattttacagctttggctttcattttgtttagctaaagtcatggggacaactcttcaatttagaacttaagttgaattataaaaatgatggatataagtggtagctgtatctagtgaagtgtctgtcagtaagtgaaacattttttggtggtggcttatccacaaacagtttagttgtagaataaaacttatgagtgacatctggaaagtaaccatgctaagatggcaagcacactggaaacaattaggccacttggctttcttttgctgtattgttttataagcctactttacctcccagtcttggaaacaagttttagttttttattggtttggagactagagccaatagtataatgttctcaaaggaaacagacttgagttgttggattagaggaactaacccaacttatatgattttttttttgtttttgtcgtgtagttatggcactgtcttatttggaacatttgcaactagggataatacaacatttttaactctcatttgacaacctactactaatcacagaccacaagggtaatgaccaaatttatgtggtttttgcactccatagttgtcttagcccaatctttctatactcttacgattacttgggttaacgcttctgtgaggaccttctggctcttgagataccctaaatatttaagatatttagatatcttgaagatagtataggatatagagattgtaccaaataggaatataaggagtatgttaaaatgaccagatacctgtttgatagtttactgacctagcagatgtgtggaaaaggaatcagatcttgattcttctgggtttatactggttgtaaaacagaatgatacagaaaatgttttccttgtttaactggtagttgaacatagaacttgggtattatagatcacttttcactttttggaatgttttgtattgaaacttaataaaactttaacatggca

SEQ ID NO: 432180 - DNA, 4282 bp, Homo sapiens
aaagctaaggtagaggctggtgtgaatcggccgaggttcattggtgggcttaatacggaaacaaatgagaaagctcttgaagcagtatttggcaaatatggacgaatagtggaagtactcttgatgaaagaccgtgaaaccaacaaatcaagaggatttgcttttgtcacctttgaaagcccagcagacgctaaggatgcagccagagacatgaatggaaagtcattagatggaaaagccatcaaggtggaacaagccaccaaaccatcatttgaaagtggtagacgtggaccgcctccacctccaagaagtagaggccctccaagaggtcttagaggtggaagaggaggaagtggaggaaccaggggacctccctcacggggaggacacatggatgacggtggatattccatgaattttaacatgagttcttccaggggaccactcccagtaaaaagaggaccaccaccaagaagtgggggtcctcctcctaagagatctgcaccttcaggaccagttcgcagtagcagtggaatgggaggaagagctcctgtatcacgtggaagagatagttatggaggtccacctcgaagggaaccgctgccctctcgtagagatgtttatttgtccccaagagatgatgggtattctactaaagacagctattcaagcagagattacccaagttctcgtgatactagagattatgcaccaccaccacgagattatacttaccgtgattatggtcattccagttcacgtgatgactatccatcaagaggatatagcgatagagatggatatggtcgtgatcgtgactattcagatcatccaagtggaggttcctacagagattcatatgagagttatggtaactcacgtagtgctccacctacacgagggcccccgccatcttatggtggaagcagtcgctatgatgattacagcagctcacgtgacggatatggtggaagtcgagacagttactcaagcagccgaagtgatctctactcaagtggtcgtgatcgggttggcagacaagaaagagggcttcccccttctatggaaagggggtaccctcctccacgtgattcctacagcagttcaagccgcggagcaccaagaggtggtggccgtggaggaagccgatctgatagagggggaggcagaagcagatactagaaacaaacaaaactttggaccaaaatcccagttcaaagaaacaaaaagtggaaactattctatcataactacccaaggactactaaaaggaaaaattgtgttactttttttaaattccctgttaagttcccctccataatttttatgttcttgtgaggaaaaaagtaaaacatgtttaattttatttgactttcgcattgcttttcaacaagcaaatgttaaatgtgttaagacttgtactagtgttgtaactttccaagtaaaagtatcccctaaaggccacttcctatctgatttttcccagcaaatgaggcaggcaattctaagatcttccacaaaacatctagccatctaaaatggagagatgaatcattctacctatacaaacaagctagctattagagggtggttggggtatgctactcataagatttcagggtgtcttccaactgaaatctcaatgttctcagtacgaaaaacctgaaatcacatgcctatgtaaggaaagtgctattcacccagtaaacccaaaaaagcaaatggataatgctggccattttgcctttctgacatttccttgggaatctgcaagaacctcccctttcccttcccccaataagaccatttaagtgtgtgttaaacaactacagaatactaaataaaaagtttggccaaaaccaaccatgaagctgcaaaggtgcttgctcttactgtttcaaatttttgcaactctgtagtgtctcacttttaaaggaacagcttgattgcaaaggagaaaatagataagcaatgaagttatctccaacttcctaaaggcttatgacttctaaaaagtgaatctatcagcattccacatcagatttaaagcatcaaatgcctgtgaaacagcaaagatggtaagcaaagcaaactagtttttccgtctaagtcgaaattgaacacttaccttcctcatagtacagtgaaacatactgtacctcaaggcaatggaaatgccttctagattaaaaaaaacttttggaaaaaagaaatattcaatagcgtattagaagtcctccaaattcaacacttggattttttttttttttttttaaagcatgtgtgacacttaaaggctttattaatagagctgttgtttaccaatggcgatctggggcttgggagggggtatttttttcaaagtccatttttgatgaagacctttaaacatgcttcgtatgtttttaacatttttttcaaattagtcttttagtcaatataggaaatggcttaagtttggggtccccctttttacccctgtaagccattgcaaacttgacatttagttggatgcctgacttgtttttagttctatgaaactacactgtatggagaaaatctattgcaagtggtctttaaaaagcaaaacctgaggcagcatgacccaggtccagccatgaagttgaaaaagatgctcttgaatatagtaaacttgaagacctccaactaaaaatccttatactgcacttattccttcaaataagttttgttcgttcaacttatggatttaacgtggcagtgcaccattggaacagaatgacaatccataagccatgcaacttaacaatttaagccattccagtccatcccgagccagtgaatcttccaccacttaagacaaatagtagaacatgaaatatattaagctgcaagtctgaacttgccttttctttctggaaaagagggcagtaataggcaagttttaaaagaatttccttaagagagataactagttttcatttatttaacttttgcaggttggtgattttgctcattatggtcgtggagtgctgattgattcacagtagataaagctggcagtaagaaatgctaagagttgttgaagcagaaggcggctgattgtcaataagtcactacagttgcataagcagtgctgtcagaattggtttggtgcaggcaatagattttgccttcaggggttcctgtggatctgaggaaggcatcagtgttgattaacactcataactagggagtgactggtagttacttaaagcaagtaattgaccaaatggaaaaggggaagtaattaaggaaattggtaagtggaggtagtcaggaagttcttgtggttcttcacatagattttacagctttggctttcattttgtttagctaaagtcatggggacaactcttcaatttagaacttaagttgaattataaaaatgatggatataagtggtagctgtatctagtgaagtgtctgtcagtaagtgaaacattttttggtggtggcttatccacaaacagtttagttgtagaataaaacttatgagtgacatctggaaagtaaccatgctaagatggcaagcacactggaaacaattaggccacttggctttcttttgctgtattgttttataagcctactttacctcccagtcttggaaacaagttttagttttttattggtttggagactagagccaatagtataatgttctcaaaggaaacagacttgagttgttggattagaggaactaacccaacttatatgattttttttttgtttttgtcgtgtagttatggcactgtcttatttggaacatttgcaactagggataatacaacatttttaactctcatttgacaacctactactaatcacagaccacaagggtaatgaccaaatttatgtggtttttgcactccatagttgtcttagcccaatctttctatactcttacgattacttgggttaacgcttctgtgaggaccttctggctcttgagataccctaaatatttaagatatttagatatcttgaagatagtataggatatagagattgtaccaaataggaatataaggagtatgttaaaatgaccagatacctgtttgatagtttactgacctagcagatgtgtggaaaaggaatcagatcttgattcttctgggtttatactggttgtaaaacagaatgatacagaaaatgttttccttgtttaactggtagttgaacatagaacttgggtattatagatcacttttcactttttggaatgttttgtattgaaacttaataaaactttaacatggca

SEQ ID NO: 432181 - DNA, 4389 bp, Homo sapiens
  misc_feature (18)..(18): n is a, c, g, or t
ggcagtacccccggttantgtagcgaggctgggagcggcttcgcggttcggtcctcgcacccggcagccgccactggtgctgagctgctaggaagcccctatcgccgagctcgttggagcttgaacccattgtcacccctccgttcattggtgggcttaatacggaaacaaatgagaaagctcttgaagcagtatttggcaaatatggacgaatagtggaagtactcttgatgaaagaccgtgaaaccaacaaatcaagaggatttgcttttgtcacctttgaaagcccagcagacgctaaggatgcagccagagacatgaatggaaagtcattagatggaaaagccatcaaggtggaacaagccaccaaaccatcatttgaaagtggtagacgtggaccgcctccacctccaagaagtagaggccctccaagaggtcttagaggtggaagaggaggaagtggaggaaccaggggacctccctcacggggaggacacatggatgacggtggatattccatgaattttaacatgagttcttccaggggaccactcccagtaaaaagaggaccaccaccaagaagtgggggtcctcctcctaagagatctgcaccttcaggaccagttcgcagtagcagtggaatgggaggaagagctcctgtatcacgtggaagagatagttatggaggtccacctcgaagggaaccgctgccctctcgtagagatgtttatttgtccccaagagatgatgggtattctactaaagacagctattcaagcagagattacccaagttctcgtgatactagagattatgcaccaccaccacgagattatacttaccgtgattatggtcattccagttcacgtgatgactatccatcaagaggatatagcgatagagatggatatggtcgtgatcgtgactattcagatcatccaagtggaggttcctacagagattcatatgagagttatggtaactcacgtagtgctccacctacacgagggcccccgccatcttatggtggaagcagtcgctatgatgattacagcagctcacgtgacggatatggtggaagtcgagacagttactcaagcagccgaagtgatctctactcaagtggtcgtgatcgggttggcagacaagaaagagggcttcccccttctatggaaagggggtaccctcctccacgtgattcctacagcagttcaagccgcggagcaccaagaggtggtggccgtggaggaagccgatctgatagagggggaggcagaagcagatactagaaacaaacaaaactttggaccaaaatcccagttcaaagaaacaaaaagtggaaactattctatcataactacccaaggactactaaaaggaaaaattgtgttactttttttaaattccctgttaagttcccctccataatttttatgttcttgtgaggaaaaaagtaaaacatgtttaattttatttgactttcgcattgcttttcaacaagcaaatgttaaatgtgttaagacttgtactagtgttgtaactttccaagtaaaagtatcccctaaaggccacttcctatctgatttttcccagcaaatgaggcaggcaattctaagatcttccacaaaacatctagccatctaaaatggagagatgaatcattctacctatacaaacaagctagctattagagggtggttggggtatgctactcataagatttcagggtgtcttccaactgaaatctcaatgttctcagtacgaaaaacctgaaatcacatgcctatgtaaggaaagtgctattcacccagtaaacccaaaaaagcaaatggataatgctggccattttgcctttctgacatttccttgggaatctgcaagaacctcccctttcccttcccccaataagaccatttaagtgtgtgttaaacaactacagaatactaaataaaaagtttggccaaaaccaaccatgaagctgcaaaggtgcttgctcttactgtttcaaatttttgcaactctgtagtgtctcacttttaaaggaacagcttgattgcaaaggagaaaatagataagcaatgaagttatctccaacttcctaaaggcttatgacttctaaaaagtgaatctatcagcattccacatcagatttaaagcatcaaatgcctgtgaaacagcaaagatggtaagcaaagcaaactagtttttccgtctaagtcgaaattgaacacttaccttcctcatagtacagtgaaacatactgtacctcaaggcaatggaaatgccttctagattaaaaaaaacttttggaaaaaagaaatattcaatagcgtattagaagtcctccaaattcaacacttggattttttttttttttttttaaagcatgtgtgacacttaaaggctttattaatagagctgttgtttaccaatggcgatctggggcttgggagggggtatttttttcaaagtccatttttgatgaagacctttaaacatgcttcgtatgtttttaacatttttttcaaattagtcttttagtcaatataggaaatggcttaagtttggggtccccctttttacccctgtaagccattgcaaacttgacatttagttggatgcctgacttgtttttagttctatgaaactacactgtatggagaaaatctattgcaagtggtctttaaaaagcaaaacctgaggcagcatgacccaggtccagccatgaagttgaaaaagatgctcttgaatatagtaaacttgaagacctccaactaaaaatccttatactgcacttattccttcaaataagttttgttcgttcaacttatggatttaacgtggcagtgcaccattggaacagaatgacaatccataagccatgcaacttaacaatttaagccattccagtccatcccgagccagtgaatcttccaccacttaagacaaatagtagaacatgaaatatattaagctgcaagtctgaacttgccttttctttctggaaaagagggcagtaataggcaagttttaaaagaatttccttaagagagataactagttttcatttatttaacttttgcaggttggtgattttgctcattatggtcgtggagtgctgattgattcacagtagataaagctggcagtaagaaatgctaagagttgttgaagcagaaggcggctgattgtcaataagtcactacagttgcataagcagtgctgtcagaattggtttggtgcaggcaatagattttgccttcaggggttcctgtggatctgaggaaggcatcagtgttgattaacactcataactagggagtgactggtagttacttaaagcaagtaattgaccaaatggaaaaggggaagtaattaaggaaattggtaagtggaggtagtcaggaagttcttgtggttcttcacatagattttacagctttggctttcattttgtttagctaaagtcatggggacaactcttcaatttagaacttaagttgaattataaaaatgatggatataagtggtagctgtatctagtgaagtgtctgtcagtaagtgaaacattttttggtggtggcttatccacaaacagtttagttgtagaataaaacttatgagtgacatctggaaagtaaccatgctaagatggcaagcacactggaaacaattaggccacttggctttcttttgctgtattgttttataagcctactttacctcccagtcttggaaacaagttttagttttttattggtttggagactagagccaatagtataatgttctcaaaggaaacagacttgagttgttggattagaggaactaacccaacttatatgattttttttttgtttttgtcgtgtagttatggcactgtcttatttggaacatttgcaactagggataatacaacatttttaactctcatttgacaacctactactaatcacagaccacaagggtaatgaccaaatttatgtggtttttgcactccatagttgtcttagcccaatctttctatactcttacgattacttgggttaacgcttctgtgaggaccttctggctcttgagataccctaaatatttaagatatttagatatcttgaagatagtataggatatagagattgtaccaaataggaatataaggagtatgttaaaatgaccagatacctgtttgatagtttactgacctagcagatgtgtggaaaaggaatcagatcttgattcttctgggtttatactggttgtaaaacagaatgatacagaaaatgttttccttgtttaactggtagttgaacatagaacttgggtattatagatcacttttcactttttggaatgttttgtattgaaacttaataaaactttaacatggca

SEQ ID NO: 432182 - DNA, 4453 bp, Homo sapiens
  misc_feature (18)..(18): n is a, c, g, or t
  misc_feature (174)..(176): n is a, c, g, or t
  misc_feature (180)..(183): n is a, c, g, or t
  misc_feature (193)..(195): n is a, c, g, or t
  misc_feature (227)..(227): n is a, c, g, or t
  misc_feature (247)..(249): n is a, c, g, or t
  misc_feature (251)..(252): n is a, c, g, or t
  misc_feature (254)..(254): n is a, c, g, or t
  misc_feature (264)..(264): n is a, c, g, or t
  misc_feature (268)..(269): n is a, c, g, or t
  misc_feature (271)..(271): n is a, c, g, or t
  misc_feature (286)..(286): n is a, c, g, or t
ggcagtacccccggttantgtagcgaggctgggagcggcttcgcggttcggtcctcgcacccggcagccgccactggtgctgagctgctaggaagcccctatcgccgagctcgttggagcttgaacccattgtcacccctccgactcaccggcccaaaaaaaaaaaaaaaatgnnnaaannnngggggggggnnntttttttttttttttttttttttttttttttntttttttttttttttttttnnntnntnttttggtaantatnnanttatattattggaantactcttgatgaaagaccgtgaaaccaacaaatcaagaggatttgcttttgtcacctttgaaagcccagcagacgctaaggatgcagccagagacatgaatggaaagtcattagatggaaaagccatcaaggtggaacaagccaccaaaccatcatttgaaagtggtagacgtggaccgcctccacctccaagaagtagaggccctccaagaggtcttagaggtggaagaggaggaagtggaggaaccaggggacctccctcacggggaggacacatggatgacggtggatattccatgaattttaacatgagttcttccaggggaccactcccagtaaaaagaggaccaccaccaagaagtgggggtcctcctcctaagagatctgcaccttcaggaccagttcgcagtagcagtggaatgggaggaagagctcctgtatcacgtggaagagatagttatggaggtccacctcgaagggaaccgctgccctctcgtagagatgtttatttgtccccaagagatgatgggtattctactaaagacagctattcaagcagagattacccaagttctcgtgatactagagattatgcaccaccaccacgagattatacttaccgtgattatggtcattccagttcacgtgatgactatccatcaagaggatatagcgatagagatggatatggtcgtgatcgtgactattcagatcatccaagtggaggttcctacagagattcatatgagagttatggtaactcacgtagtgctccacctacacgagggcccccgccatcttatggtggaagcagtcgctatgatgattacagcagctcacgtgacggatatggtggaagtcgagacagttactcaagcagccgaagtgatctctactcaagtggtcgtgatcgggttggcagacaagaaagagggcttcccccttctatggaaagggggtaccctcctccacgtgattcctacagcagttcaagccgcggagcaccaagaggtggtggccgtggaggaagccgatctgatagagggggaggcagaagcagatactagaaacaaacaaaactttggaccaaaatcccagttcaaagaaacaaaaagtggaaactattctatcataactacccaaggactactaaaaggaaaaattgtgttactttttttaaattccctgttaagttcccctccataatttttatgttcttgtgaggaaaaaagtaaaacatgtttaattttatttgactttcgcattgcttttcaacaagcaaatgttaaatgtgttaagacttgtactagtgttgtaactttccaagtaaaagtatcccctaaaggccacttcctatctgatttttcccagcaaatgaggcaggcaattctaagatcttccacaaaacatctagccatctaaaatggagagatgaatcattctacctatacaaacaagctagctattagagggtggttggggtatgctactcataagatttcagggtgtcttccaactgaaatctcaatgttctcagtacgaaaaacctgaaatcacatgcctatgtaaggaaagtgctattcacccagtaaacccaaaaaagcaaatggataatgctggccattttgcctttctgacatttccttgggaatctgcaagaacctcccctttcccttcccccaataagaccatttaagtgtgtgttaaacaactacagaatactaaataaaaagtttggccaaaaccaaccatgaagctgcaaaggtgcttgctcttactgtttcaaatttttgcaactctgtagtgtctcacttttaaaggaacagcttgattgcaaaggagaaaatagataagcaatgaagttatctccaacttcctaaaggcttatgacttctaaaaagtgaatctatcagcattccacatcagatttaaagcatcaaatgcctgtgaaacagcaaagatggtaagcaaagcaaactagtttttccgtctaagtcgaaattgaacacttaccttcctcatagtacagtgaaacatactgtacctcaaggcaatggaaatgccttctagattaaaaaaaacttttggaaaaaagaaatattcaatagcgtattagaagtcctccaaattcaacacttggattttttttttttttttttaaagcatgtgtgacacttaaaggctttattaatagagctgttgtttaccaatggcgatctggggcttgggagggggtatttttttcaaagtccatttttgatgaagacctttaaacatgcttcgtatgtttttaacatttttttcaaattagtcttttagtcaatataggaaatggcttaagtttggggtccccctttttacccctgtaagccattgcaaacttgacatttagttggatgcctgacttgtttttagttctatgaaactacactgtatggagaaaatctattgcaagtggtctttaaaaagcaaaacctgaggcagcatgacccaggtccagccatgaagttgaaaaagatgctcttgaatatagtaaacttgaagacctccaactaaaaatccttatactgcacttattccttcaaataagttttgttcgttcaacttatggatttaacgtggcagtgcaccattggaacagaatgacaatccataagccatgcaacttaacaatttaagccattccagtccatcccgagccagtgaatcttccaccacttaagacaaatagtagaacatgaaatatattaagctgcaagtctgaacttgccttttctttctggaaaagagggcagtaataggcaagttttaaaagaatttccttaagagagataactagttttcatttatttaacttttgcaggttggtgattttgctcattatggtcgtggagtgctgattgattcacagtagataaagctggcagtaagaaatgctaagagttgttgaagcagaaggcggctgattgtcaataagtcactacagttgcataagcagtgctgtcagaattggtttggtgcaggcaatagattttgccttcaggggttcctgtggatctgaggaaggcatcagtgttgattaacactcataactagggagtgactggtagttacttaaagcaagtaattgaccaaatggaaaaggggaagtaattaaggaaattggtaagtggaggtagtcaggaagttcttgtggttcttcacatagattttacagctttggctttcattttgtttagctaaagtcatggggacaactcttcaatttagaacttaagttgaattataaaaatgatggatataagtggtagctgtatctagtgaagtgtctgtcagtaagtgaaacattttttggtggtggcttatccacaaacagtttagttgtagaataaaacttatgagtgacatctggaaagtaaccatgctaagatggcaagcacactggaaacaattaggccacttggctttcttttgctgtattgttttataagcctactttacctcccagtcttggaaacaagttttagttttttattggtttggagactagagccaatagtataatgttctcaaaggaaacagacttgagttgttggattagaggaactaacccaacttatatgattttttttttgtttttgtcgtgtagttatggcactgtcttatttggaacatttgcaactagggataatacaacatttttaactctcatttgacaacctactactaatcacagaccacaagggtaatgaccaaatttatgtggtttttgcactccatagttgtcttagcccaatctttctatactcttacgattacttgggttaacgcttctgtgaggaccttctggctcttgagataccctaaatatttaagatatttagatatcttgaagatagtataggatatagagattgtaccaaataggaatataaggagtatgttaaaatgaccagatacctgtttgatagtttactgacctagcagatgtgtggaaaaggaatcagatcttgattcttctgggtttatactggttgtaaaacagaatgatacagaaaatgttttccttgtttaactggtagttgaacatagaacttgggtattatagatcacttttcactttttggaatgttttgtattgaaacttaataaaactttaacatggca

SEQ ID NO: 432183 - DNA, 4192 bp, Homo sapiens
tatttttctgaaaactactttttagtactcttgatgaaagaccgtgaaaccaacaaatcaagaggatttgcttttgtcacctttgaaagcccagcagacgctaaggatgcagccagagacatgaatggaaagtcattagatggaaaagccatcaaggtggaacaagccaccaaaccatcatttgaaagtggtagacgtggaccgcctccacctccaagaagtagaggccctccaagaggtcttagaggtggaagaggaggaagtggaggaaccaggggacctccctcacggggaggacacatggatgacggtggatattccatgaattttaacatgagttcttccaggggaccactcccagtaaaaagaggaccaccaccaagaagtgggggtcctcctcctaagagatctgcaccttcaggaccagttcgcagtagcagtggaatgggaggaagagctcctgtatcacgtggaagagatagttatggaggtccacctcgaagggaaccgctgccctctcgtagagatgtttatttgtccccaagagatgatgggtattctactaaagacagctattcaagcagagattacccaagttctcgtgatactagagattatgcaccaccaccacgagattatacttaccgtgattatggtcattccagttcacgtgatgactatccatcaagaggatatagcgatagagatggatatggtcgtgatcgtgactattcagatcatccaagtggaggttcctacagagattcatatgagagttatggtaactcacgtagtgctccacctacacgagggcccccgccatcttatggtggaagcagtcgctatgatgattacagcagctcacgtgacggatatggtggaagtcgagacagttactcaagcagccgaagtgatctctactcaagtggtcgtgatcgggttggcagacaagaaagagggcttcccccttctatggaaagggggtaccctcctccacgtgattcctacagcagttcaagccgcggagcaccaagaggtggtggccgtggaggaagccgatctgatagagggggaggcagaagcagatactagaaacaaacaaaactttggaccaaaatcccagttcaaagaaacaaaaagtggaaactattctatcataactacccaaggactactaaaaggaaaaattgtgttactttttttaaattccctgttaagttcccctccataatttttatgttcttgtgaggaaaaaagtaaaacatgtttaattttatttgactttcgcattgcttttcaacaagcaaatgttaaatgtgttaagacttgtactagtgttgtaactttccaagtaaaagtatcccctaaaggccacttcctatctgatttttcccagcaaatgaggcaggcaattctaagatcttccacaaaacatctagccatctaaaatggagagatgaatcattctacctatacaaacaagctagctattagagggtggttggggtatgctactcataagatttcagggtgtcttccaactgaaatctcaatgttctcagtacgaaaaacctgaaatcacatgcctatgtaaggaaagtgctattcacccagtaaacccaaaaaagcaaatggataatgctggccattttgcctttctgacatttccttgggaatctgcaagaacctcccctttcccttcccccaataagaccatttaagtgtgtgttaaacaactacagaatactaaataaaaagtttggccaaaaccaaccatgaagctgcaaaggtgcttgctcttactgtttcaaatttttgcaactctgtagtgtctcacttttaaaggaacagcttgattgcaaaggagaaaatagataagcaatgaagttatctccaacttcctaaaggcttatgacttctaaaaagtgaatctatcagcattccacatcagatttaaagcatcaaatgcctgtgaaacagcaaagatggtaagcaaagcaaactagtttttccgtctaagtcgaaattgaacacttaccttcctcatagtacagtgaaacatactgtacctcaaggcaatggaaatgccttctagattaaaaaaaacttttggaaaaaagaaatattcaatagcgtattagaagtcctccaaattcaacacttggattttttttttttttttttaaagcatgtgtgacacttaaaggctttattaatagagctgttgtttaccaatggcgatctggggcttgggagggggtatttttttcaaagtccatttttgatgaagacctttaaacatgcttcgtatgtttttaacatttttttcaaattagtcttttagtcaatataggaaatggcttaagtttggggtccccctttttacccctgtaagccattgcaaacttgacatttagttggatgcctgacttgtttttagttctatgaaactacactgtatggagaaaatctattgcaagtggtctttaaaaagcaaaacctgaggcagcatgacccaggtccagccatgaagttgaaaaagatgctcttgaatatagtaaacttgaagacctccaactaaaaatccttatactgcacttattccttcaaataagttttgttcgttcaacttatggatttaacgtggcagtgcaccattggaacagaatgacaatccataagccatgcaacttaacaatttaagccattccagtccatcccgagccagtgaatcttccaccacttaagacaaatagtagaacatgaaatatattaagctgcaagtctgaacttgccttttctttctggaaaagagggcagtaataggcaagttttaaaagaatttccttaagagagataactagttttcatttatttaacttttgcaggttggtgattttgctcattatggtcgtggagtgctgattgattcacagtagataaagctggcagtaagaaatgctaagagttgttgaagcagaaggcggctgattgtcaataagtcactacagttgcataagcagtgctgtcagaattggtttggtgcaggcaatagattttgccttcaggggttcctgtggatctgaggaaggcatcagtgttgattaacactcataactagggagtgactggtagttacttaaagcaagtaattgaccaaatggaaaaggggaagtaattaaggaaattggtaagtggaggtagtcaggaagttcttgtggttcttcacatagattttacagctttggctttcattttgtttagctaaagtcatggggacaactcttcaatttagaacttaagttgaattataaaaatgatggatataagtggtagctgtatctagtgaagtgtctgtcagtaagtgaaacattttttggtggtggcttatccacaaacagtttagttgtagaataaaacttatgagtgacatctggaaagtaaccatgctaagatggcaagcacactggaaacaattaggccacttggctttcttttgctgtattgttttataagcctactttacctcccagtcttggaaacaagttttagttttttattggtttggagactagagccaatagtataatgttctcaaaggaaacagacttgagttgttggattagaggaactaacccaacttatatgattttttttttgtttttgtcgtgtagttatggcactgtcttatttggaacatttgcaactagggataatacaacatttttaactctcatttgacaacctactactaatcacagaccacaagggtaatgaccaaatttatgtggtttttgcactccatagttgtcttagcccaatctttctatactcttacgattacttgggttaacgcttctgtgaggaccttctggctcttgagataccctaaatatttaagatatttagatatcttgaagatagtataggatatagagattgtaccaaataggaatataaggagtatgttaaaatgaccagatacctgtttgatagtttactgacctagcagatgtgtggaaaaggaatcagatcttgattcttctgggtttatactggttgtaaaacagaatgatacagaaaatgttttccttgtttaactggtagttgaacatagaacttgggtattatagatcacttttcactttttggaatgttttgtattgaaacttaataaaactttaacatggca

SEQ ID NO: 432184 - DNA, 1706 bp, Homo sapiens
ggtccttcagcctcgttcccgggcagtataaagtttgctgtctcctttgttcgccctcggttgcgcagtagtgctagcggcttcgcggttcggtcctcgcacccggcagccgccactggtgctgagctgctaggaagcccctatcgccgagctcgttggagcttgaacccattgtcacccctccgactcaccggcccaaaaaaaaaaaaaaatggttgaagcagatcgcccaggaaagctcttcattggtgggcttaatacggaaacaaatgagaaagctcttgaagcagtatttggcaaatatggacgaatagtggaagtactcttgatgaaagaccgtgaaaccaacaaatcaagaggatttgcttttgtcacctttgaaagcccagcagacgctaaggatgcagccagagacatgaatggaaagtcattagatggaaaagccatcaaggtggaacaagccaccaaaccatcatttgaaagtggtagacgtggaccgcctccacctccaagaagtagaggccctccaagaggtcttagaggtggaagaggaggaagtggaggaaccaggggacctccctcacggggaggacacatggatgacggtggatattccatgaattttaacatgagttcttccaggggaccactcccagtaaaaagaggaccaccaccaagaagtgggggtcctcctcctaagagatctgcaccttcaggaccagttcgcagtagcagtggaatgggaggaagagctcctgtatcacgtggaagagatagttatggaggtccacctcgaagggaaccgctgccctctcgtagagatgtttatttgtccccaagagatgatgggtattctactaaagacagctattcaagcagagattacccaagttctcgtgatactagagattatgcaccaccaccacgagattatacttaccgtgattatggtcattccagttcacgtgatgactatccatcaagaggatatagcgatagagatggatatggtcgtgatcgtgactattcagatcatccaagtggaggttcctacagagattcatatgagagttatgctcacgcttagtggttccagcctacaacggaagggcccccggccatcttaatggcggaaaccgagccggtccatgacagtaactatcacgagacctgtctttcgcgtgagagaggcaatatagtggtggcgatggacgagaaactggcatctctgagagcccgcgcgagagtagtctcctactactgcagtgatggcgctcggaggcatccggtggtccgacacgacacaagacgaggagggcgccccccttcatactaacggaggggggtagttaccccctcccgtacgaggactgacgtcctagcagccacacacgaccgcggagccagccaccaagggagggctggatggcccgaggacggacagccaccagcttggacgcgggacgggtgaaggaaagcagcaggcaacaacacacgcgaacaacggtatggaccagacgcccccagagcaacaaaacaaagagggaatcgaaacataacaaaccaacgcccggcacacaagaacggagcatgggacatcacgcaagtcccgtccagcccccccaaaggtaggtccggacggcagcacgtaccggctccctgacaccgccgcacccagacggcagtgacacgcagcgcggtccaaa

SEQ ID NO: 432185 - DNA, 4035 bp, Homo sapiens
gcagttgatgtctgaggtcgtctagaggatcccagcggggaacaatcacttcctctccaagaagtagaggccctccaagaggtcttagaggtggaagaggaggaagtggaggaaccaggggacctccctcacggggaggacacatggatgacggtggatattccatgaattttaacatgagttcttccaggggaccactcccagtaaaaagaggaccaccaccaagaagtgggggtcctcctcctaagagatctgcaccttcaggaccagttcgcagtagcagtggaatgggaggaagagctcctgtatcacgtggaagagatagttatggaggtccacctcgaagggaaccgctgccctctcgtagagatgtttatttgtccccaagagatgatgggtattctactaaagacagctattcaagcagagattacccaagttctcgtgatactagagattatgcaccaccaccacgagattatacttaccgtgattatggtcattccagttcacgtgatgactatccatcaagaggatatagcgatagagatggatatggtcgtgatcgtgactattcagatcatccaagtggaggttcctacagagattcatatgagagttatggtaactcacgtagtgctccacctacacgagggcccccgccatcttatggtggaagcagtcgctatgatgattacagcagctcacgtgacggatatggtggaagtcgagacagttactcaagcagccgaagtgatctctactcaagtggtcgtgatcgggttggcagacaagaaagagggcttcccccttctatggaaagggggtaccctcctccacgtgattcctacagcagttcaagccgcggagcaccaagaggtggtggccgtggaggaagccgatctgatagagggggaggcagaagcagatactagaaacaaacaaaactttggaccaaaatcccagttcaaagaaacaaaaagtggaaactattctatcataactacccaaggactactaaaaggaaaaattgtgttactttttttaaattccctgttaagttcccctccataatttttatgttcttgtgaggaaaaaagtaaaacatgtttaattttatttgactttcgcattgcttttcaacaagcaaatgttaaatgtgttaagacttgtactagtgttgtaactttccaagtaaaagtatcccctaaaggccacttcctatctgatttttcccagcaaatgaggcaggcaattctaagatcttccacaaaacatctagccatctaaaatggagagatgaatcattctacctatacaaacaagctagctattagagggtggttggggtatgctactcataagatttcagggtgtcttccaactgaaatctcaatgttctcagtacgaaaaacctgaaatcacatgcctatgtaaggaaagtgctattcacccagtaaacccaaaaaagcaaatggataatgctggccattttgcctttctgacatttccttgggaatctgcaagaacctcccctttcccttcccccaataagaccatttaagtgtgtgttaaacaactacagaatactaaataaaaagtttggccaaaaccaaccatgaagctgcaaaggtgcttgctcttactgtttcaaatttttgcaactctgtagtgtctcacttttaaaggaacagcttgattgcaaaggagaaaatagataagcaatgaagttatctccaacttcctaaaggcttatgacttctaaaaagtgaatctatcagcattccacatcagatttaaagcatcaaatgcctgtgaaacagcaaagatggtaagcaaagcaaactagtttttccgtctaagtcgaaattgaacacttaccttcctcatagtacagtgaaacatactgtacctcaaggcaatggaaatgccttctagattaaaaaaaacttttggaaaaaagaaatattcaatagcgtattagaagtcctccaaattcaacacttggattttttttttttttttttaaagcatgtgtgacacttaaaggctttattaatagagctgttgtttaccaatggcgatctggggcttgggagggggtatttttttcaaagtccatttttgatgaagacctttaaacatgcttcgtatgtttttaacatttttttcaaattagtcttttagtcaatataggaaatggcttaagtttggggtccccctttttacccctgtaagccattgcaaacttgacatttagttggatgcctgacttgtttttagttctatgaaactacactgtatggagaaaatctattgcaagtggtctttaaaaagcaaaacctgaggcagcatgacccaggtccagccatgaagttgaaaaagatgctcttgaatatagtaaacttgaagacctccaactaaaaatccttatactgcacttattccttcaaataagttttgttcgttcaacttatggatttaacgtggcagtgcaccattggaacagaatgacaatccataagccatgcaacttaacaatttaagccattccagtccatcccgagccagtgaatcttccaccacttaagacaaatagtagaacatgaaatatattaagctgcaagtctgaacttgccttttctttctggaaaagagggcagtaataggcaagttttaaaagaatttccttaagagagataactagttttcatttatttaacttttgcaggttggtgattttgctcattatggtcgtggagtgctgattgattcacagtagataaagctggcagtaagaaatgctaagagttgttgaagcagaaggcggctgattgtcaataagtcactacagttgcataagcagtgctgtcagaattggtttggtgcaggcaatagattttgccttcaggggttcctgtggatctgaggaaggcatcagtgttgattaacactcataactagggagtgactggtagttacttaaagcaagtaattgaccaaatggaaaaggggaagtaattaaggaaattggtaagtggaggtagtcaggaagttcttgtggttcttcacatagattttacagctttggctttcattttgtttagctaaagtcatggggacaactcttcaatttagaacttaagttgaattataaaaatgatggatataagtggtagctgtatctagtgaagtgtctgtcagtaagtgaaacattttttggtggtggcttatccacaaacagtttagttgtagaataaaacttatgagtgacatctggaaagtaaccatgctaagatggcaagcacactggaaacaattaggccacttggctttcttttgctgtattgttttataagcctactttacctcccagtcttggaaacaagttttagttttttattggtttggagactagagccaatagtataatgttctcaaaggaaacagacttgagttgttggattagaggaactaacccaacttatatgattttttttttgtttttgtcgtgtagttatggcactgtcttatttggaacatttgcaactagggataatacaacatttttaactctcatttgacaacctactactaatcacagaccacaagggtaatgaccaaatttatgtggtttttgcactccatagttgtcttagcccaatctttctatactcttacgattacttgggttaacgcttctgtgaggaccttctggctcttgagataccctaaatatttaagatatttagatatcttgaagatagtataggatatagagattgtaccaaataggaatataaggagtatgttaaaatgaccagatacctgtttgatagtttactgacctagcagatgtgtggaaaaggaatcagatcttgattcttctgggtttatactggttgtaaaacagaatgatacagaaaatgttttccttgtttaactggtagttgaacatagaacttgggtattatagatcacttttcactttttggaatgttttgtattgaaacttaataaaactttaacatggca

SEQ ID NO: 432186 - DNA, 4088 bp, Homo sapiens
gccgggtggtttaatcggccgagggaaatcattagatggaaaagccatcaaggtggaacaagccaccaaaccatcatttgaaagtggtagacgtggaccgcctccacctccaagaagtagaggccctccaagaggtcttagaggtggaagaggaggaagtggaggaaccaggggacctccctcacggggaggacacatggatgacggtggatattccatgaattttaacatgagttcttccaggggaccactcccagtaaaaagaggaccaccaccaagaagtgggggtcctcctcctaagagatctgcaccttcaggaccagttcgcagtagcagtggaatgggaggaagagctcctgtatcacgtggaagagatagttatggaggtccacctcgaagggaaccgctgccctctcgtagagatgtttatttgtccccaagagatgatgggtattctactaaagacagctattcaagcagagattacccaagttctcgtgatactagagattatgcaccaccaccacgagattatacttaccgtgattatggtcattccagttcacgtgatgactatccatcaagaggatatagcgatagagatggatatggtcgtgatcgtgactattcagatcatccaagtggaggttcctacagagattcatatgagagttatggtaactcacgtagtgctccacctacacgagggcccccgccatcttatggtggaagcagtcgctatgatgattacagcagctcacgtgacggatatggtggaagtcgagacagttactcaagcagccgaagtgatctctactcaagtggtcgtgatcgggttggcagacaagaaagagggcttcccccttctatggaaagggggtaccctcctccacgtgattcctacagcagttcaagccgcggagcaccaagaggtggtggccgtggaggaagccgatctgatagagggggaggcagaagcagatactagaaacaaacaaaactttggaccaaaatcccagttcaaagaaacaaaaagtggaaactattctatcataactacccaaggactactaaaaggaaaaattgtgttactttttttaaattccctgttaagttcccctccataatttttatgttcttgtgaggaaaaaagtaaaacatgtttaattttatttgactttcgcattgcttttcaacaagcaaatgttaaatgtgttaagacttgtactagtgttgtaactttccaagtaaaagtatcccctaaaggccacttcctatctgatttttcccagcaaatgaggcaggcaattctaagatcttccacaaaacatctagccatctaaaatggagagatgaatcattctacctatacaaacaagctagctattagagggtggttggggtatgctactcataagatttcagggtgtcttccaactgaaatctcaatgttctcagtacgaaaaacctgaaatcacatgcctatgtaaggaaagtgctattcacccagtaaacccaaaaaagcaaatggataatgctggccattttgcctttctgacatttccttgggaatctgcaagaacctcccctttcccttcccccaataagaccatttaagtgtgtgttaaacaactacagaatactaaataaaaagtttggccaaaaccaaccatgaagctgcaaaggtgcttgctcttactgtttcaaatttttgcaactctgtagtgtctcacttttaaaggaacagcttgattgcaaaggagaaaatagataagcaatgaagttatctccaacttcctaaaggcttatgacttctaaaaagtgaatctatcagcattccacatcagatttaaagcatcaaatgcctgtgaaacagcaaagatggtaagcaaagcaaactagtttttccgtctaagtcgaaattgaacacttaccttcctcatagtacagtgaaacatactgtacctcaaggcaatggaaatgccttctagattaaaaaaaacttttggaaaaaagaaatattcaatagcgtattagaagtcctccaaattcaacacttggattttttttttttttttttaaagcatgtgtgacacttaaaggctttattaatagagctgttgtttaccaatggcgatctggggcttgggagggggtatttttttcaaagtccatttttgatgaagacctttaaacatgcttcgtatgtttttaacatttttttcaaattagtcttttagtcaatataggaaatggcttaagtttggggtccccctttttacccctgtaagccattgcaaacttgacatttagttggatgcctgacttgtttttagttctatgaaactacactgtatggagaaaatctattgcaagtggtctttaaaaagcaaaacctgaggcagcatgacccaggtccagccatgaagttgaaaaagatgctcttgaatatagtaaacttgaagacctccaactaaaaatccttatactgcacttattccttcaaataagttttgttcgttcaacttatggatttaacgtggcagtgcaccattggaacagaatgacaatccataagccatgcaacttaacaatttaagccattccagtccatcccgagccagtgaatcttccaccacttaagacaaatagtagaacatgaaatatattaagctgcaagtctgaacttgccttttctttctggaaaagagggcagtaataggcaagttttaaaagaatttccttaagagagataactagttttcatttatttaacttttgcaggttggtgattttgctcattatggtcgtggagtgctgattgattcacagtagataaagctggcagtaagaaatgctaagagttgttgaagcagaaggcggctgattgtcaataagtcactacagttgcataagcagtgctgtcagaattggtttggtgcaggcaatagattttgccttcaggggttcctgtggatctgaggaaggcatcagtgttgattaacactcataactagggagtgactggtagttacttaaagcaagtaattgaccaaatggaaaaggggaagtaattaaggaaattggtaagtggaggtagtcaggaagttcttgtggttcttcacatagattttacagctttggctttcattttgtttagctaaagtcatggggacaactcttcaatttagaacttaagttgaattataaaaatgatggatataagtggtagctgtatctagtgaagtgtctgtcagtaagtgaaacattttttggtggtggcttatccacaaacagtttagttgtagaataaaacttatgagtgacatctggaaagtaaccatgctaagatggcaagcacactggaaacaattaggccacttggctttcttttgctgtattgttttataagcctactttacctcccagtcttggaaacaagttttagttttttattggtttggagactagagccaatagtataatgttctcaaaggaaacagacttgagttgttggattagaggaactaacccaacttatatgattttttttttgtttttgtcgtgtagttatggcactgtcttatttggaacatttgcaactagggataatacaacatttttaactctcatttgacaacctactactaatcacagaccacaagggtaatgaccaaatttatgtggtttttgcactccatagttgtcttagcccaatctttctatactcttacgattacttgggttaacgcttctgtgaggaccttctggctcttgagataccctaaatatttaagatatttagatatcttgaagatagtataggatatagagattgtaccaaataggaatataaggagtatgttaaaatgaccagatacctgtttgatagtttactgacctagcagatgtgtggaaaaggaatcagatcttgattcttctgggtttatactggttgtaaaacagaatgatacagaaaatgttttccttgtttaactggtagttgaacatagaacttgggtattatagatcacttttcactttttggaatgttttgtattgaaacttaataaaactttaacatggca

SEQ ID NO: 432187 - DNA, 4095 bp, Homo sapiens
  misc_feature (12)..(12): n is a, c, g, or t
tggtgagagacnacgacttttggggaatggaaatgtcattagatggaaaagccatcaaggtggaacaagccaccaaaccatcatttgaaagtggtagacgtggaccgcctccacctccaagaagtagaggccctccaagaggtcttagaggtggaagaggaggaagtggaggaaccaggggacctccctcacggggaggacacatggatgacggtggatattccatgaattttaacatgagttcttccaggggaccactcccagtaaaaagaggaccaccaccaagaagtgggggtcctcctcctaagagatctgcaccttcaggaccagttcgcagtagcagtggaatgggaggaagagctcctgtatcacgtggaagagatagttatggaggtccacctcgaagggaaccgctgccctctcgtagagatgtttatttgtccccaagagatgatgggtattctactaaagacagctattcaagcagagattacccaagttctcgtgatactagagattatgcaccaccaccacgagattatacttaccgtgattatggtcattccagttcacgtgatgactatccatcaagaggatatagcgatagagatggatatggtcgtgatcgtgactattcagatcatccaagtggaggttcctacagagattcatatgagagttatggtaactcacgtagtgctccacctacacgagggcccccgccatcttatggtggaagcagtcgctatgatgattacagcagctcacgtgacggatatggtggaagtcgagacagttactcaagcagccgaagtgatctctactcaagtggtcgtgatcgggttggcagacaagaaagagggcttcccccttctatggaaagggggtaccctcctccacgtgattcctacagcagttcaagccgcggagcaccaagaggtggtggccgtggaggaagccgatctgatagagggggaggcagaagcagatactagaaacaaacaaaactttggaccaaaatcccagttcaaagaaacaaaaagtggaaactattctatcataactacccaaggactactaaaaggaaaaattgtgttactttttttaaattccctgttaagttcccctccataatttttatgttcttgtgaggaaaaaagtaaaacatgtttaattttatttgactttcgcattgcttttcaacaagcaaatgttaaatgtgttaagacttgtactagtgttgtaactttccaagtaaaagtatcccctaaaggccacttcctatctgatttttcccagcaaatgaggcaggcaattctaagatcttccacaaaacatctagccatctaaaatggagagatgaatcattctacctatacaaacaagctagctattagagggtggttggggtatgctactcataagatttcagggtgtcttccaactgaaatctcaatgttctcagtacgaaaaacctgaaatcacatgcctatgtaaggaaagtgctattcacccagtaaacccaaaaaagcaaatggataatgctggccattttgcctttctgacatttccttgggaatctgcaagaacctcccctttcccttcccccaataagaccatttaagtgtgtgttaaacaactacagaatactaaataaaaagtttggccaaaaccaaccatgaagctgcaaaggtgcttgctcttactgtttcaaatttttgcaactctgtagtgtctcacttttaaaggaacagcttgattgcaaaggagaaaatagataagcaatgaagttatctccaacttcctaaaggcttatgacttctaaaaagtgaatctatcagcattccacatcagatttaaagcatcaaatgcctgtgaaacagcaaagatggtaagcaaagcaaactagtttttccgtctaagtcgaaattgaacacttaccttcctcatagtacagtgaaacatactgtacctcaaggcaatggaaatgccttctagattaaaaaaaacttttggaaaaaagaaatattcaatagcgtattagaagtcctccaaattcaacacttggattttttttttttttttttaaagcatgtgtgacacttaaaggctttattaatagagctgttgtttaccaatggcgatctggggcttgggagggggtatttttttcaaagtccatttttgatgaagacctttaaacatgcttcgtatgtttttaacatttttttcaaattagtcttttagtcaatataggaaatggcttaagtttggggtccccctttttacccctgtaagccattgcaaacttgacatttagttggatgcctgacttgtttttagttctatgaaactacactgtatggagaaaatctattgcaagtggtctttaaaaagcaaaacctgaggcagcatgacccaggtccagccatgaagttgaaaaagatgctcttgaatatagtaaacttgaagacctccaactaaaaatccttatactgcacttattccttcaaataagttttgttcgttcaacttatggatttaacgtggcagtgcaccattggaacagaatgacaatccataagccatgcaacttaacaatttaagccattccagtccatcccgagccagtgaatcttccaccacttaagacaaatagtagaacatgaaatatattaagctgcaagtctgaacttgccttttctttctggaaaagagggcagtaataggcaagttttaaaagaatttccttaagagagataactagttttcatttatttaacttttgcaggttggtgattttgctcattatggtcgtggagtgctgattgattcacagtagataaagctggcagtaagaaatgctaagagttgttgaagcagaaggcggctgattgtcaataagtcactacagttgcataagcagtgctgtcagaattggtttggtgcaggcaatagattttgccttcaggggttcctgtggatctgaggaaggcatcagtgttgattaacactcataactagggagtgactggtagttacttaaagcaagtaattgaccaaatggaaaaggggaagtaattaaggaaattggtaagtggaggtagtcaggaagttcttgtggttcttcacatagattttacagctttggctttcattttgtttagctaaagtcatggggacaactcttcaatttagaacttaagttgaattataaaaatgatggatataagtggtagctgtatctagtgaagtgtctgtcagtaagtgaaacattttttggtggtggcttatccacaaacagtttagttgtagaataaaacttatgagtgacatctggaaagtaaccatgctaagatggcaagcacactggaaacaattaggccacttggctttcttttgctgtattgttttataagcctactttacctcccagtcttggaaacaagttttagttttttattggtttggagactagagccaatagtataatgttctcaaaggaaacagacttgagttgttggattagaggaactaacccaacttatatgattttttttttgtttttgtcgtgtagttatggcactgtcttatttggaacatttgcaactagggataatacaacatttttaactctcatttgacaacctactactaatcacagaccacaagggtaatgaccaaatttatgtggtttttgcactccatagttgtcttagcccaatctttctatactcttacgattacttgggttaacgcttctgtgaggaccttctggctcttgagataccctaaatatttaagatatttagatatcttgaagatagtataggatatagagattgtaccaaataggaatataaggagtatgttaaaatgaccagatacctgtttgatagtttactgacctagcagatgtgtggaaaaggaatcagatcttgattcttctgggtttatactggttgtaaaacagaatgatacagaaaatgttttccttgtttaactggtagttgaacatagaacttgggtattatagatcacttttcactttttggaatgttttgtattgaaacttaataaaactttaacatggca

SEQ ID NO: 432188 - DNA, 4040 bp, Homo sapiens
tggcgaattcggcacgaggcctccaagaggtcttagagggcctctacttcttggaggtggtccaagaagtagaggccctccaagaggtcttagaggtggaagaggaggaagtggaggaaccaggggacctccctcacggggaggacacatggatgacggtggatattccatgaattttaacatgagttcttccaggggaccactcccagtaaaaagaggaccaccaccaagaagtgggggtcctcctcctaagagatctgcaccttcaggaccagttcgcagtagcagtggaatgggaggaagagctcctgtatcacgtggaagagatagttatggaggtccacctcgaagggaaccgctgccctctcgtagagatgtttatttgtccccaagagatgatgggtattctactaaagacagctattcaagcagagattacccaagttctcgtgatactagagattatgcaccaccaccacgagattatacttaccgtgattatggtcattccagttcacgtgatgactatccatcaagaggatatagcgatagagatggatatggtcgtgatcgtgactattcagatcatccaagtggaggttcctacagagattcatatgagagttatggtaactcacgtagtgctccacctacacgagggcccccgccatcttatggtggaagcagtcgctatgatgattacagcagctcacgtgacggatatggtggaagtcgagacagttactcaagcagccgaagtgatctctactcaagtggtcgtgatcgggttggcagacaagaaagagggcttcccccttctatggaaagggggtaccctcctccacgtgattcctacagcagttcaagccgcggagcaccaagaggtggtggccgtggaggaagccgatctgatagagggggaggcagaagcagatactagaaacaaacaaaactttggaccaaaatcccagttcaaagaaacaaaaagtggaaactattctatcataactacccaaggactactaaaaggaaaaattgtgttactttttttaaattccctgttaagttcccctccataatttttatgttcttgtgaggaaaaaagtaaaacatgtttaattttatttgactttcgcattgcttttcaacaagcaaatgttaaatgtgttaagacttgtactagtgttgtaactttccaagtaaaagtatcccctaaaggccacttcctatctgatttttcccagcaaatgaggcaggcaattctaagatcttccacaaaacatctagccatctaaaatggagagatgaatcattctacctatacaaacaagctagctattagagggtggttggggtatgctactcataagatttcagggtgtcttccaactgaaatctcaatgttctcagtacgaaaaacctgaaatcacatgcctatgtaaggaaagtgctattcacccagtaaacccaaaaaagcaaatggataatgctggccattttgcctttctgacatttccttgggaatctgcaagaacctcccctttcccttcccccaataagaccatttaagtgtgtgttaaacaactacagaatactaaataaaaagtttggccaaaaccaaccatgaagctgcaaaggtgcttgctcttactgtttcaaatttttgcaactctgtagtgtctcacttttaaaggaacagcttgattgcaaaggagaaaatagataagcaatgaagttatctccaacttcctaaaggcttatgacttctaaaaagtgaatctatcagcattccacatcagatttaaagcatcaaatgcctgtgaaacagcaaagatggtaagcaaagcaaactagtttttccgtctaagtcgaaattgaacacttaccttcctcatagtacagtgaaacatactgtacctcaaggcaatggaaatgccttctagattaaaaaaaacttttggaaaaaagaaatattcaatagcgtattagaagtcctccaaattcaacacttggattttttttttttttttttaaagcatgtgtgacacttaaaggctttattaatagagctgttgtttaccaatggcgatctggggcttgggagggggtatttttttcaaagtccatttttgatgaagacctttaaacatgcttcgtatgtttttaacatttttttcaaattagtcttttagtcaatataggaaatggcttaagtttggggtccccctttttacccctgtaagccattgcaaacttgacatttagttggatgcctgacttgtttttagttctatgaaactacactgtatggagaaaatctattgcaagtggtctttaaaaagcaaaacctgaggcagcatgacccaggtccagccatgaagttgaaaaagatgctcttgaatatagtaaacttgaagacctccaactaaaaatccttatactgcacttattccttcaaataagttttgttcgttcaacttatggatttaacgtggcagtgcaccattggaacagaatgacaatccataagccatgcaacttaacaatttaagccattccagtccatcccgagccagtgaatcttccaccacttaagacaaatagtagaacatgaaatatattaagctgcaagtctgaacttgccttttctttctggaaaagagggcagtaataggcaagttttaaaagaatttccttaagagagataactagttttcatttatttaacttttgcaggttggtgattttgctcattatggtcgtggagtgctgattgattcacagtagataaagctggcagtaagaaatgctaagagttgttgaagcagaaggcggctgattgtcaataagtcactacagttgcataagcagtgctgtcagaattggtttggtgcaggcaatagattttgccttcaggggttcctgtggatctgaggaaggcatcagtgttgattaacactcataactagggagtgactggtagttacttaaagcaagtaattgaccaaatggaaaaggggaagtaattaaggaaattggtaagtggaggtagtcaggaagttcttgtggttcttcacatagattttacagctttggctttcattttgtttagctaaagtcatggggacaactcttcaatttagaacttaagttgaattataaaaatgatggatataagtggtagctgtatctagtgaagtgtctgtcagtaagtgaaacattttttggtggtggcttatccacaaacagtttagttgtagaataaaacttatgagtgacatctggaaagtaaccatgctaagatggcaagcacactggaaacaattaggccacttggctttcttttgctgtattgttttataagcctactttacctcccagtcttggaaacaagttttagttttttattggtttggagactagagccaatagtataatgttctcaaaggaaacagacttgagttgttggattagaggaactaacccaacttatatgattttttttttgtttttgtcgtgtagttatggcactgtcttatttggaacatttgcaactagggataatacaacatttttaactctcatttgacaacctactactaatcacagaccacaagggtaatgaccaaatttatgtggtttttgcactccatagttgtcttagcccaatctttctatactcttacgattacttgggttaacgcttctgtgaggaccttctggctcttgagataccctaaatatttaagatatttagatatcttgaagatagtataggatatagagattgtaccaaataggaatataaggagtatgttaaaatgaccagatacctgtttgatagtttactgacctagcagatgtgtggaaaaggaatcagatcttgattcttctgggtttatactggttgtaaaacagaatgatacagaaaatgttttccttgtttaactggtagttgaacatagaacttgggtattatagatcacttttcactttttggaatgttttgtattgaaacttaataaaactttaacatggca

SEQ ID NO: 432189 - DNA, 4199 bp, Homo sapiens
ctctagaatttccttccccgcccccttttagtttagtgtcctaatctcgtgttcatgaggtgtggggtttataagggactgaatcgaaatgaatgtaacaaaaaagaaaaaaaaaaaacaaaaaaaaatgcctttcctcagggccagtgagtggcaaataatttttaaagaaaagcctataattacatcatctcaataaattttttataaaaaaaaaaatccaagaagtagaggccctccaagaggtcttagaggtggaagaggaggaagtggaggaaccaggggacctccctcacggggaggacacatggatgacggtggatattccatgaattttaacatgagttcttccaggggaccactcccagtaaaaagaggaccaccaccaagaagtgggggtcctcctcctaagagatctgcaccttcaggaccagttcgcagtagcagtggaatgggaggaagagctcctgtatcacgtggaagagatagttatggaggtccacctcgaagggaaccgctgccctctcgtagagatgtttatttgtccccaagagatgatgggtattctactaaagacagctattcaagcagagattacccaagttctcgtgatactagagattatgcaccaccaccacgagattatacttaccgtgattatggtcattccagttcacgtgatgactatccatcaagaggatatagcgatagagatggatatggtcgtgatcgtgactattcagatcatccaagtggaggttcctacagagattcatatgagagttatggtaactcacgtagtgctccacctacacgagggcccccgccatcttatggtggaagcagtcgctatgatgattacagcagctcacgtgacggatatggtggaagtcgagacagttactcaagcagccgaagtgatctctactcaagtggtcgtgatcgggttggcagacaagaaagagggcttcccccttctatggaaagggggtaccctcctccacgtgattcctacagcagttcaagccgcggagcaccaagaggtggtggccgtggaggaagccgatctgatagagggggaggcagaagcagatactagaaacaaacaaaactttggaccaaaatcccagttcaaagaaacaaaaagtggaaactattctatcataactacccaaggactactaaaaggaaaaattgtgttactttttttaaattccctgttaagttcccctccataatttttatgttcttgtgaggaaaaaagtaaaacatgtttaattttatttgactttcgcattgcttttcaacaagcaaatgttaaatgtgttaagacttgtactagtgttgtaactttccaagtaaaagtatcccctaaaggccacttcctatctgatttttcccagcaaatgaggcaggcaattctaagatcttccacaaaacatctagccatctaaaatggagagatgaatcattctacctatacaaacaagctagctattagagggtggttggggtatgctactcataagatttcagggtgtcttccaactgaaatctcaatgttctcagtacgaaaaacctgaaatcacatgcctatgtaaggaaagtgctattcacccagtaaacccaaaaaagcaaatggataatgctggccattttgcctttctgacatttccttgggaatctgcaagaacctcccctttcccttcccccaataagaccatttaagtgtgtgttaaacaactacagaatactaaataaaaagtttggccaaaaccaaccatgaagctgcaaaggtgcttgctcttactgtttcaaatttttgcaactctgtagtgtctcacttttaaaggaacagcttgattgcaaaggagaaaatagataagcaatgaagttatctccaacttcctaaaggcttatgacttctaaaaagtgaatctatcagcattccacatcagatttaaagcatcaaatgcctgtgaaacagcaaagatggtaagcaaagcaaactagtttttccgtctaagtcgaaattgaacacttaccttcctcatagtacagtgaaacatactgtacctcaaggcaatggaaatgccttctagattaaaaaaaacttttggaaaaaagaaatattcaatagcgtattagaagtcctccaaattcaacacttggattttttttttttttttttaaagcatgtgtgacacttaaaggctttattaatagagctgttgtttaccaatggcgatctggggcttgggagggggtatttttttcaaagtccatttttgatgaagacctttaaacatgcttcgtatgtttttaacatttttttcaaattagtcttttagtcaatataggaaatggcttaagtttggggtccccctttttacccctgtaagccattgcaaacttgacatttagttggatgcctgacttgtttttagttctatgaaactacactgtatggagaaaatctattgcaagtggtctttaaaaagcaaaacctgaggcagcatgacccaggtccagccatgaagttgaaaaagatgctcttgaatatagtaaacttgaagacctccaactaaaaatccttatactgcacttattccttcaaataagttttgttcgttcaacttatggatttaacgtggcagtgcaccattggaacagaatgacaatccataagccatgcaacttaacaatttaagccattccagtccatcccgagccagtgaatcttccaccacttaagacaaatagtagaacatgaaatatattaagctgcaagtctgaacttgccttttctttctggaaaagagggcagtaataggcaagttttaaaagaatttccttaagagagataactagttttcatttatttaacttttgcaggttggtgattttgctcattatggtcgtggagtgctgattgattcacagtagataaagctggcagtaagaaatgctaagagttgttgaagcagaaggcggctgattgtcaataagtcactacagttgcataagcagtgctgtcagaattggtttggtgcaggcaatagattttgccttcaggggttcctgtggatctgaggaaggcatcagtgttgattaacactcataactagggagtgactggtagttacttaaagcaagtaattgaccaaatggaaaaggggaagtaattaaggaaattggtaagtggaggtagtcaggaagttcttgtggttcttcacatagattttacagctttggctttcattttgtttagctaaagtcatggggacaactcttcaatttagaacttaagttgaattataaaaatgatggatataagtggtagctgtatctagtgaagtgtctgtcagtaagtgaaacattttttggtggtggcttatccacaaacagtttagttgtagaataaaacttatgagtgacatctggaaagtaaccatgctaagatggcaagcacactggaaacaattaggccacttggctttcttttgctgtattgttttataagcctactttacctcccagtcttggaaacaagttttagttttttattggtttggagactagagccaatagtataatgttctcaaaggaaacagacttgagttgttggattagaggaactaacccaacttatatgattttttttttgtttttgtcgtgtagttatggcactgtcttatttggaacatttgcaactagggataatacaacatttttaactctcatttgacaacctactactaatcacagaccacaagggtaatgaccaaatttatgtggtttttgcactccatagttgtcttagcccaatctttctatactcttacgattacttgggttaacgcttctgtgaggaccttctggctcttgagataccctaaatatttaagatatttagatatcttgaagatagtataggatatagagattgtaccaaataggaatataaggagtatgttaaaatgaccagatacctgtttgatagtttactgacctagcagatgtgtggaaaaggaatcagatcttgattcttctgggtttatactggttgtaaaacagaatgatacagaaaatgttttccttgtttaactggtagttgaacatagaacttgggtattatagatcacttttcactttttggaatgttttgtattgaaacttaataaaactttaacatggca

SEQ ID NO: 432190 - DNA, 3963 bp, Homo sapiens
aaaaaaacaaaacttttagtcatgtgttctaggtgattagataaatggaattagcactgaaaaaaatttaaaatatgaatgggaaattgtagaaaataaaattaggtgatctagcctccgtaatgtcatctttgaagtcagtctcattatttttcatagcctgaatgtaagttcacgttttaacttttttctctggctatgtttaaaaaaatgatatttttccttaagctcctgtatcacgtggaagagatagttatggaggtccacctcgaagggaaccgctgccctctcgtagagatgtttatttgtccccaagagatgatgggtattctactaaagacagctattcaagcagagattacccaagttctcgtgatactagagattatgcaccaccaccacgagattatacttaccgtgattatggtcattccagttcacgtgatgactatccatcaagaggatatagcgatagagatggatatggtcgtgatcgtgactattcagatcatccaagtggaggttcctacagagattcatatgagagttatggtaactcacgtagtgctccacctacacgagggcccccgccatcttatggtggaagcagtcgctatgatgattacagcagctcacgtgacggatatggtggaagtcgagacagttactcaagcagccgaagtgatctctactcaagtggtcgtgatcgggttggcagacaagaaagagggcttcccccttctatggaaagggggtaccctcctccacgtgattcctacagcagttcaagccgcggagcaccaagaggtggtggccgtggaggaagccgatctgatagagggggaggcagaagcagatactagaaacaaacaaaactttggaccaaaatcccagttcaaagaaacaaaaagtggaaactattctatcataactacccaaggactactaaaaggaaaaattgtgttactttttttaaattccctgttaagttcccctccataatttttatgttcttgtgaggaaaaaagtaaaacatgtttaattttatttgactttcgcattgcttttcaacaagcaaatgttaaatgtgttaagacttgtactagtgttgtaactttccaagtaaaagtatcccctaaaggccacttcctatctgatttttcccagcaaatgaggcaggcaattctaagatcttccacaaaacatctagccatctaaaatggagagatgaatcattctacctatacaaacaagctagctattagagggtggttggggtatgctactcataagatttcagggtgtcttccaactgaaatctcaatgttctcagtacgaaaaacctgaaatcacatgcctatgtaaggaaagtgctattcacccagtaaacccaaaaaagcaaatggataatgctggccattttgcctttctgacatttccttgggaatctgcaagaacctcccctttcccttcccccaataagaccatttaagtgtgtgttaaacaactacagaatactaaataaaaagtttggccaaaaccaaccatgaagctgcaaaggtgcttgctcttactgtttcaaatttttgcaactctgtagtgtctcacttttaaaggaacagcttgattgcaaaggagaaaatagataagcaatgaagttatctccaacttcctaaaggcttatgacttctaaaaagtgaatctatcagcattccacatcagatttaaagcatcaaatgcctgtgaaacagcaaagatggtaagcaaagcaaactagtttttccgtctaagtcgaaattgaacacttaccttcctcatagtacagtgaaacatactgtacctcaaggcaatggaaatgccttctagattaaaaaaaacttttggaaaaaagaaatattcaatagcgtattagaagtcctccaaattcaacacttggattttttttttttttttttaaagcatgtgtgacacttaaaggctttattaatagagctgttgtttaccaatggcgatctggggcttgggagggggtatttttttcaaagtccatttttgatgaagacctttaaacatgcttcgtatgtttttaacatttttttcaaattagtcttttagtcaatataggaaatggcttaagtttggggtccccctttttacccctgtaagccattgcaaacttgacatttagttggatgcctgacttgtttttagttctatgaaactacactgtatggagaaaatctattgcaagtggtctttaaaaagcaaaacctgaggcagcatgacccaggtccagccatgaagttgaaaaagatgctcttgaatatagtaaacttgaagacctccaactaaaaatccttatactgcacttattccttcaaataagttttgttcgttcaacttatggatttaacgtggcagtgcaccattggaacagaatgacaatccataagccatgcaacttaacaatttaagccattccagtccatcccgagccagtgaatcttccaccacttaagacaaatagtagaacatgaaatatattaagctgcaagtctgaacttgccttttctttctggaaaagagggcagtaataggcaagttttaaaagaatttccttaagagagataactagttttcatttatttaacttttgcaggttggtgattttgctcattatggtcgtggagtgctgattgattcacagtagataaagctggcagtaagaaatgctaagagttgttgaagcagaaggcggctgattgtcaataagtcactacagttgcataagcagtgctgtcagaattggtttggtgcaggcaatagattttgccttcaggggttcctgtggatctgaggaaggcatcagtgttgattaacactcataactagggagtgactggtagttacttaaagcaagtaattgaccaaatggaaaaggggaagtaattaaggaaattggtaagtggaggtagtcaggaagttcttgtggttcttcacatagattttacagctttggctttcattttgtttagctaaagtcatggggacaactcttcaatttagaacttaagttgaattataaaaatgatggatataagtggtagctgtatctagtgaagtgtctgtcagtaagtgaaacattttttggtggtggcttatccacaaacagtttagttgtagaataaaacttatgagtgacatctggaaagtaaccatgctaagatggcaagcacactggaaacaattaggccacttggctttcttttgctgtattgttttataagcctactttacctcccagtcttggaaacaagttttagttttttattggtttggagactagagccaatagtataatgttctcaaaggaaacagacttgagttgttggattagaggaactaacccaacttatatgattttttttttgtttttgtcgtgtagttatggcactgtcttatttggaacatttgcaactagggataatacaacatttttaactctcatttgacaacctactactaatcacagaccacaagggtaatgaccaaatttatgtggtttttgcactccatagttgtcttagcccaatctttctatactcttacgattacttgggttaacgcttctgtgaggaccttctggctcttgagataccctaaatatttaagatatttagatatcttgaagatagtataggatatagagattgtaccaaataggaatataaggagtatgttaaaatgaccagatacctgtttgatagtttactgacctagcagatgtgtggaaaaggaatcagatcttgattcttctgggtttatactggttgtaaaacagaatgatacagaaaatgttttccttgtttaactggtagttgaacatagaacttgggtattatagatcacttttcactttttggaatgttttgtattgaaacttaataaaactttaacatggca

SEQ ID NO: 432191 - DNA, 3677 bp, Homo sapiens
cggttgcgacgactgcttgggccccccaagagatgatgggtattctactaaagacagctattcaagcagagattacccaagttctcgtgatactagagattatgcaccaccaccacgagattatacttaccgtgattatggtcattccagttcacgtgatgactatccatcaagaggatatagcgatagagatggatatggtcgtgatcgtgactattcagatcatccaagtggaggttcctacagagattcatatgagagttatggtaactcacgtagtgctccacctacacgagggcccccgccatcttatggtggaagcagtcgctatgatgattacagcagctcacgtgacggatatggtggaagtcgagacagttactcaagcagccgaagtgatctctactcaagtggtcgtgatcgggttggcagacaagaaagagggcttcccccttctatggaaagggggtaccctcctccacgtgattcctacagcagttcaagccgcggagcaccaagaggtggtggccgtggaggaagccgatctgatagagggggaggcagaagcagatactagaaacaaacaaaactttggaccaaaatcccagttcaaagaaacaaaaagtggaaactattctatcataactacccaaggactactaaaaggaaaaattgtgttactttttttaaattccctgttaagttcccctccataatttttatgttcttgtgaggaaaaaagtaaaacatgtttaattttatttgactttcgcattgcttttcaacaagcaaatgttaaatgtgttaagacttgtactagtgttgtaactttccaagtaaaagtatcccctaaaggccacttcctatctgatttttcccagcaaatgaggcaggcaattctaagatcttccacaaaacatctagccatctaaaatggagagatgaatcattctacctatacaaacaagctagctattagagggtggttggggtatgctactcataagatttcagggtgtcttccaactgaaatctcaatgttctcagtacgaaaaacctgaaatcacatgcctatgtaaggaaagtgctattcacccagtaaacccaaaaaagcaaatggataatgctggccattttgcctttctgacatttccttgggaatctgcaagaacctcccctttcccttcccccaataagaccatttaagtgtgtgttaaacaactacagaatactaaataaaaagtttggccaaaaccaaccatgaagctgcaaaggtgcttgctcttactgtttcaaatttttgcaactctgtagtgtctcacttttaaaggaacagcttgattgcaaaggagaaaatagataagcaatgaagttatctccaacttcctaaaggcttatgacttctaaaaagtgaatctatcagcattccacatcagatttaaagcatcaaatgcctgtgaaacagcaaagatggtaagcaaagcaaactagtttttccgtctaagtcgaaattgaacacttaccttcctcatagtacagtgaaacatactgtacctcaaggcaatggaaatgccttctagattaaaaaaaacttttggaaaaaagaaatattcaatagcgtattagaagtcctccaaattcaacacttggattttttttttttttttttaaagcatgtgtgacacttaaaggctttattaatagagctgttgtttaccaatggcgatctggggcttgggagggggtatttttttcaaagtccatttttgatgaagacctttaaacatgcttcgtatgtttttaacatttttttcaaattagtcttttagtcaatataggaaatggcttaagtttggggtccccctttttacccctgtaagccattgcaaacttgacatttagttggatgcctgacttgtttttagttctatgaaactacactgtatggagaaaatctattgcaagtggtctttaaaaagcaaaacctgaggcagcatgacccaggtccagccatgaagttgaaaaagatgctcttgaatatagtaaacttgaagacctccaactaaaaatccttatactgcacttattccttcaaataagttttgttcgttcaacttatggatttaacgtggcagtgcaccattggaacagaatgacaatccataagccatgcaacttaacaatttaagccattccagtccatcccgagccagtgaatcttccaccacttaagacaaatagtagaacatgaaatatattaagctgcaagtctgaacttgccttttctttctggaaaagagggcagtaataggcaagttttaaaagaatttccttaagagagataactagttttcatttatttaacttttgcaggttggtgattttgctcattatggtcgtggagtgctgattgattcacagtagataaagctggcagtaagaaatgctaagagttgttgaagcagaaggcggctgattgtcaataagtcactacagttgcataagcagtgctgtcagaattggtttggtgcaggcaatagattttgccttcaggggttcctgtggatctgaggaaggcatcagtgttgattaacactcataactagggagtgactggtagttacttaaagcaagtaattgaccaaatggaaaaggggaagtaattaaggaaattggtaagtggaggtagtcaggaagttcttgtggttcttcacatagattttacagctttggctttcattttgtttagctaaagtcatggggacaactcttcaatttagaacttaagttgaattataaaaatgatggatataagtggtagctgtatctagtgaagtgtctgtcagtaagtgaaacattttttggtggtggcttatccacaaacagtttagttgtagaataaaacttatgagtgacatctggaaagtaaccatgctaagatggcaagcacactggaaacaattaggccacttggctttcttttgctgtattgttttataagcctactttacctcccagtcttggaaacaagttttagttttttattggtttggagactagagccaatagtataatgttctcaaaggaaacagacttgagttgttggattagaggaactaacccaacttatatgattttttttttgtttttgtcgtgtagttatggcactgtcttatttggaacatttgcaactagggataatacaacatttttaactctcatttgacaacctactactaatcacagaccacaagggtaatgaccaaatttatgtggtttttgcactccatagttgtcttagcccaatctttctatactcttacgattacttgggttaacgcttctgtgaggaccttctggctcttgagataccctaaatatttaagatatttagatatcttgaagatagtataggatatagagattgtaccaaataggaatataaggagtatgttaaaatgaccagatacctgtttgatagtttactgacctagcagatgtgtggaaaaggaatcagatcttgattcttctgggtttatactggttgtaaaacagaatgatacagaaaatgttttccttgtttaactggtagttgaacatagaacttgggtattatagatcacttttcactttttggaatgttttgtattgaaacttaataaaactttaacatggca

SEQ ID NO: 432192 - DNA, 1114 bp, Homo sapiens
ggtccttcagcctcgttcccgggcagtataaagtttgctgtctcctttgttcgccctcggttgcgcagtagtgctagcggcttcgcggttcggtcctcgcacccggcagccgccactggtgctgagctgctaggaagcccctatcgccgagctcgttggagcttgaacccattgtcacccctccgactcaccggcccaaaaaaaaaaaaaaatggttgaagcagatcgcccaggaaagctcttcattggtgggcttaatacggaaacaaatgagaaagctcttgaagcagtatttggcaaatatggacgaatagtggaagtactcttgatgaaagaccgtgaaaccaacaaatcaagaggatttgcttttgtcacctttgaaagcccagcagacgctaaggatgcagccagagacatgaatggaaagtcattagatggaaaagccatcaaggtggaacaagccaccaaaccatcatttgaaagtggtagacgtggaccgcctccacctccaagaagtagaggccctccaagaggtcttagaggtggaagaggaggaagtggaggaaccaggggacctccctcacggggaggacacatggatgacggtggatattccatgaattttaacatgagttcttccaggggaccactcccagtaaaaagaggaccaccaccaagaagtgggggtcctcctcctaagagatctgcaccttcaggaccagttcgcagtagcagtggaatgggaggaagaggtaaatgttccatgtatgatgatttatgctactaccgtaacacaaagaattgagaggtgaatgatgcttaaaattttaattggccaggcgtggtggctcacgcccgtaatcctagcactttgggaggccgcggcagacggatcacggtgtcaagagatcaagaccatcctggccaatgtggtgaaaccccgtctctactaaaaaatacaaaaattagctgagtgtagggcgggttcctgtaatccccgctacttgggaggccgaggcaggagaattgtttgaacctgggaggcagaggttgcagggaaccgagatcatgccactgtcctccagcgtggcaacagagtgagattctgtctcca

SEQ ID NO: 432193 - DNA, 3099 bp, Homo sapiens
gggctgcccagaggattacggcagaacacattcaaagaaacaaaaagtggaaactattctatcataactacccaaggactactaaaaggaaaaattgtgttactttttttaaattccctgttaagttcccctccataatttttatgttcttgtgaggaaaaaagtaaaacatgtttaattttatttgactttcgcattgcttttcaacaagcaaatgttaaatgtgttaagacttgtactagtgttgtaactttccaagtaaaagtatcccctaaaggccacttcctatctgatttttcccagcaaatgaggcaggcaattctaagatcttccacaaaacatctagccatctaaaatggagagatgaatcattctacctatacaaacaagctagctattagagggtggttggggtatgctactcataagatttcagggtgtcttccaactgaaatctcaatgttctcagtacgaaaaacctgaaatcacatgcctatgtaaggaaagtgctattcacccagtaaacccaaaaaagcaaatggataatgctggccattttgcctttctgacatttccttgggaatctgcaagaacctcccctttcccttcccccaataagaccatttaagtgtgtgttaaacaactacagaatactaaataaaaagtttggccaaaaccaaccatgaagctgcaaaggtgcttgctcttactgtttcaaatttttgcaactctgtagtgtctcacttttaaaggaacagcttgattgcaaaggagaaaatagataagcaatgaagttatctccaacttcctaaaggcttatgacttctaaaaagtgaatctatcagcattccacatcagatttaaagcatcaaatgcctgtgaaacagcaaagatggtaagcaaagcaaactagtttttccgtctaagtcgaaattgaacacttaccttcctcatagtacagtgaaacatactgtacctcaaggcaatggaaatgccttctagattaaaaaaaacttttggaaaaaagaaatattcaatagcgtattagaagtcctccaaattcaacacttggattttttttttttttttttaaagcatgtgtgacacttaaaggctttattaatagagctgttgtttaccaatggcgatctggggcttgggagggggtatttttttcaaagtccatttttgatgaagacctttaaacatgcttcgtatgtttttaacatttttttcaaattagtcttttagtcaatataggaaatggcttaagtttggggtccccctttttacccctgtaagccattgcaaacttgacatttagttggatgcctgacttgtttttagttctatgaaactacactgtatggagaaaatctattgcaagtggtctttaaaaagcaaaacctgaggcagcatgacccaggtccagccatgaagttgaaaaagatgctcttgaatatagtaaacttgaagacctccaactaaaaatccttatactgcacttattccttcaaataagttttgttcgttcaacttatggatttaacgtggcagtgcaccattggaacagaatgacaatccataagccatgcaacttaacaatttaagccattccagtccatcccgagccagtgaatcttccaccacttaagacaaatagtagaacatgaaatatattaagctgcaagtctgaacttgccttttctttctggaaaagagggcagtaataggcaagttttaaaagaatttccttaagagagataactagttttcatttatttaacttttgcaggttggtgattttgctcattatggtcgtggagtgctgattgattcacagtagataaagctggcagtaagaaatgctaagagttgttgaagcagaaggcggctgattgtcaataagtcactacagttgcataagcagtgctgtcagaattggtttggtgcaggcaatagattttgccttcaggggttcctgtggatctgaggaaggcatcagtgttgattaacactcataactagggagtgactggtagttacttaaagcaagtaattgaccaaatggaaaaggggaagtaattaaggaaattggtaagtggaggtagtcaggaagttcttgtggttcttcacatagattttacagctttggctttcattttgtttagctaaagtcatggggacaactcttcaatttagaacttaagttgaattataaaaatgatggatataagtggtagctgtatctagtgaagtgtctgtcagtaagtgaaacattttttggtggtggcttatccacaaacagtttagttgtagaataaaacttatgagtgacatctggaaagtaaccatgctaagatggcaagcacactggaaacaattaggccacttggctttcttttgctgtattgttttataagcctactttacctcccagtcttggaaacaagttttagttttttattggtttggagactagagccaatagtataatgttctcaaaggaaacagacttgagttgttggattagaggaactaacccaacttatatgattttttttttgtttttgtcgtgtagttatggcactgtcttatttggaacatttgcaactagggataatacaacatttttaactctcatttgacaacctactactaatcacagaccacaagggtaatgaccaaatttatgtggtttttgcactccatagttgtcttagcccaatctttctatactcttacgattacttgggttaacgcttctgtgaggaccttctggctcttgagataccctaaatatttaagatatttagatatcttgaagatagtataggatatagagattgtaccaaataggaatataaggagtatgttaaaatgaccagatacctgtttgatagtttactgacctagcagatgtgtggaaaaggaatcagatcttgattcttctgggtttatactggttgtaaaacagaatgatacagaaaatgttttccttgtttaactggtagttgaacatagaacttgggtattatagatcacttttcactttttggaatgttttgtattgaaacttaataaaactttaacatggca

SEQ ID NO: 432194 - DNA, 3177 bp, Homo sapiens
gggcttaagcgatcctcttagcctcccaaagtgctgggattacaggtgtgaaccactgtgcccagcctccatttttttccagttgaagaaactaaggcttaaagaggcttaaataatttgtccaaggattcacatttaactaagtagttaggattgcactcagatttgtcctactctagaggccaaaccctttagacactatactataacagctcttagaactagagaagttggcaagagcaggttttatgtttaattttatttgactttcgcattgcttttcaacaagcaaatgttaaatgtgttaagacttgtactagtgttgtaactttccaagtaaaagtatcccctaaaggccacttcctatctgatttttcccagcaaatgaggcaggcaattctaagatcttccacaaaacatctagccatctaaaatggagagatgaatcattctacctatacaaacaagctagctattagagggtggttggggtatgctactcataagatttcagggtgtcttccaactgaaatctcaatgttctcagtacgaaaaacctgaaatcacatgcctatgtaaggaaagtgctattcacccagtaaacccaaaaaagcaaatggataatgctggccattttgcctttctgacatttccttgggaatctgcaagaacctcccctttcccttcccccaataagaccatttaagtgtgtgttaaacaactacagaatactaaataaaaagtttggccaaaaccaaccatgaagctgcaaaggtgcttgctcttactgtttcaaatttttgcaactctgtagtgtctcacttttaaaggaacagcttgattgcaaaggagaaaatagataagcaatgaagttatctccaacttcctaaaggcttatgacttctaaaaagtgaatctatcagcattccacatcagatttaaagcatcaaatgcctgtgaaacagcaaagatggtaagcaaagcaaactagtttttccgtctaagtcgaaattgaacacttaccttcctcatagtacagtgaaacatactgtacctcaaggcaatggaaatgccttctagattaaaaaaaacttttggaaaaaagaaatattcaatagcgtattagaagtcctccaaattcaacacttggattttttttttttttttttaaagcatgtgtgacacttaaaggctttattaatagagctgttgtttaccaatggcgatctggggcttgggagggggtatttttttcaaagtccatttttgatgaagacctttaaacatgcttcgtatgtttttaacatttttttcaaattagtcttttagtcaatataggaaatggcttaagtttggggtccccctttttacccctgtaagccattgcaaacttgacatttagttggatgcctgacttgtttttagttctatgaaactacactgtatggagaaaatctattgcaagtggtctttaaaaagcaaaacctgaggcagcatgacccaggtccagccatgaagttgaaaaagatgctcttgaatatagtaaacttgaagacctccaactaaaaatccttatactgcacttattccttcaaataagttttgttcgttcaacttatggatttaacgtggcagtgcaccattggaacagaatgacaatccataagccatgcaacttaacaatttaagccattccagtccatcccgagccagtgaatcttccaccacttaagacaaatagtagaacatgaaatatattaagctgcaagtctgaacttgccttttctttctggaaaagagggcagtaataggcaagttttaaaagaatttccttaagagagataactagttttcatttatttaacttttgcaggttggtgattttgctcattatggtcgtggagtgctgattgattcacagtagataaagctggcagtaagaaatgctaagagttgttgaagcagaaggcggctgattgtcaataagtcactacagttgcataagcagtgctgtcagaattggtttggtgcaggcaatagattttgccttcaggggttcctgtggatctgaggaaggcatcagtgttgattaacactcataactagggagtgactggtagttacttaaagcaagtaattgaccaaatggaaaaggggaagtaattaaggaaattggtaagtggaggtagtcaggaagttcttgtggttcttcacatagattttacagctttggctttcattttgtttagctaaagtcatggggacaactcttcaatttagaacttaagttgaattataaaaatgatggatataagtggtagctgtatctagtgaagtgtctgtcagtaagtgaaacattttttggtggtggcttatccacaaacagtttagttgtagaataaaacttatgagtgacatctggaaagtaaccatgctaagatggcaagcacactggaaacaattaggccacttggctttcttttgctgtattgttttataagcctactttacctcccagtcttggaaacaagttttagttttttattggtttggagactagagccaatagtataatgttctcaaaggaaacagacttgagttgttggattagaggaactaacccaacttatatgattttttttttgtttttgtcgtgtagttatggcactgtcttatttggaacatttgcaactagggataatacaacatttttaactctcatttgacaacctactactaatcacagaccacaagggtaatgaccaaatttatgtggtttttgcactccatagttgtcttagcccaatctttctatactcttacgattacttgggttaacgcttctgtgaggaccttctggctcttgagataccctaaatatttaagatatttagatatcttgaagatagtataggatatagagattgtaccaaataggaatataaggagtatgttaaaatgaccagatacctgtttgatagtttactgacctagcagatgtgtggaaaaggaatcagatcttgattcttctgggtttatactggttgtaaaacagaatgatacagaaaatgttttccttgtttaactggtagttgaacatagaacttgggtattatagatcacttttcactttttggaatgttttgtattgaaacttaataaaactttaacatggca

SEQ ID NO: 432195 - DNA, 2510 bp, Homo sapiens
cggacgctagttctagatcgcgagcggccgctcgctagaactagaaacaaacaactacagaatactaaataaaaagtttggccaaaaccaaccatgaagctgcaaaggtgcttgctcttactgtttcaaatttttgcaactctgtagtgtctcacttttaaaggaacagcttgattgcaaaggagaaaatagataagcaatgaagttatctccaacttcctaaaggcttatgacttctaaaaagtgaatctatcagcattccacatcagatttaaagcatcaaatgcctgtgaaacagcaaagatggtaagcaaagcaaactagtttttccgtctaagtcgaaattgaacacttaccttcctcatagtacagtgaaacatactgtacctcaaggcaatggaaatgccttctagattaaaaaaaacttttggaaaaaagaaatattcaatagcgtattagaagtcctccaaattcaacacttggattttttttttttttttttaaagcatgtgtgacacttaaaggctttattaatagagctgttgtttaccaatggcgatctggggcttgggagggggtatttttttcaaagtccatttttgatgaagacctttaaacatgcttcgtatgtttttaacatttttttcaaattagtcttttagtcaatataggaaatggcttaagtttggggtccccctttttacccctgtaagccattgcaaacttgacatttagttggatgcctgacttgtttttagttctatgaaactacactgtatggagaaaatctattgcaagtggtctttaaaaagcaaaacctgaggcagcatgacccaggtccagccatgaagttgaaaaagatgctcttgaatatagtaaacttgaagacctccaactaaaaatccttatactgcacttattccttcaaataagttttgttcgttcaacttatggatttaacgtggcagtgcaccattggaacagaatgacaatccataagccatgcaacttaacaatttaagccattccagtccatcccgagccagtgaatcttccaccacttaagacaaatagtagaacatgaaatatattaagctgcaagtctgaacttgccttttctttctggaaaagagggcagtaataggcaagttttaaaagaatttccttaagagagataactagttttcatttatttaacttttgcaggttggtgattttgctcattatggtcgtggagtgctgattgattcacagtagataaagctggcagtaagaaatgctaagagttgttgaagcagaaggcggctgattgtcaataagtcactacagttgcataagcagtgctgtcagaattggtttggtgcaggcaatagattttgccttcaggggttcctgtggatctgaggaaggcatcagtgttgattaacactcataactagggagtgactggtagttacttaaagcaagtaattgaccaaatggaaaaggggaagtaattaaggaaattggtaagtggaggtagtcaggaagttcttgtggttcttcacatagattttacagctttggctttcattttgtttagctaaagtcatggggacaactcttcaatttagaacttaagttgaattataaaaatgatggatataagtggtagctgtatctagtgaagtgtctgtcagtaagtgaaacattttttggtggtggcttatccacaaacagtttagttgtagaataaaacttatgagtgacatctggaaagtaaccatgctaagatggcaagcacactggaaacaattaggccacttggctttcttttgctgtattgttttataagcctactttacctcccagtcttggaaacaagttttagttttttattggtttggagactagagccaatagtataatgttctcaaaggaaacagacttgagttgttggattagaggaactaacccaacttatatgattttttttttgtttttgtcgtgtagttatggcactgtcttatttggaacatttgcaactagggataatacaacatttttaactctcatttgacaacctactactaatcacagaccacaagggtaatgaccaaatttatgtggtttttgcactccatagttgtcttagcccaatctttctatactcttacgattacttgggttaacgcttctgtgaggaccttctggctcttgagataccctaaatatttaagatatttagatatcttgaagatagtataggatatagagattgtaccaaataggaatataaggagtatgttaaaatgaccagatacctgtttgatagtttactgacctagcagatgtgtggaaaaggaatcagatcttgattcttctgggtttatactggttgtaaaacagaatgatacagaaaatgttttccttgtttaactggtagttgaacatagaacttgggtattatagatcacttttcactttttggaatgttttgtattgaaacttaataaaactttaacatggca

SEQ ID NO: 432196 - DNA, 1072 bp, Homo sapiens
cccctacccccgagttctagcaattctcctgcctcagcctgctgagtagttgggatcgattgtgaaattggtaagtggaggtagtcaggaagttcttgtggttcttcacatagattttacagctttggctttcattttgtttagctaaagtcatggggacaactcttcaatttagaacttaagttgaattataaaaatgatggatataagtggtagctgtatctagtgaagtgtctgtcagtaagtgaaacattttttggtggtggcttatccacaaacagtttagttgtagaataaaacttatgagtgacatctggaaagtaaccatgctaagatggcaagcacactggaaacaattaggccacttggctttcttttgctgtattgttttataagcctactttacctcccagtcttggaaacaagttttagttttttattggtttggagactagagccaatagtataatgttctcaaaggaaacagacttgagttgttggattagaggaactaacccaacttatatgattttttttttgtttttgtcgtgtagttatggcactgtcttatttggaacatttgcaactagggataatacaacatttttaactctcatttgacaacctactactaatcacagaccacaagggtaatgaccaaatttatgtggtttttgcactccatagttgtcttagcccaatctttctatactcttacgattacttgggttaacgcttctgtgaggaccttctggctcttgagataccctaaatatttaagatatttagatatcttgaagatagtataggatatagagattgtaccaaataggaatataaggagtatgttaaaatgaccagatacctgtttgatagtttactgacctagcagatgtgtggaaaaggaatcagatcttgattcttctgggtttatactggttgtaaaacagaatgatacagaaaatgttttccttgtttaactggtagttgaacatagaacttgggtattatagatcacttttcactttttggaatgttttgtattgaaacttaataaaactttaacatggca

SEQ ID NO: 432197 - DNA, 5438 bp, Homo sapiens
  misc_feature (1811)..(1811): n is a, c, g, or t
cttcaggcccagctgaaagaactgcagagagagaatgacctcctccggaaagagctagacatcaaggacagcaaattgggatcttccatgaacagtattaagactttctggagtcctgagcttaagaaggagagagtcttgaggaaagaagaggcagcgcggatgtctgtcctcaaggagcagatgagggtttcccatgaagaaaatcagcacctacagttgacaatccaggcccttcaagatgagctgcgaacccagagagacctcaaccacctcctccagcaagagagtggcaaccgaggagcggagcacttcaccatcgagctgaccgaggagaactttaggcggctccaagccgagcatgacaggcaggctaaggagctgttccttttgaggaagacattagaggaaatggagctgagaattgaaacgcagaaacaaaccctcaatgcccgagatgagtcaattaaaaaacttcttgagatgttgcaaagtaaaggcttgccatccaaaagcctggaggatgacaatgagcgaacgcggcggatggcagaggctgagtctcaggtcagccacttggaagtgattttagatcagaaagagaaggaaaacatacatcttagagaggaattgcaccgaagaagccaacttcagccggagccagccaagacgaaggctctccagactgtcatcgaaatgaaggacacaaaaatcgcttcattggaacgaaacataagggatcttgaggatgagatccagatgttaaaagccaatggtgtgctgaacactgaggaccgcgaagaagagatcaaacaaattgaggtttacaaaagtcactccaagtttatgaagaccaagattgatcagctgaagcaggaactttcaaagaaagagtcggaacttcttgccttacaaacaaagcttgaaaccctcagcaatcaaaattcagattgcaagcaacacattgaagtgctcaaagagtcacttactgccaaagaacagagggctgccatccttcagactgaggtagatgcgctgagattacgactggaagaaaaagaatctttcctcaataaaaaaacaaaacagctacaggacctcacagaagagaaggggacactggccggtgaaattcgtgacatgaaagatatgttagaagtgaaggaaagaaaaatcaatgttcttcagaaaaagattgaaaacttgcaagaacaacttagggataaagacaagcaactgaccaacctgaaagacagagtgaagtccttgcagacggattccagtaatacagatactgcactggcgacgctagaggaagctctgtcagagaaggagagaataattgagcgcttgaaagaacagcgagaaagagatgatcgggaaagactagaagagatagaatccttccgaaaagagaacaaagacctgaaagagaaggtcaatgctttacaggctgaactgactgagaaagagtctagtttaattgacctcaaagaacatgcatcttcattagcctctgcggggctgaaaagggattccaaattaaaatctctagaaatagccattgaacaaaagaaagaggaatgtagcaaattggaagcacagttaaaaaaggcacataatattgaagatgactccaggatgaaccctgagtttgcagaccaaataaaacagctcgataaagaggcgtcttactaccgcgacgagtgtggcaaggcccaagcggaagtggaccggttgctggagatcctcaaggaggtggagaatgagaagaatgacaaggacaagaagatcgcagaactggagagttntctcaggcatatgaaagatcagaataagaaggtggccaacctcaagcacaatcaacagttggaaaagaagaaaaatgctcagttactagaagaagtgcgcaggcgagaagacagcatggctgacaactcacagcatttgcagatagaggaactgatgaatgcactggagaagaccagacaggaactggatgccaccaaagcacgcctcgcctccacacaacagtccctggccgaaaaagaagcgcacttggccaacctccggattgagaggaggaaacagctggaggagatcctggagatgaaacaggaagcactacttgcagccatcagtgaaaaagatgcaaacattgccttgctggaattgtctgcctccaaaaagaaaaagacgcaggaagaagtcatggccctcaagcgggaaaaagaccgactagtacatcaattaaagcagcagacccagaacagaatgaagttgatggcagacaactatgatgatgaccatcaccattaccaccaccaccaccatcaccaccaccatcgatctcctgggaggtcgcaacattccaatcacaggccctctccggaccaggatgacgaggagggcatatgggcatagccgggcctgtaaaccaaagttccagttttgttttgagggctattagaagggctgaataaagggaacatgcagctctgcagcaatattctgataatgtattgcagtgcggctcacatcactgtccaccaccacctggagcggctcatcagaactgaaggggagttttcacttaccttattgagcgtgattctgttctacttgatatttccttcaccacctcatgtcatttctcatggatttggttatgatggaaaggaagaatgcagaggaggagaaaagtgacagatcctccatttttgttgggatgcgggcattttgaatgtgatcatctttgctgaatgtcattatttgataacattttgtttatgttacttaaacatcattggataaatttgaactccatgggattttatctgtggattcagcttctgttggacaactagcctcatctccagtatcctgctggttcactctaattggtcattcctaatgcattagattatcaaaaagtataaattcgctgtgagtgagtggtgttggcagtgtttgtataccatgatgcatggagtgtttgacgaagaaacaaaaaacaccaaaaattgcgagcctttaccctcctctatttctttaatctgttgtttgaagaaccgcattttgagggtgtaaccagtagtcacctctgggccaggttggaaaagaaatcaattttttaaaccactaatgcttgccaagaaatcgccttatgagaacatggtgtgtgtctctgacaatgcgtggcacatctaaattgatcattcataattttatctacccagtcatgtactggagagtggcaaaagtctgaggcacctgcatatctctagtccctgtgttctgcacatccccacggtggggacgccaccaagcctcagactcttaccatcccggtgcatgcaggtctccatgaagaagctgggactcattcacatttcaagatccaaatgctgtgcaaacagtgtaagcttagattttctgtaaatgaagggtcatttctcttttttttttttttaaagaaaatgtgtctgcaacatggattccaaagcattttcagcatcaaacatgaaaacattgatgaatgaggaacaatcacaaaagctgtgtctctgtatatagctctacacaacatgtatgtggatacagtcattatttaaagcacatgccagggaaaaagaccaaattttgaggtcttttacatacagtgatatggtactaaggagaattaaactcctactgcttcctctgaatattaagaaacaatttaaattgttataacttcataaaactcatgactgagtctggcaaacatgtgcaactcttgtattgctccattttcttgtcaatggaagaaacccttccacgtgtatgcaagtgggagatgaaaacctgcatttttaaaggacaaacagtgaatttaagcatgagtggccttaataaatatagttgtctttctttgctgctgtggaaaggattctaaacagatgtccctgaagtcttgcattgaatttagtcattattattactttttaaaatgttggtgcaattaactctggacctctcttgtgagccatagagatatttaaaagacaaacaccttatttgtcggggaagatgaaaccgtccctgagttgcaccattctttcttggtgcattcgcggttaagatactcaagcaggtttcttgcttctggctttgttcttgtcatcagtaagtataacaaactatgtaatgcttatgtgttgcataaacaatccaaatgcattcatgttttaaaagtttgtcctttaactatcagagggatctaggtcttggttagagaagtaagcagagttctttgcaagcttatttagcacattttgacacaatgttgcactgaaaacccaggccacaaatgtgtcccagtgaacagtttggatgtcctcaaagaagtggttctcactgcctcctacaaccaggtcttgacctgaactctgcaactgaatacttgaagtaggaagtaggaaatccagtagggaaaatagggtccttgaaacagaaaaaaaaaaccaacccatgtatagctagctatttctatgtatgtgccaattttgtcacagctcttgtttggagggatcattttctgcccaactttcattggttaaaatattactgatcttacctttatgaggtcgtataatttagtcccttaaaaattaaattctctctaacataacaacctttcccatttcgtgtaatattctctgatgtttgggggttaccaaaaatatccctttttcacatattaagaatagtctctgggtttacaacaaacactgtgatgttgggaagctatttcctttgcgcaaactttaacaggttttcttctaatcataacatagttgaaaaaagaagtttgggctaacatttaggagaagttggtcttactttgtgcaaaagcaggcttgtgctttataccccatttgatttcgatgtacagtctcaattttgtatttaatgatttttgtgtatccagtatgcacgttaacagcgtgtcaactttcatttgaaagtgggtttcaatttactttttaaacagtgtttatgacgagacctcagatgtgttgacgtaagctctatctgcaatgtttttgtgtagagtggcgattgaatgctgcccagggtcagtgtatctaattccccgagaccctcgtttgatagtgcttcttgtaatatttcttcaagtgagtggcatgtgggttgtgatattgaccatgtgattatggacatcgatatgaaaaataaataaataaaactaaggaaccctggaaactaccagtgggcatgtattagccagtcattgtaacctcgtgtctagtagaacaatgtacaaggtatgtacagttcataaatttgttgtcatgtgtatgagaagtactttgtgctgatcgccttatttatattcatcaaataaaccttgtttctttctgaaaaaaaaaaat

SEQ ID NO: 432198 - DNA, 3610 bp, Homo sapiens
  misc_feature (25)..(25): n is a, c, g, or t
  misc_feature (51)..(51): n is a, c, g, or t
  misc_feature (137)..(137): n is a, c, g, or t
  misc_feature (210)..(210): n is a, c, g, or t
  misc_feature (238)..(238): n is a, c, g, or t
  misc_feature (251)..(251): n is a, c, g, or t
gaaaacccttagagcagtttccaantgggatttatgtaagagaatgggaantgtgaccaattatctagaggctcacatttctttgtacatatattatatttgagattaatggcacttaaagtccatccgtagaaatntttgtaggtatttgcaaagtactatcagcattttcaatcatatgtgggtttattaaaatgttattctcaggtnccaccagaacaacagaacattcattganggctggtttgagnggaggaaacagctggaggaggatcctggagatgaaacaggaagcactacttgcagccatcagtgaaaaagatgcaaacattgccttgctggaattgtctgcctccaaaaagaaaaagacgcaggaagaagtcatggccctcaagcgggaaaaagaccgactagtacatcaattaaagcagcagacccagaacagaatgaagttgatggcagacaactatgatgatgaccatcaccattaccaccaccaccaccatcaccaccaccatcgatctcctgggaggtcgcaacattccaatcacaggccctctccggaccaggatgacgaggagggcatatgggcatagccgggcctgtaaaccaaagttccagttttgttttgagggctattagaagggctgaataaagggaacatgcagctctgcagcaatattctgataatgtattgcagtgcggctcacatcactgtccaccaccacctggagcggctcatcagaactgaaggggagttttcacttaccttattgagcgtgattctgttctacttgatatttccttcaccacctcatgtcatttctcatggatttggttatgatggaaaggaagaatgcagaggaggagaaaagtgacagatcctccatttttgttgggatgcgggcattttgaatgtgatcatctttgctgaatgtcattatttgataacattttgtttatgttacttaaacatcattggataaatttgaactccatgggattttatctgtggattcagcttctgttggacaactagcctcatctccagtatcctgctggttcactctaattggtcattcctaatgcattagattatcaaaaagtataaattcgctgtgagtgagtggtgttggcagtgtttgtataccatgatgcatggagtgtttgacgaagaaacaaaaaacaccaaaaattgcgagcctttaccctcctctatttctttaatctgttgtttgaagaaccgcattttgagggtgtaaccagtagtcacctctgggccaggttggaaaagaaatcaattttttaaaccactaatgcttgccaagaaatcgccttatgagaacatggtgtgtgtctctgacaatgcgtggcacatctaaattgatcattcataattttatctacccagtcatgtactggagagtggcaaaagtctgaggcacctgcatatctctagtccctgtgttctgcacatccccacggtggggacgccaccaagcctcagactcttaccatcccggtgcatgcaggtctccatgaagaagctgggactcattcacatttcaagatccaaatgctgtgcaaacagtgtaagcttagattttctgtaaatgaagggtcatttctcttttttttttttttaaagaaaatgtgtctgcaacatggattccaaagcattttcagcatcaaacatgaaaacattgatgaatgaggaacaatcacaaaagctgtgtctctgtatatagctctacacaacatgtatgtggatacagtcattatttaaagcacatgccagggaaaaagaccaaattttgaggtcttttacatacagtgatatggtactaaggagaattaaactcctactgcttcctctgaatattaagaaacaatttaaattgttataacttcataaaactcatgactgagtctggcaaacatgtgcaactcttgtattgctccattttcttgtcaatggaagaaacccttccacgtgtatgcaagtgggagatgaaaacctgcatttttaaaggacaaacagtgaatttaagcatgagtggccttaataaatatagttgtctttctttgctgctgtggaaaggattctaaacagatgtccctgaagtcttgcattgaatttagtcattattattactttttaaaatgttggtgcaattaactctggacctctcttgtgagccatagagatatttaaaagacaaacaccttatttgtcggggaagatgaaaccgtccctgagttgcaccattctttcttggtgcattcgcggttaagatactcaagcaggtttcttgcttctggctttgttcttgtcatcagtaagtataacaaactatgtaatgcttatgtgttgcataaacaatccaaatgcattcatgttttaaaagtttgtcctttaactatcagagggatctaggtcttggttagagaagtaagcagagttctttgcaagcttatttagcacattttgacacaatgttgcactgaaaacccaggccacaaatgtgtcccagtgaacagtttggatgtcctcaaagaagtggttctcactgcctcctacaaccaggtcttgacctgaactctgcaactgaatacttgaagtaggaagtaggaaatccagtagggaaaatagggtccttgaaacagaaaaaaaaaaccaacccatgtatagctagctatttctatgtatgtgccaattttgtcacagctcttgtttggagggatcattttctgcccaactttcattggttaaaatattactgatcttacctttatgaggtcgtataatttagtcccttaaaaattaaattctctctaacataacaacctttcccatttcgtgtaatattctctgatgtttgggggttaccaaaaatatccctttttcacatattaagaatagtctctgggtttacaacaaacactgtgatgttgggaagctatttcctttgcgcaaactttaacaggttttcttctaatcataacatagttgaaaaaagaagtttgggctaacatttaggagaagttggtcttactttgtgcaaaagcaggcttgtgctttataccccatttgatttcgatgtacagtctcaattttgtatttaatgatttttgtgtatccagtatgcacgttaacagcgtgtcaactttcatttgaaagtgggtttcaatttactttttaaacagtgtttatgacgagacctcagatgtgttgacgtaagctctatctgcaatgtttttgtgtagagtggcgattgaatgctgcccagggtcagtgtatctaattccccgagaccctcgtttgatagtgcttcttgtaatatttcttcaagtgagtggcatgtgggttgtgatattgaccatgtgattatggacatcgatatgaaaaataaataaataaaactaaggaaccctggaaactaccagtgggcatgtattagccagtcattgtaacctcgtgtctagtagaacaatgtacaaggtatgtacagttcataaatttgttgtcatgtgtatgagaagtactttgtgctgatcgccttatttatattcatcaaataaaccttgtttctttctgaaaaaaaaaaat

SEQ ID NO: 432199 - DNA, 5384 bp, Homo sapiens
  misc_feature (1811)..(1811): n is a, c, g, or t
cttcaggcccagctgaaagaactgcagagagagaatgacctcctccggaaagagctagacatcaaggacagcaaattgggatcttccatgaacagtattaagactttctggagtcctgagcttaagaaggagagagtcttgaggaaagaagaggcagcgcggatgtctgtcctcaaggagcagatgagggtttcccatgaagaaaatcagcacctacagttgacaatccaggcccttcaagatgagctgcgaacccagagagacctcaaccacctcctccagcaagagagtggcaaccgaggagcggagcacttcaccatcgagctgaccgaggagaactttaggcggctccaagccgagcatgacaggcaggctaaggagctgttccttttgaggaagacattagaggaaatggagctgagaattgaaacgcagaaacaaaccctcaatgcccgagatgagtcaattaaaaaacttcttgagatgttgcaaagtaaaggcttgccatccaaaagcctggaggatgacaatgagcgaacgcggcggatggcagaggctgagtctcaggtcagccacttggaagtgattttagatcagaaagagaaggaaaacatacatcttagagaggaattgcaccgaagaagccaacttcagccggagccagccaagacgaaggctctccagactgtcatcgaaatgaaggacacaaaaatcgcttcattggaacgaaacataagggatcttgaggatgagatccagatgttaaaagccaatggtgtgctgaacactgaggaccgcgaagaagagatcaaacaaattgaggtttacaaaagtcactccaagtttatgaagaccaagattgatcagctgaagcaggaactttcaaagaaagagtcggaacttcttgccttacaaacaaagcttgaaaccctcagcaatcaaaattcagattgcaagcaacacattgaagtgctcaaagagtcacttactgccaaagaacagagggctgccatccttcagactgaggtagatgcgctgagattacgactggaagaaaaagaatctttcctcaataaaaaaacaaaacagctacaggacctcacagaagagaaggggacactggccggtgaaattcgtgacatgaaagatatgttagaagtgaaggaaagaaaaatcaatgttcttcagaaaaagattgaaaacttgcaagaacaacttagggataaagacaagcaactgaccaacctgaaagacagagtgaagtccttgcagacggattccagtaatacagatactgcactggcgacgctagaggaagctctgtcagagaaggagagaataattgagcgcttgaaagaacagcgagaaagagatgatcgggaaagactagaagagatagaatccttccgaaaagagaacaaagacctgaaagagaaggtcaatgctttacaggctgaactgactgagaaagagtctagtttaattgacctcaaagaacatgcatcttcattagcctctgcggggctgaaaagggattccaaattaaaatctctagaaatagccattgaacaaaagaaagaggaatgtagcaaattggaagcacagttaaaaaaggcacataatattgaagatgactccaggatgaaccctgagtttgcagaccaaataaaacagctcgataaagaggcgtcttactaccgcgacgagtgtggcaaggcccaagcggaagtggaccggttgctggagatcctcaaggaggtggagaatgagaagaatgacaaggacaagaagatcgcagaactggagagttntctcaggcatatgaaagatcagaataagaaggtggccaacctcaagcacaatcaacagttggaaaagaagaaaaatgctcagttactagaagaagtgcgcaggcgagaagacagcatggctgacaactcacagcatttgcagatagaggaactgatgaatgcactggagaagaccagacaggaactggatgccaccaaagcacgcctcgcctccacacaacagtccctggccgaaaaagaagcgcacttggccaacctccggattgagaggaggaaacagctggaggagatcctggagatgaaacaggaagcactacttgcagccatcagtgaaaaagatgcaaacattgccttgctggaattgtctgcctccaaaaagaaaaagacgcaggaagaagtcatggccctcaagcgggaaaaagaccgactagtacatcaattaaagcagcagacccagaacagaatgaagttgatggcagacaactatgatgatgaccatcaccattaccaccaccaccaccatcaccaccaccatcgatctcctgggaggtcgcaacattccaatcacaggccctctccggaccaggatgacgaggagggcatatgggcatagccgggcctgtaaaccaaagttccagttttgttttgagggctattagaagggctgaataaagggaacatgcagctctgcagcaatattctgataatgtattgcagtgcggctcacatcactgtccaccaccacctggagcggctcatcagaactgaaggggagttttcacttaccttattgagcgtgattctgttctacttgatatttccttcaccacctcatgtcatttctcatggatttggttatgatggaaaggaagaatgcagaggaggagaaaagtgacagatcctccatttttgttgggatgcgggcattttgaatgtgatcatctttgctgaatgtcattatttgataacattttgtttatgttacttaaacatcattggataaatttgaactccatgggattttatctgtggattcagcttctgttggacaactagcctcatctccagtatcctgctggttcactctaattggtcattcctaatgcattagattatcaaaaagtataaattcgctgtgagtgagtggtgttggcagtgtttgtataccatgatgcatggagtgtttgacgaagaaacaaaaaacaccaaaaattgcgagcctttaccctcctctatttctttaatctgttgtttgaagaaccgcattttgagggtgtaaccagtagtcacctctgggccaggttggaaaagaaatcaattttttaaaccactaatgcttgccaagaaatcgccttatgagaacatggtgtgtgtctctgacaatgcgtggcacatctaaattgatcattcataattttatctacccagtcatgtactggagagtggcaaaagtctgaggcacctgcatatctctagtccctgtgttctgcacatccccacggtggggacgccaccaagcctcagactcttaccatcccggtgcatgcaggtctccatgaagaagctgggactcattcacatttcaagatccaaatgctgtgcaaacagtgtaagcttagattttctgtaaatgaagggtcatttctcttttttttttttttaaagaaaatgtgtctgcaacatggattccaaagcattttcagcatcaaacatgaaaacattgatgaatgaggaacaatcacaaaagctgtgtctctgtatatagctctacacaacatgtatgtggatacagtcattatttaaagcacatgccagggaaaaagaccaaattttgaggtcttttacatacagtgatatggtactaaggagaattaaactcctactgcttcctctgaatattaagaaacaatttaaattgttataacttcataaaactcatgactgagtctggcaaacatgtgcaactcttgtattgctccattttcttgtcaatggaagaaacccttccacgtgtatgcaagtgggagatgaaaacctgcatttttaaaggacaaacagtgaatttaagcatgagtggccttaataaatatagttgtctttctttgctgctgtggaaaggattctaaacagatgtccctgaagtcttgcattgaatttagtcattattattactttttaaaatgttggtgcaattaactctggacctctcttgtgagccatagagatatttaaaagacaaacaccttatttgtcggggaagatgaaaccgtccctgagttgcaccattctttcttggtgcattcgcggttaagatactcaagcaggtttcttgcttctggctttgttcttgtcatcagtaagtataacaaactatgtaatgcttatgtgttgcataaacaatccaaatgcattcatgttttaaaagtttgtcctttaactatcagagggatctaggtcttggttagagaagtaagcagagttctttgcaagcttatttagcacattttgacacaatgttgcactgaaaacccaggccacaaatgtgtcccagtgaacagtttggatgtcctcaaagaagtggttctcactgcctcctacaaccaggtcttgacctgaactctgcaactgaatacttgaagtaggaagtaggaaatccagtagggaaaatagggtccttgaaacagaaaaaaaaaaccaacccatgtatagctagctatttctatgtatgtgccaattttgtcacagctcttgtttggagggatcattttctgcccaactttcattggttaaaatattactgatcttacctttatgaggtcgtataatttagtcccttaaaaattaaattctctctaacataacaacctttcccatttcgtgtaatattctctgatgtttgggggttaccaaaaatatccctttttcacatattaagaatagtctctgggtttacaacaaacactgtgatgttgggaagctatttcctttgcgcaaactttaacaggttttcttctaatcataacatagttgaaaaaagaagtttgggctaacatttaggagaagttggtcttactttgtgctgtatttaatgatttttgtgtatccagtatgcacgttaacagcgtgtcaactttcatttgaaagtgggtttcaatttactttttaaacagtgtttatgacgagacctcagatgtgttgacgtaagctctatctgcaatgtttttgtgtagagtggcgattgaatgctgcccagggtcagtgtatctaattccccgagaccctcgtttgatagtgcttcttgtaatatttcttcaagtgagtggcatgtgggttgtgatattgaccatgtgattatggacatcgatatgaaaaataaataaataaaactaaggaaccctggaaactaccagtgggcatgtattagccagtcattgtaacctcgtgtctagtagaacaatgtacaaggtatgtacagttcataaatttgttgtcatgtgtatgagaagtactttgtgctgatcgccttatttatattcatcaaataaaccttgtttctttctgaaaaaaaaaaat

SEQ ID NO: 432200 - DNA, 5385 bp, Homo sapiens
  misc_feature (1811)..(1811): n is a, c, g, or t
cttcaggcccagctgaaagaactgcagagagagaatgacctcctccggaaagagctagacatcaaggacagcaaattgggatcttccatgaacagtattaagactttctggagtcctgagcttaagaaggagagagtcttgaggaaagaagaggcagcgcggatgtctgtcctcaaggagcagatgagggtttcccatgaagaaaatcagcacctacagttgacaatccaggcccttcaagatgagctgcgaacccagagagacctcaaccacctcctccagcaagagagtggcaaccgaggagcggagcacttcaccatcgagctgaccgaggagaactttaggcggctccaagccgagcatgacaggcaggctaaggagctgttccttttgaggaagacattagaggaaatggagctgagaattgaaacgcagaaacaaaccctcaatgcccgagatgagtcaattaaaaaacttcttgagatgttgcaaagtaaaggcttgccatccaaaagcctggaggatgacaatgagcgaacgcggcggatggcagaggctgagtctcaggtcagccacttggaagtgattttagatcagaaagagaaggaaaacatacatcttagagaggaattgcaccgaagaagccaacttcagccggagccagccaagacgaaggctctccagactgtcatcgaaatgaaggacacaaaaatcgcttcattggaacgaaacataagggatcttgaggatgagatccagatgttaaaagccaatggtgtgctgaacactgaggaccgcgaagaagagatcaaacaaattgaggtttacaaaagtcactccaagtttatgaagaccaagattgatcagctgaagcaggaactttcaaagaaagagtcggaacttcttgccttacaaacaaagcttgaaaccctcagcaatcaaaattcagattgcaagcaacacattgaagtgctcaaagagtcacttactgccaaagaacagagggctgccatccttcagactgaggtagatgcgctgagattacgactggaagaaaaagaatctttcctcaataaaaaaacaaaacagctacaggacctcacagaagagaaggggacactggccggtgaaattcgtgacatgaaagatatgttagaagtgaaggaaagaaaaatcaatgttcttcagaaaaagattgaaaacttgcaagaacaacttagggataaagacaagcaactgaccaacctgaaagacagagtgaagtccttgcagacggattccagtaatacagatactgcactggcgacgctagaggaagctctgtcagagaaggagagaataattgagcgcttgaaagaacagcgagaaagagatgatcgggaaagactagaagagatagaatccttccgaaaagagaacaaagacctgaaagagaaggtcaatgctttacaggctgaactgactgagaaagagtctagtttaattgacctcaaagaacatgcatcttcattagcctctgcggggctgaaaagggattccaaattaaaatctctagaaatagccattgaacaaaagaaagaggaatgtagcaaattggaagcacagttaaaaaaggcacataatattgaagatgactccaggatgaaccctgagtttgcagaccaaataaaacagctcgataaagaggcgtcttactaccgcgacgagtgtggcaaggcccaagcggaagtggaccggttgctggagatcctcaaggaggtggagaatgagaagaatgacaaggacaagaagatcgcagaactggagagttntctcaggcatatgaaagatcagaataagaaggtggccaacctcaagcacaatcaacagttggaaaagaagaaaaatgctcagttactagaagaagtgcgcaggcgagaagacagcatggctgacaactcacagcatttgcagatagaggaactgatgaatgcactggagaagaccagacaggaactggatgccaccaaagcacgcctcgcctccacacaacagtccctggccgaaaaagaagcgcacttggccaacctccggattgagaggaggaaacagctggaggagatcctggagatgaaacaggaagcactacttgcagccatcagtgaaaaagatgcaaacattgccttgctggaattgtctgcctccaaaaagaaaaagacgcaggaagaagtcatggccctcaagcgggaaaaagaccgactagtacatcaattaaagcagcagacccagaacagaatgaagttgatggcagacaactatgatgatgaccatcaccattaccaccaccaccaccatcaccaccaccatcgatctcctgggaggtcgcaacattccaatcacaggccctctccggaccaggatgacgaggagggcatatgggcatagccgggcctgtaaaccaaagttccagttttgttttgagggctattagaagggctgaataaagggaacatgcagctctgcagcaatattctgataatgtattgcagtgcggctcacatcactgtccaccaccacctggagcggctcatcagaactgaaggggagttttcacttaccttattgagcgtgattctgttctacttgatatttccttcaccacctcatgtcatttctcatggatttggttatgatggaaaggaagaatgcagaggaggagaaaagtgacagatcctccatttttgttgggatgcgggcattttgaatgtgatcatctttgctgaatgtcattatttgataacattttgtttatgttacttaaacatcattggataaatttgaactccatgggattttatctgtggattcagcttctgttggacaactagcctcatctccagtatcctgctggttcactctaattggtcattcctaatgcattagattatcaaaaagtataaattcgctgtgagtgagtggtgttggcagtgtttgtataccatgatgcatggagtgtttgacgaagaaacaaaaaacaccaaaaattgcgagcctttaccctcctctatttctttaatctgttgtttgaagaaccgcattttgagggtgtaaccagtagtcacctctgggccaggttggaaaagaaatcaattttttaaaccactaatgcttgccaagaaatcgccttatgagaacatggtgtgtgtctctgacaatgcgtggcacatctaaattgatcattcataattttatctacccagtcatgtactggagagtggcaaaagtctgaggcacctgcatatctctagtccctgtgttctgcacatccccacggtggggacgccaccaagcctcagactcttaccatcccggtgcatgcaggtctccatgaagaagctgggactcattcacatttcaagatccaaatgctgtgcaaacagtgtaagcttagattttctgtaaatgaagggtcatttctcttttttttttttttaaagaaaatgtgtctgcaacatggattccaaagcattttcagcatcaaacatgaaaacattgatgaatgaggaacaatcacaaaagctgtgtctctgtatatagctctacacaacatgtatgtggatacagtcattatttaaagcacatgccagggaaaaagaccaaattttgaggtcttttacatacagtgatatggtactaaggagaattaaactcctactgcttcctctgaatattaagaaacaatttaaattgttataacttcataaaactcatgactgagtctggcaaacatgtgcaactcttgtattgctccattttcttgtcaatggaagaaacccttccacgtgtatgcaagtgggagatgaaaacctgcatttttaaaggacaaacagtgaatttaagcatgagtggccttaataaatatagttgtctttctttgctgctgtggaaaggattctaaacagatgtccctgaagtcttgcattgaatttagtcattattattactttttaaaatgttggtgcaattaactctggacctctcttgtgagccatagagatatttaaaagacaaacaccttatttgtcggggaagatgaaaccgtccctgagttgcaccattctttcttggtgcattcgcggttaagatactcaagcaggtttcttgcttctggctttgttcttgtcatcagtaagtataacaaactatgtaatgcttatgtgttgcataaacaatccaaatgcattcatgttttaaaagtttgtcctttaactatcagagggatctaggtcttggttagagaagtaagcagagttctttgcaagcttatttagcacattttgacacaatgttgcactgaaaacccaggccacaaatgtgtcccagtgaacagtttggatgtcctcaaagaagtggttctcactgcctcctacaaccaggtcttgacctgaactctgcaactgaatacttgaagtaggaagtaggaaatccagtagggaaaatagggtccttgaaacagaaaaaaaaaaccaacccatgtatagctagctatttctatgtatgtgccaattttgtcacagctcttgtttggagggatcattttctgcccaactttcattggttaaaatattactgatcttacctttatgaggtcgtataatttagtcccttaaaaattaaattctctctaacataacaacctttcccatttcgtgtaatattctctgatgtttgggggttaccaaaaatatccctttttcacatattaagaatagtctctgggtttacaacaaacactgtgatgttgggaagctatttcctttgcgcaaactttaacaggttttcttctaatcataacatagttgaaaaaagaagtttgggctaacatttaggagaagttggtcttactttgtgcaaaagcaggcttgtgctttataccccatttgatttcgatgtacagtctcaattttgtatttaatgatttttgtgtatccagtatgcacgttaacagcgtgtcaactttcatttgaaagtgggtttcaatttactttttaaacagtgtttatgacgagacctcagatgtgttgacgtaagctctatctaattccccgagaccctcgtttgatagtgcttcttgtaatatttcttcaagtgagtggcatgtgggttgtgatattgaccatgtgattatggacatcgatatgaaaaataaataaataaaactaaggaaccctggaaactaccagtgggcatgtattagccagtcattgtaacctcgtgtctagtagaacaatgtacaaggtatgtacagttcataaatttgttgtcatgtgtatgagaagtactttgtgctgatcgccttatttatattcatcaaataaaccttgtttctttctgaaaaaaaaaaat

SEQ ID NO: 432201 - DNA, 1340 bp, Homo sapiens
gtcagctgactgttcggccgccaccgccgctgccgctgccgctgtcgctgtcgccgccgccgccgcccgccgccgccgccgccgccgccgccgctgccatggctcaatacaagggcgccgcgagcgaggccggccgcgccatgcacctgatgaagaagcgggagaagcagcgcgagcagatggagcagatgaagcagcgcatcgcggaggagaacatcatgaaatccaacattgacaagaagttctctgcgcactacgacgcggtggaggcagagctcaagtccagcaccgtgggtctcgtgaccctgaatgacatgaaggccaagcaggaggctctggtgaaggagcgggagaagcagctggccaagaaggagcagtccaaggagctgcagatgaagctggagaagcttcgagagaaggagcgtaagaaggaagccaagcggaagatctccagcctgtccttcaccctggaggaggaagaagagggaggcgaggaggaagaggaggcggccatgtatgaggaggagatggaaagggaagagatcaccacgaagaagagaaaactggggaagaacccagacgttgacacaagcttcttgcctgatcgagaccgtgaggaggaggagaatcggcttcgggaagagctgcggcaggagtgggaagccaagcaggagaagatcaagagtgaggagatcgagatcaccttcagctactgggatggctctgggcaccggcggacagtcaagatgagaaagggcaacaccatgcagcagttcctgcagaaggcgctcgagatccttcggaaagacttcagtgagctgaggtccgcaggggtggagcagctcatgtacatcaaggaggacttgatcatccctcaccatcacagcttctacgacttcatcgtcaccaaggcacgggggaagagtggaccactcttcaactttgatgttcatgacgatgtgcggttgctcagtgacgccactgtggagaaggatgagtcccatgcaggcaaggtggtgctgaggagctggtacgagaagaacaagcacatctttcccgccagccgctgggaaccctacgaccctgaaaagaagtgggacaagtacacgatccgctgagcatccaggaggctgcgcggccccggctcctcagctccctcagtgtgccccgtggtgtcaccgggactccaggcacccgctcccctgcgaccatgccaggcacgctgggaggaggacggcagctgctcgtgtcctgcccctgccacatcagtgactgctttattcttttccaataaagaagtgcacgtgtcagagctggagcgcctgcattgtgagaaacca

SEQ ID NO: 432202 - DNA, 957 bp, Homo sapiens
  misc_feature (10)..(10): n is a, c, g, or t
  misc_feature (12)..(14): n is a, c, g, or t
  misc_feature (20)..(22): n is a, c, g, or t
  misc_feature (24)..(24): n is a, c, g, or t
  misc_feature (789)..(789): n is a, c, g, or t
tggctaggtngnnnctgggnnncngtgaggcctgcggtgcctggacggcttcccgccccgtttcttacctggaagctggagaagcttcgagagaaggagcgtaagaaggaagccaagcggaagatctccagcctgtccttcaccctggaggaggaagaagagggaggcgaggaggaagaggaggcggccatgtatgaggaggagatggaaagggaagagatcaccacgaagaagagaaaactggggaagaacccagacgttgacacaagcttcttgcctgatcgagaccgtgaggaggaggagaatcggcttcgggaagagctgcggcaggagtgggaagccaagcaggagaagatcaagagtgaggagatcgagatcaccttcagctactgggatggctctgggcaccggcggacagtcaagatgagaaagggcaacaccatgcagcagttcctgcagaaggcgctcgagatccttcggaaagacttcagtgagctgaggtccgcaggggtggagcagctcatgtacatcaaggaggacttgatcatccctcaccatcacagcttctacgacttcatcgtcaccaaggcacgggggaagagtggaccactcttcaactttgatgttcatgacgatgtgcggttgctcagtgacgccactgtggagaaggatgagtcccatgcaggcaaggtggtgctgaggagctggtacgagaagaacaagcacatctttcccgccagccgctgggaaccctacgaccctgaaaagaagtgggacaagtacacgatncgctgagcatcaggaggtgcgcggccggtctcagtcctcagtgtgccgggtgtccgggatccaggccgttcctggacttcagccctgggagggagaaggattgttctttttgcctgcaataggtggtttttccaaaaggtgttatgtggtgtttggaaaaaaacggtt

SEQ ID NO: 432203 - DNA, 1380 bp, Homo sapiens
cgaagccgattctcctcctcctcacggtctcgatcaggccagaagcttgtgtcaacgtctgggttcttccccagttttctcttcttcgtggtgatctcttccctttccatctcctcctcatacatggccgccgctgccatggctcaatacaagggcgccgcgagcgaggccggccgcgccatgcacctgatgaagaagcgggagaagcagcgcgagcagatggagcagatgaagcagcgcatcgcggaggagaacatcatgaaatccaacattgacaagaagttctctgcgcactacgacgcggtggaggcagagctcaagtccagcaccgtgggtctcgtgaccctgaatgacatgaaggccaagcaggaggctctggtgaaggagcgggagaagcagctggccaagaaggagcagtccaaggagctgcagatgaagctggagaagcttcgagagaaggagcgtaagaaggaagccaagcggaagatctccagcctgtccttcaccctggaggaggaagaagagggaggcgaggaggaagaggaggcggccatgtatgaggaggagatggaaagggaagagatcaccacgaagaagagaaaactggggaagaacccagacgttgacacaagcttcttgcctgatcgagaccgtgaggaggaggagaatcggcttcgggaagagctgcggcaggagtgggaagccaagcaggagaagatcaagagtgaggagatcgagatcaccttcagctactgggatggctctgggcaccggcggacagtcaagatgagaaagggcaacaccatgcagcagttcctgcagaaggcgctcgagatccttcggaaagacttcagtgagctgaggtccgcaggggtggagcagctcatgtacatcaaggaggacttgatcatccctcaccatcacagcttctacgacttcatcgtcaccaaggcacgggggaagagtggaccactcttcaactttgatgttcatgacgatgtgcggttgctcagtgacgccactgtggagaaggatgagtcccatgcaggcaaggtggtgctgaggagctggtacgagaagaacaagcacatctttcccgccagccgctgggaaccctacgaccctgaaaagaagtgggacaagtacacgatccgctgagcatccaggaggctgcgcggccccggctcctcagctccctcagtgtgccccgtggtgtcaccgggactccaggcacccgctcccctgcgaccatgccaggcacgctgggaggaggacggcagctgctcgtgtcctgcccctgccacatcagtgactgctttattcttttccaataaagaagtgcacgtgtcagagctggagcgcctgcattgtgagaaacca

SEQ ID NO: 432204 - DNA, 1582 bp, Homo sapiens
ccggggcaggcccctggctcgctgacttccagcagggcacacagaagcaagccagcgacagtctcatctgtgaaatgggcctggagccgggcgttctccgaggctgaggccactagctgatgaccggcctccggcaggagggagccgagccagtgtttctgttgggaggcacggcggggacgggcctctcgtcgcctcgcctgggcacccagcgtcctggctctggcccctcggccctcagagccaggcctctgccccctcggccctcagagccaggcctctgccctggtcctatggacaccgggcagggcggttcgtctccccctggagaggcggggaggcctgagccagacctggcaagtccactggccaggaggctccttccagaaccccttgcacctgtgaggcaggcacgaccctcccgggtgccagcggttcacccactgcttccgagaacatcatgaaatccaacattgacaagaagttctctgcgcactacgacgcggtggaggcagagctcaagtccagcaccgtgggtctcgtgaccctgaatgacatgaaggccaagcaggaggctctggtgaaggagcgggagaagcagctggccaagaaggagcagtccaaggagctgcagatgaagctggagaagcttcgagagaaggagcgtaagaaggaagccaagcggaagatctccagcctgtccttcaccctggaggaggaagaagagggaggcgaggaggaagaggaggcggccatgtatgaggaggagatggaaagggaagagatcaccacgaagaagagaaaactggggaagaacccagacgttgacacaagcttcttgcctgatcgagaccgtgaggaggaggagaatcggcttcgggaagagctgcggcaggagtgggaagccaagcaggagaagatcaagagtgaggagatcgagatcaccttcagctactgggatggctctgggcaccggcggacagtcaagatgagaaagggcaacaccatgcagcagttcctgcagaaggcgctcgagatccttcggaaagacttcagtgagctgaggtccgcaggggtggagcagctcatgtacatcaaggaggacttgatcatccctcaccatcacagcttctacgacttcatcgtcaccaaggcacgggggaagagtggaccactcttcaactttgatgttcatgacgatgtgcggttgctcagtgacgccactgtggagaaggatgagtcccatgcaggcaaggtggtgctgaggagctggtacgagaagaacaagcacatctttcccgccagccgctgggaaccctacgaccctgaaaagaagtgggacaagtacacgatccgctgagcatccaggaggctgcgcggccccggctcctcagctccctcagtgtgccccgtggtgtcaccgggactccaggcacccgctcccctgcgaccatgccaggcacgctgggaggaggacggcagctgctcgtgtcctgcccctgccacatcagtgactgctttattcttttccaataaagaagtgcacgtgtcagagctggagcgcctgcattgtgagaaacca

SEQ ID NO: 432205 - DNA, 1017 bp, Homo sapiens
  misc_feature (10)..(10): n is a, c, g, or t
  misc_feature (12)..(14): n is a, c, g, or t
  misc_feature (20)..(22): n is a, c, g, or t
  misc_feature (24)..(24): n is a, c, g, or t
tggctaggtngnnnctgggnnncngtgaggcctgcggtgcctggacggcttcccgccccgtttcttacctggaagctggagaagcttcgagagaaggagcgtaagaaggaagccaagcggaagatctccagcctgtccttcaccctggaggaggaagaagagggaggcgaggaggaagaggaggcggccatgtatgaggaggagatggaaagggaagagatcaccacgaagaagagaaaactggggaagaacccagacgttgacacaagcttcttgcctgatcgagaccgtgaggaggaggagaatcggcttcgggaagagctgcggcaggagtgggaagccaagcaggagaagatcaagagtgaggagatcgagatcaccttcagctactgggatggctctgggcaccggcggacagtcaagatgagaaagggcaacaccatgcagcagttcctgcagaaggcgctcgagatccttcggaaagacttcagtgagctgaggtccgcaggggtggagcagctcatgtacatcaaggaggacttgatcatccctcaccatcacagcttctacgacttcatcgtcaccaaggcacgggggaagagtggaccactcttcaactttgatgttcatgacgatgtgcggttgctcagtgacgccactgtggagaaggatgagtcccatgcaggcaaggtggtgctgaggagctggtacgagaagaacaagcacatctttcccgccagccgctgggaaccctacgaccctgaaaagaagtgggacaagtacacgatccgctgagcatccaggaggctgcgcggccccggctcctcagctccctcagtgtgccccgtggtgtcaccgggactccaggcacccgctcccctgcgaccatgccaggcacgctgggaggaggacggcagctgctcgtgtcctgcccctgccacatcagtgactgctttattcttttccaataaagaagtgcacgtgtcagagctggagcgcctgcattgtgagaaacca

SEQ ID NO: 432206 - DNA, 1378 bp, Homo sapiens
ttgcaccctgggggggaccctgtctccagctttgggacaggggtagcatctagcttgcgatttgcatttctctctcccgcctcctcgggtccacgctcacgtcttttcaccatggcggcttgtcttctttctgaccctctaaatgcagtgggccctttcccagcatccggtgcctgagcagcctgcgttctccccattgccagcctgtgcttggctctcccctgtggccctctgtgcttgctgtttgtaacagagccctcgcccatgagctcaaagtgatccaggacagcaggacccgtctggggcaatggggacccagcctgggctgggcaggccccacatagggcacacaggtggctctgggtcaaggaaggggctgggtcagggtcgggaaggacatgatgtgtgatggggccacctgcacctcactaggaagctggagaagcttcgagagaaggagcgtaagaaggaagccaagcggaagatctccagcctgtccttcaccctggaggaggaagaagagggaggcgaggaggaagaggaggcggccatgtatgaggaggagatggaaagggaagagatcaccacgaagaagagaaaactggggaagaacccagacgttgacacaagcttcttgcctgatcgagaccgtgaggaggaggagaatcggcttcgggaagagctgcggcaggagtgggaagccaagcaggagaagatcaagagtgaggagatcgagatcaccttcagctactgggatggctctgggcaccggcggacagtcaagatgagaaagggcaacaccatgcagcagttcctgcagaaggcgctcgagatccttcggaaagacttcagtgagctgaggtccgcaggggtggagcagctcatgtacatcaaggaggacttgatcatccctcaccatcacagcttctacgacttcatcgtcaccaaggcacgggggaagagtggaccactcttcaactttgatgttcatgacgatgtgcggttgctcagtgacgccactgtggagaaggatgagtcccatgcaggcaaggtggtgctgaggagctggtacgagaagaacaagcacatctttcccgccagccgctgggaaccctacgaccctgaaaagaagtgggacaagtacacgatccgctgagcatccaggaggctgcgcggccccggctcctcagctccctcagtgtgccccgtggtgtcaccgggactccaggcacccgctcccctgcgaccatgccaggcacgctgggaggaggacggcagctgctcgtgtcctgcccctgccacatcagtgactgctttattcttttccaataaagaagtgcacgtgtcagagctggagcgcctgcattgtgagaaacca

SEQ ID NO: 432207 - DNA, 780 bp, Homo sapiens
gcggccatgtatgaggaggagatggaaagggaagagatcaccacgaagaagagtgaggaggaggagaatcggcttcgggaagagctgcggcaggagtgggaagccaagcaggagaagatcaagagtgaggagatcgagatcaccttcagctactgggatggctctgggcaccggcggacagtcaagatgagaaagggcaacaccatgcagcagttcctgcagaaggcgctcgagatccttcggaaagacttcagtgagctgaggtccgcaggggtggagcagctcatgtacatcaaggaggacttgatcatccctcaccatcacagcttctacgacttcatcgtcaccaaggcacgggggaagagtggaccactcttcaactttgatgttcatgacgatgtgcggttgctcagtgacgccactgtggagaaggatgagtcccatgcaggcaaggtggtgctgaggagctggtacgagaagaacaagcacatctttcccgccagccgctgggaaccctacgaccctgaaaagaagtgggacaagtacacgatccgctgagcatccaggaggctgcgcggccccggctcctcagctccctcagtgtgccccgtggtgtcaccgggactccaggcacccgctcccctgcgaccatgccaggcacgctgggaggaggacggcagctgctcgtgtcctgcccctgccacatcagtgactgctttattcttttccaataaagaagtgcacgtgtcagagctggagcgcctgcattgtgagaaacca

SEQ ID NO: 432208 - DNA, 1487 bp, Homo sapiens
gtcagctgactgttcggccgccaccgccgctgccgctgccgctgtcgctgtcgccgccgccgccgcccgccgccgccgccgccgccgccgccgctgccatggctcaatacaagggcgccgcgagcgaggccggccgcgccatgcacctgatgaagaagcgggagaagcagcgcgagcagatggagcagatgaagcagcgcatcgcggaggagaacatcatgaaatccaacattgacaagaagttctctgcgcactacgacgcggtggaggcagagctcaagtccagcaccgtgggtctcgtgaccctgaatgacatgaaggccaagcaggaggctctggtgaaggagcgggagaagcagctggccaagaaggagcagtccaaggagctgcagatgaagctggagaagcttcgagagaaggagcgtaagaaggaagccaagcggaagatctccagcctgtccttcaccctggaggaggaagaagagggaggcgaggaggaagaggaggcggccatgtatgaggaggagatggaaagggaagagatcaccacgaagaagagaaaactggggaagaacccagacgttgacacaagcttcttgcctgatcgagaccgtgaggaggaggagaatcggcttcgggaagagctgcggcaggagtgggaagccaagcaggagaagatcaagagtgaggagatcgagatcaccttcagctactgggatggctctgggcaccggcggacagtcaagatgagaaagggcaacaccatgcagcagttcctgcagaaggcgctcgagatccttcggaaagacttcagtgagctgaggtccgcaggggtggagcagctcatgtacatcaaggaggacttgatcatccctcacgtgagtcccttcagccccagtacccgcagtgggtgcagcaccctgggctttggctcaggctggtgggggcagtgtgcgcaggcggggggtgtggggaggggccgagatggaccatcaagacgccgctttcctgcccttggctcccagcatcacagcttctacgacttcatcgtcaccaaggcacgggggaagagtggaccactcttcaactttgatgttcatgacgatgtgcggttgctcagtgacgccactgtggagaaggatgagtcccatgcaggcaaggtggtgctgaggagctggtacgagaagaacaagcacatctttcccgccagccgctgggaaccctacgaccctgaaaagaagtgggacaagtacacgatccgctgagcatccaggaggctgcgcggccccggctcctcagctccctcagtgtgccccgtggtgtcaccgggactccaggcacccgctcccctgcgaccatgccaggcacgctgggaggaggacggcagctgctcgtgtcctgcccctgccacatcagtgactgctttattcttttccaataaagaagtgcacgtgtcagagctggagcgcctgcattgtgagaaacca

SEQ ID NO: 432209 - DNA, 1739 bp, Homo sapiens
gtcagctgactgttcggccgccaccgccgctgccgctgccgctgtcgctgtcgccgccgccgccgcccgccgccgccgccgccgccgccgccgctgccatggctcaatacaagggcgccgcgagcgaggccggccgcgccatgcacctgatgaagaagcgggagaagcagcgcgagcagatggagcagatgaagcagcgcatcgcggaggagaacatcatgaaatccaacattgacaagaagttctctgcgcactacgacgcggtggaggcagagctcaagtccagcaccgtgggtctcgtgaccctgaatgacatgaaggccaagcaggaggctctggtgaaggagcgggagaagcagctggccaagaaggagcagtccaaggagctgcagatgaagctggagaagcttcgagagaaggagcgtaagaaggaagccaagcggaagatctccagcctgtccttcaccctggaggaggaagaagagggaggcgaggaggaagaggaggcggccatgtatgaggaggagatggaaagggaagagatcaccacgaagaagagaaaactggggaagaacccagacgttgacacaagcttcttgcctgatcgagaccgtgaggaggaggagaatcggcttcgggaagagctgcggcaggagtgggaagccaagcaggagaagatcaagagtgagtgtttgcggagtcagacgcgagggcctgggcccaagccagcttccctgtccacagtctcctgggtggtgcgctgagccccaaggctgctctcagtggggctggagaccaagaggcagctctgccttgtagggtgaggagatcgagatcaccttcagctactgggatggctctgggcaccggcggacagtcaaggtaggcagcgtgcagcctgcttcctgctcaccatgggcccagcctccctcaggttccgtgggaaggaactgaccttcctgacttgggaagccccagggatcctgaggataactggctccagggcctggccccctgtctggggagtgagcccaggcctggctgaggctctgcagcgtcgcctggacggtctgggcctctgccttgttgagagcccttctcgcagttccgccttcccttcccaactcctggattcccggatacagatgagaaagggcaacaccatgcagcagttcctgcagaaggcgctcgagatccttcggaaagacttcagtgagctgaggtccgcaggggtggagcagctcatgtacatcaaggaggacttgatcatccctcaccatcacagcttctacgacttcatcgtcaccaaggcacgggggaagagtggaccactcttcaactttgatgttcatgacgatgtgcggttgctcagtgacgccactgtggagaaggatgagtcccatgcaggcaaggtggtgctgaggagctggtacgagaagaacaagcacatctttcccgccagccgctgggaaccctacgaccctgaaaagaagtgggacaagtacacgatccgctgagcatccaggaggctgcgcggccccggctcctcagctccctcagtgtgccccgtggtgtcaccgggactccaggcacccgctcccctgcgaccatgccaggcacgctgggaggaggacggcagctgctcgtgtcctgcccctgccacatcagtgactgctttattcttttccaataaagaagtgcacgtgtcagagctggagcgcctgcattgtgagaaacca

SEQ ID NO: 432210 - DNA, 1708 bp, Homo sapiens
gtcagctgactgttcggccgccaccgccgctgccgctgccgctgtcgctgtcgccgccgccgccgcccgccgccgccgccgccgccgccgccgctgccatggctcaatacaagggcgccgcgagcgaggccggccgcgccatgcacctgatgaagaagcgggagaagcagcgcgagcagatggagcagatgaagcagcgcatcgcggaggagaacatcatgaaatccaacattgacaagaagttctctgcgcactacgacgcggtggaggcagagctcaagtccagcaccgtgggtctcgtgaccctgaatgacatgaaggccaagcaggaggctctggtgaaggagcgggagaagcagctggccaagaaggagcagtccaaggagctgcagatgaagctggagaagcttcgagagaaggagcgtaagaaggaagccaagcggaagatctccagcctgtccttcaccctggaggaggaagaagagggaggcgaggaggaagaggaggcggccatgtatgaggaggagatggaaagggaagagatcaccacgaagaagagaaaactggggaagaacccagacgttgacacaagcttcttgcctgatcgagaccgtgaggaggaggagaatcggcttcgggaagagctgcggcaggagtgggaagccaagcaggagaagatcaagagtgaggagatcgagatcaccttcagctactgggatggctctgggcaccggcggacagtcaagatgagaaagggcaacaccatgcagcagttcctgcagaaggcgctcgagatccttcggaaagacttcagtgagctgaggtccgcaggggtggagcagctcatgtacatcaaggaggacttgatcatccctcaccatcacagcttctacgacttcatcgtcaccaaggcacgggggaagagtggaccactcttcaactttgatgttcatgacgatgtgcggttgctcagtgacgccactgtggagaaggatgagtcccatgcaggcaaggtggtgctgaggagctggtacgagaagaacaagcacatctttcccgccagccgctgggaaccctacgaccctgaaaagaagtgggacaagtacacgatccgctgagcatccaggaggctgcgcggccccggctcctcagctccctcagtgtgccccgtggtgtcaccgggactccaggcacccgctcccctgcgaccatgccaggcacgctgggaggaggacggcagctgctcgtgtcctgcccctgccacatcagtgactgctttattcttttccaataaagaagtgcacgtgtcagagctggagcgcctgcattgtgagaaaccaaaaaaaaaaaaaaaaaaaaaaaaaaaaaaaaaacacaaaaaaggggggggggccggccccaaagaattcatcccccgcggggggccccagcgttcagctcgccgcactccccccgtttttttgttaaacaaggggggcccccaaatggaggggaccgcaccaaatttataatagcgccagagagcaggcgggccccggcggtttataacaaagccgttgggatcgcgtgggggaacaaagcggctcagaccggcgggaaaccgcttggggagagaggggcacccctctgctagcgggggggggcaccaattactgtggacacaactcccccatcccacagaatataagcgggcccagagggaaaatta

SEQ ID NO: 432211 - DNA, 950 bp, Homo sapiens
gtcagctgactgttcggccgccaccgccgctgccgctgccgctgtcgctgtcgccgccgccgccgcccgccgccgccgccgccgccgccgccgctgccatggctcaatacaagggcgccgcgagcgaggccggccgcgccatgcacctgatgaagaagcgggagaagcagcgcgagcagatggagcagatgaagcagcgcatcgcggaggagaacatcatgaaatccaacattgacaagaagttctctgcgcactacgacgcggtggaggcagagctcaagtccagcaccgtgggtgaggagatcgagatcaccttcagctactgggatggctctgggcaccggcggacagtcaagatgagaaagggcaacaccatgcagcagttcctgcagaaggcgctcgagatccttcggaaagacttcagtgagctgaggtccgcaggggtggagcagctcatgtacatcaaggaggacttgatcatccctcaccatcacagcttctacgacttcatcgtcaccaaggcacgggggaagagtggaccactcttcaactttgatgttcatgacgatgtgcggttgctcagtgacgccactgtggagaaggatgagtcccatgcaggcaaggtggtgctgaggagctggtacgagaagaacaagcacatctttcccgccagccgctgggaaccctacgaccctgaaaagaagtgggacaagtacacgatccgctgagcatccaggaggctgcgcggccccggctcctcagctccctcagtgtgccccgtggtgtcaccgggactccaggcacccgctcccctgcgaccatgccaggcacgctgggaggaggacggcagctgctcgtgtcctgcccctgccacatcagtgactgctttattcttttccaataaagaagtgcacgtgtcagagctggagcgcctgcattgtgagaaacca

SEQ ID NO: 432212 - DNA, 1641 bp, Homo sapiens
ttgcaccctgggggggaccctgtctccagctttgggacaggggtagcatctagcttgcgatttgcatttctctctcccgcctcctcgggtccacgctcacgtcttttcaccatggcggcttgtcttctttctgaccctctaaatgcagtgggccctttcccagcatccggtgcctgagcagcctgcgttctccccattgccagcctgtgcttggctctcccctgtggccctctgtgcttgctgtttgtaacagagccctcgcccatgagctcaaagtgatccaggacagcaggacccgtctggggcaatggggacccagcctgggctgggcaggccccacatagggcacacaggtggctctgggtcaaggaaggggctgggtcagggtcgggaaggacatgatgtgtgatggggccacctgcacctcactaggaagctggagaagcttcgagagaaggagcgtaagaaggaagccaagcggaagatctccagcctgtccttcaccctggaggaggaagaagagggaggcgaggaggaagaggaggcggccatgtatgaggaggagatggaaagggaagagatcaccacgaagaagagaaaactggggaagaacccagacgttgacacaagcttcttgcctgatcgagaccgtgaggaggaggagaatcggcttcgggaagagctgcggcaggagtgggaagccaagcaggagaagatcaagagtgaggagatcgagatcaccttcagctactgggatggctctgggcaccggcggacagtcaaggtaggcagcgtgcagcctgcttcctgctcaccatgggcccagcctccctcaggttccgtgggaaggaactgaccttcctgacttgggaagccccagggatcctgaggataactggctccagggcctggccccctgtctggggagtgagcccaggcctggctgaggctctgcagcgtcgcctggacggtctgggcctctgccttgttgagagcccttctcgcagttccgccttcccttcccaactcctggattcccggatacagatgagaaagggcaacaccatgcagcagttcctgcagaaggcgctcgagatccttcggaaagacttcagtgagctgaggtccgcaggggtggagcagctcatgtacatcaaggaggacttgatcatccctcaccatcacagcttctacgacttcatcgtcaccaaggcacgggggaagagtggaccactcttcaactttgatgttcatgacgatgtgcggttgctcagtgacgccactgtggagaaggatgagtcccatgcaggcaaggtggtgctgaggagctggtacgagaagaacaagcacatctttcccgccagccgctgggaaccctacgaccctgaaaagaagtgggacaagtacacgatccgctgagcatccaggaggctgcgcggccccggctcctcagctccctcagtgtgccccgtggtgtcaccgggactccaggcacccgctcccctgcgaccatgccaggcacgctgggaggaggacggcagctgctcgtgtcctgcccctgccacatcagtgactgctttattcttttccaataaagaagtgcacgtgtcagagctggagcgcctgcattgtgagaaacca

SEQ ID NO: 432213 - DNA, 671 bp, Homo sapiens
agctgggagtgtaggaagggagaggaggcagtggggagaggaaagggtgggctgctgggcaccggctgacagtcaagatgagaaagggcaacaccatgcagcagttcctgcagaaggcgctcgagatccttcggaaagacttcagtgagctgaggtccgcaggggtggagcagctcatgtacatcaaggaggacttgatcatccctcaccatcacagcttctacgacttcatcgtcaccaaggcacgggggaagagtggaccactcttcaactttgatgttcatgacgatgtgcggttgctcagtgacgccactgtggagaaggatgagtcccatgcaggcaaggtggtgctgaggagctggtacgagaagaacaagcacatctttcccgccagccgctgggaaccctacgaccctgaaaagaagtgggacaagtacacgatccgctgagcatccaggaggctgcgcggccccggctcctcagctccctcagtgtgccccgtggtgtcaccgggactccaggcacccgctcccctgcgaccatgccaggcacgctgggaggaggacggcagctgctcgtgtcctgcccctgccacatcagtgactgctttattcttttccaataaagaagtgcacgtgtcagagctggagcgcctgcattgtgagaaacca

SEQ ID NO: 432214 - DNA, 1164 bp, Homo sapiens
  misc_feature (10)..(10): n is a, c, g, or t
  misc_feature (12)..(14): n is a, c, g, or t
  misc_feature (20)..(22): n is a, c, g, or t
  misc_feature (24)..(24): n is a, c, g, or t
tggctaggtngnnnctgggnnncngtgaggcctgcggtgcctggacggcttcccgccccgtttcttacctggaagctggagaagcttcgagagaaggagcgtaagaaggaagccaagcggaagatctccagcctgtccttcaccctggaggaggaagaagagggaggcgaggaggaagaggaggcggccatgtatgaggaggagatggaaagggaagagatcaccacgaagaagagaaaactggggaagaacccagacgttgacacaagcttcttgcctgatcgagaccgtgaggaggaggagaatcggcttcgggaagagctgcggcaggagtgggaagccaagcaggagaagatcaagagtgaggagatcgagatcaccttcagctactgggatggctctgggcaccggcggacagtcaagatgagaaagggcaacaccatgcagcagttcctgcagaaggcgctcgagatccttcggaaagacttcagtgagctgaggtccgcaggggtggagcagctcatgtacatcaaggaggacttgatcatccctcacgtgagtcccttcagccccagtacccgcagtgggtgcagcaccctgggctttggctcaggctggtgggggcagtgtgcgcaggcggggggtgtggggaggggccgagatggaccatcaagacgccgctttcctgcccttggctcccagcatcacagcttctacgacttcatcgtcaccaaggcacgggggaagagtggaccactcttcaactttgatgttcatgacgatgtgcggttgctcagtgacgccactgtggagaaggatgagtcccatgcaggcaaggtggtgctgaggagctggtacgagaagaacaagcacatctttcccgccagccgctgggaaccctacgaccctgaaaagaagtgggacaagtacacgatccgctgagcatccaggaggctgcgcggccccggctcctcagctccctcagtgtgccccgtggtgtcaccgggactccaggcacccgctcccctgcgaccatgccaggcacgctgggaggaggacggcagctgctcgtgtcctgcccctgccacatcagtgactgctttattcttttccaataaagaagtgcacgtgtcagagctggagcgcctgcattgtgagaaacca

SEQ ID NO: 432215 - DNA, 1437 bp, Homo sapiens
gtcagctgactgttcggccgccaccgccgctgccgctgccgctgtcgctgtcgccgccgccgccgcccgccgccgccgccgccgccgccgccgctgccatggctcaatacaagggcgccgcgagcgaggccggccgcgccatgcacctgatgaagaagcgggagaagcagcgcgagcagatggagcagatgaagcagcgcatcgcggaggagaacatcatgaaatccaacattgacaagaagttctctgcgcactacgacgcggtggaggcagagctcaagtccagcaccgtgggtctcgtgaccctgaatgacatgaaggccaagcaggaggctctggtgaaggagcgggagaagcagctggccaagaaggagcagtccaaggagctgcagatgaagctggagaagcttcgagagaaggagcgtaagaaggaagccaagcggaagatctccagcctgtccttcaccctggaggaggaagaagagggaggcgaggaggaagaggaggcggccatgtatgaggaggagatggaaagggaagagatcaccacgaagaagagaaaactggggaagaacccagacgttgacacaagcttcttgcctgatcgagaccgtgaggaggaggagaatcggcttcgggaagagctgcggcaggagtgggaagccaagcaggagaagatcaagagtgaggagatcgagatcaccttcagctactgggatggctctgggcaccggcggacagtcaagatgagaaagggcaacaccatgcagcagttcctgcagaaggcgctcgagatccttcggaaagacttcagtgagctgaggtccgcaggggtggagcagctcatgtacatcaaggaggacttgatcatccctcaccatcacagcttctacgacttcatcgtcaccaaggcacgggggaagagtggtgagtgccgccgacccagccgcccccatagcaccttgccgccgatgttgtcactggggcagcagcgggacattgggctgtcacttctcccctgcaggaccactcttcaactttgatgttcatgacgatgtgcggttgctcagtgacgccactgtggagaaggatgagtcccatgcaggcaaggtggtgctgaggagctggtacgagaagaacaagcacatctttcccgccagccgctgggaaccctacgaccctgaaaagaagtgggacaagtacacgatccgctgagcatccaggaggctgcgcggccccggctcctcagctccctcagtgtgccccgtggtgtcaccgggactccaggcacccgctcccctgcgaccatgccaggcacgctgggaggaggacggcagctgctcgtgtcctgcccctgccacatcagtgactgctttattcttttccaataaagaagtgcacgtgtcagagctggagcgcctgcattgtgagaaacca

SEQ ID NO: 432216 - DNA, 1280 bp, Homo sapiens
  misc_feature (1112)..(1112): n is a, c, g, or t
gtcagctgactgttcggccgccaccgccgctgccgctgccgctgtcgctgtcgccgccgccgccgcccgccgccgccgccgccgccgccgccgctgccatggctcaatacaagggcgccgcgagcgaggccggccgcgccatgcacctgatgaagaagcgggagaagcagcgcgagcagatggagcagatgaagcagcgcatcgcggaggagaacatcatgaaatccaacattgacaagaagttctctgcgcactacgacgcggtggaggcagagctcaagtccagcaccgtgggtctcgtgaccctgaatgacatgaaggccaagcaggaggctctggtgaaggagcgggagaagcagctggccaagaaggagcagtccaaggagctgcagatgaagctggagaagcttcgagagaaggagcgtaagaaggaagccaagcggaagatctccagcctgtccttcaccctggaggaggaagaagagggaggcgaggaggaagaggaggcggccatgtatgaggaggagatggaaagggaagagatcaccacgaagaagagaaaactggggaagaacccagacgttgacacaagcttcttgcctgatcgagaccgtgaggaggaggagaatcggcttcgggaagagctgcggcaggagtgggaagccaagcaggagaagatcaagagtgaggagatcgagatcaccttcagctactgggatggctctgggcaccggcggacagtcaagatgagaaagggcaacaccatgcagcagttcctgcagaaggcgctcgagatccttcggaaagacttcagtgagctgaggtccgcaggggtggagcagctcatgtacatcaaggaggacttgatcatccctcaccatcacagcttctacgacttcatcgtcaccaaggcacgggggaagagtggaccactcttcaactttgatgttcatgacgatgtgcggttgctcagtgacgccactgtggagaaggatgagtcccatgcaggcaaggtggtgctgaggagctggtacgagaagaacaagcacatctttcccgccagccgctgggaaccctacgaccctgaaaagaagtgggacaagtacacgatncgctgagcatcaggaggtgcgcggccggtctcagtcctcagtgtgccgggtgtccgggatccaggccgttcctggacttcagccctgggagggagaaggattgttctttttgcctgcaataggtggtttttccaaaaggtgttatgtggtgtttggaaaaaaacggtt

SEQ ID NO: 432217 - DNA, 1193 bp, Homo sapiens
gtcagctgactgttcggccgccaccgccgctgccgctgccgctgtcgctgtcgccgccgccgccgcccgccgccgccgccgccgccgccgccgctgccatggctcaatacaagggcgccgcgagcgaggccggccgcgccatgcacctgatgaagaagcgggagaagcagcgcgagcagatggagcagatgaagcagcgcatcgcggaggagaacatcatgaaatccaacattgacaagaagttctctgcgcactacgacgcggtggaggcagagctcaagtccagcaccgtgggtctcgtgaccctgaatgacatgaaggccaagcaggaggctctggtgaaggagcgggagaagcagctggccaagaaggagcagtccaaggagctgcagatgaagctggagaagcttcgagagaaggagcgtaagaaggaagccaagcggaagatctccagcctgtccttcaccctggaggaggaagaagagggaggcgaggaggaagaggaggcggccatgtatgaggaggagatggaaagggaagagatcaccacgaagaagagaaaactggggaagaacccagacgttgacacaagcttcttgcctgatcgagaccgtgaggaggaggagaatcggcttcgggaagagctgcggcaggagtgggaagccaagcaggagaagatcaagagtgaggagatcgagatcaccttcagctactgggatggctctgggcaccggcggacagtcaagatgagaaagggcaacaccatgcagcagttcctgcagaaggcgctcgagatccttcggaaagacttcagtgagctgaggtccgcaggggtggagcagctcatgtacatcaaggaggacttgatcatccctcaccatcacagcttctacgacttcatcgtcaccaaggcacgggggaagagtggaccactcttcaactttgatgttcatgacgatgtgcggttgctcagtgacgccactgtggagaaggatgagtcctcagctccctcagtgtgccccgtggtgtcaccgggactccaggcacccgctcccctgcgaccatgccaggcacgctgggaggaggacggcagctgctcgtgtcctgcccctgccacatcagtgactgctttattcttttccaataaagaagtgcacgtgtcagagctggagcgcctgcattgtgagaaacca

SEQ ID NO: 432218 - DNA, 844 bp, Homo sapiens
gtcagctgactgttcggccgccaccgccgctgccgctgccgctgtcgctgtcgccgccgccgccgcccgccgccgccgccgccgccgccgccgctgccatggctcaatacaagggcgccgcgagcgaggccggccgcgccatgcacctgatgaagaagcgggagaagcagcgcgagcagatggagcagatgaagcagcgcatcgcggaggagaacatcatgaaatccaacattgacaagaagttctctgcgcactacgacgcggtggaggcagagctcaagtccagcaccgtgggtctcgtgaccctgaatgacatgaaggccaagcaggaggctctggtgaaggagcgggagaagcagctggccaagaaggagcagtccaaggagctgcagatgaagctggagaagcttcgagagaaggagcgtaagaaggaagccaagcggaagatctccagcctgtccttcaccctggaggaggaagaagagggaggcgaggaggaagaggaggcggccatgtatgaggaggagatggaaagggaagagatcaccacgaagaagagaaaactggggaagaacccagacgttgacacaagcttcttgcctgatcgagaccgtgaggaggaggagaatcggcttcgggaagagctgcggcaggagtgggaagccaagcaggagaagatcaagagtgaggagatcgagatcaccttcagctactgggatggctctgggcaccggcggacagtcaagatgagaaagggcaacaccatgcagcagttcctgcagaaggcgctcgagatccttcggaaagacttcagtgagctgagtatgcagagaagaataggacc

SEQ ID NO: 432219 - DNA, 649 bp, Homo sapiens
gtcagctgactgttcggccgccaccgccgctgccgctgccgctgtcgctgtcgccgccgccgccgcccgccgccgccgccgccgccgccgccgctgccatggctcaatacaagggcgccgcgagcgaggccggccgcgccatgcacctgatgaagaagcgggagaagcagcgcgagcagatggagcagatgaagcagcgcatcgcggaggagaacatcatgaaatccaacattgacaagaagttctctgcgcactacgacgcggtggaggcagagctcaagtccagcaccgtgggtctcgtgaccctgaatgacatgaaggccaagcaggaggctctggtgaaggagcgggagaagcagctggccaagaaggagcagtccaaggagctgcagatgaagctggagaagcttcgagagaaggagcgtaagaaggaagccaagcggaagatctccagcctgtccttcaccctggaggaggaagaagagggaggcgaggaggaagaggaggcggccatgtatgaggaggagatggaaagggaagagatcaccacgaagaagagaaaactggggaagaacccagacctgagcaagccaggcctggcttgctcaggtctccggccttgcacaggtcgggccctgccagcgccatc

SEQ ID NO: 432220 - DNA, 833 bp, Homo sapiens
gtcagctgactgttcggccgccaccgccgctgccgctgccgctgtcgctgtcgccgccgccgccgcccgccgccgccgccgccgccgccgccgctgccatggctcaatacaagggcgccgcgagcgaggccggccgcgccatgcacctgatgaagaagcgggagaagcagcgcgagcagatggagcagatgaagcagcgcatcgcggaggagaacatcatgaaatccaacattgacaagaagttctctgcgcactacgacgcggtggaggcagagctcaagtccagcaccgtgggtctcgtgaccctgaatgacatgaaggccaagcaggaggctctggtgaaggagcgggagaagcagctggccaagaaggagcagtccaaggagctgcagatgaagctggagaagcttcgagagaaggagcgtaagaaggaagccaagcggaagatctccagcctgtccttcaccctggaggaggaagaagagggaggcgaggaggaagaggaggcggccatgtatgaggaggagatggaaagggaagagatacactcgtgggcagcgctgcccacgaagtgcctaccaccttgatgcctgtgaacacagtggccctgaaagtgcctgccaacccagcatctgtcagcacagtgccctccaagttgccaactagctcaaagccccctggtgcagtgccttctaatgcgctcaccaatccagcaccatccaaattgcccatcaactcaacccgtgctggcatggtgccatccaaagtgcctactagcatggtgctcaccaaggtgtctgccagcacagtccccacttcgtgggcagcgggta

SEQ ID NO: 432221 - DNA, 803 bp, Homo sapiens
gtcagctgactgttcggccgccaccgccgctgccgctgccgctgtcgctgtcgccgccgccgccgcccgccgccgccgccgccgccgccgccgctgccatggctcaatacaagggcgccgcgagcgaggccggccgcgccatgcacctgatgaagaagcgggagaagcagcgcgagcagatggagcagatgaagcagcgcatcgcggaggagaacatcatgaaatccaacattgacaagaagttctctgcgcactacgacgcggtggaggcagagctcaagtccagcaccgtgggtgaggagatcgagatcaccttcagctactgggatggctctgggcaccggcggacagtcaagatgagaaagggcaacaccatgcagcagttcctgcagaaggcgctcgagatccttcggaaagacttcagtgagctgaggtccgcaggggtggagcagctcatgtacatcaaggaggacttgatcatccctcaccatcacagcttctacgacttcatcgtcaccaaggcacgggggaagagtggaccactcttcaactttgatgttcatgacgatgtgcggttgctcagtgacgccactgtggagaaggatgagtcctcagctccctcagtgtgccccgtggtgtcaccgggactccaggcacccgctcccctgcgaccatgccaggcacgctgggaggaggacggcagctgctcgtgtcctgcccctgccacatcagtgactgctttattcttttccaataaagaagtgcacgtgtcagagctggagcgcctgcattgtgagaaacca

SEQ ID NO: 432222 - DNA, 690 bp, Homo sapiens
  misc_feature (547)..(547): n is a, c, g, or t
gtcagctgactgttcggccgccaccgccgctgccgctgccgctgtcgctgtcgccgccgccgccgcccgccgccgccgccgccgccgccgccgctgccatggctcaatacaagggcgccgcgagcgaggccggccgcgccatgcacctgatgaagaagcgggagaagcagcgcgagcagatggagcagatgaagcagcgcatcgcggaggagaacatcatgaaatccaacattgacaagaagttctctgcgcactacgacgcggtggaggcagagctcaagtccagcaccgtgggtctcgtgaccctgaatgacatgaaggccaagcaggaggctctggtgaaggagcgggagaagcagctggccaagaaggagcagtccaaggagctgcagatgaagctggagaagcttcgagagaaggagctgccgctggtgccgtgcaaccaggccaaggcgtcggacgtgcaggacctcctgaaggatctgaaggctcagtcgcaggtgttgggctggatcttgatagcagttgttatcatcattcttctganttttacatctgtcacccgatgcctatctccagttagttttctgcagctgaaattctggaaaatctatttggaacaggagcagcagatccttaaaagtaaagccacagagcatgcaactgattggcaaagagatattaaactgt

SEQ ID NO: 432223 - DNA, 564 bp, Homo sapiens
gtcagctgactgttcggccgccaccgccgctgccgctgccgctgtcgctgtcgccgccgccgccgcccgccgccgccgccgccgccgccgccgctgccatggctcaatacaagggcgccgcgagcgaggccggccgcgccatgcacctgatgaagaagcgggagaagcagcgcgagcagatggagcagatgaagcagcgcatcgcggaggagaacatcatgaaatccaacattgacaagaagttctctgcgcactacgacgcggtggaggcagagctcaagtccagcaccgtgggtctcgtgaccctgaatgacatgaaggccaagcaggaggctctggtgaaggagcgggagaagcagctggccaagaaggagcagtccaaggagctgcagatgaagctggagaagcttcgagagaagtgcgcctgggttcgcacccaggcgcacttctcctgctgcagcctcccaagtagctggaatttcaggcgtgtaccaccgtgcccaattaatttttgtatttttagtagagacagggtttcaccatgttagccaggatggtctccat

SEQ ID NO: 432224 - DNA, 567 bp, Homo sapiens
gtcagctgactgttcggccgccaccgccgctgccgctgccgctgtcgctgtcgccgccgccgccgcccgccgccgccgccgccgccgccgccgctgccatggctcaatacaagggcgccgcgagcgaggccggccgcgccatgcacctgatgaagaagcgggagaagcagcgcgagcagatggagcagatgaagcagcgcatcgcggaggagaacatcatgaaatccaacattgacaagaagttctctgcgcactacgacgcggtggaggcagagctcaagtccagcaccgtggactagtagccaaccgtggactagtagccacccgtggactagtagccacccgtggactagtagccaaccgtggactagtagccaaccgtggactagtagccaaccgtggactagtagccaaccgtggactagtagccaaccgtggactagtagccaaccgtggactagtagccaaccgtggactagtagccaaccgtggactagtagccaaccgtggactagtagccaaccgtggactagtagccaacctgactagtagccaaccgtggactat

SEQ ID NO: 432225 - DNA, 7801 bp, Homo sapiens
gttaacaaaaggattaatgggttgcttaaattagtgagcttcatcagttttatttttaattccttgagataatgaattttaaaagcaataaatacaatgctgtagtttttgacttcttttctaaatatttacatggatttacatgaaagaactaaagagatagtatttgtggaaccaatttaaactcttacatgcctttcaggatttgggaatgtattaacacctgctgctttgtatccagtctaagggagcctatttgtttgttatcacattgacttcctttgatgtcttttagtgttaccctcactcagacccaaggattatgtcttttggggctcccatcatcctgagctagagacacgtgacaggggtacactctcctacaaaaccagccagttactcagtaaagtggacgatagaagaaaaagagctgtttgaacaagggctggctaaatttggccgaagatggaccaaaatttcaaagctaattggaagccgcactgttttacaagtgaagagttatgcaagacagtattttaaaaataaggtcaaatgcggtctggataaagaaacaccaaatcagaagaccggccataatcttcaagttaaaaatgaagataaagggacaaaggcatggacaccatcatgtttaaggggacgtgctgatcccaacttgaatgctgtaaaaattgaaaagttatctgatgatgaagaagtagacatcacagatgaggtggacgagttgtcttctcaaacaccccagaagaattctagcagtgatctcttgttagactttcctaatagtaaaatgcatgaaaccaatcaaggagaattcattacttctgacagccaggaagctctcttttctaagtcttccaggggctgtcttcaaaatgaaaagcaagatgaaacactttcaagctcagaaattacactgtggactgagaaacagagcaatggtgacaaaaaatcaattgaattaaatgaccagaaatttaatgaattgattaaaaactgcaacaagcatgatggaaggggaataatagttgatgccaggcagttgccttctccagagccttgtgaaattcagaaaaatttgaatgataatgaaatgctttttcattcttgccaaatggtagaggaaagccatgaggaagaagagcttaagccaccagaacaggaaatagaaatagatagaaatatcattcaagaagaagaaaaacaagcaattcctgagttttttgaggggcgccaagctaaaacaccagaacgctatttgaaaattagaaattatattttggatcaatgggagatatgcaaaccgaaatacttaaataagacctcagtacgtcctggcctgaagaactgtggagatgttaattgtattggacggattcatacatacctcgaattgataggagcaatcaattttggatgtgaacaggctgtgtataataggccacaaacagttgacaaagtacgaatcagagacagaaaagatgcagtagaagcataccaacttgcccagcgtctgcagtctatgcgtacaaggagacgtagggtccgagacccatggggaaactggtgtgatgcaaaggacttagaaggacaaacgtttgagcatctctctgctgaggagttggcaaaaagaagagaagaggaaaaaggcagacctgttaaatctttaaaagtgccaagaccaacaaaaagctcgtttgatcccttccaactgataccttgtaatttttttagtgaagaaaagcaggagccatttcaggtgaaagtggcttcagaagcacttttaataatggatttgcatgctcatgtttctatggcagaagtgattggtctgttaggaggaagatactcagaagttgataaagtagttgaagtctgtgcagcagaaccatgtaacagtctgagtacaggactacagtgtgagatggatcctgtatcacaaacacaggcctcagaaaccttggctgttagaggcttcagtgttattggatggtatcattctcatcctgcttttgatcctaatccttccttacgagatattgacacacaagctaaataccagagttacttctccagaggaggtgcaaagttcattgggatgattgttagtccctataatcgaaataatcccttaccatattctcagattacctgcctggttataagtgaggaaattagcccagatggctcttatcgcttaccttacaaatttgaagtacagcagatgttagaagaacctcagtggggattagtatttgaaaagacaagatggataatagaaaaatacaggctctcccatagcagcgtccccatggataaaatctttcgccgggattctgacctgacttgtttgcagaaacttttggagtgtatgaggaagactctgagcaaagtgaccaattgctttatggctgaagaattcttgactgaaatagaaaatttgttcctttccaattataaaagcaaccaagagaatggagtaaccgaagagaactgtacaaaggaattgttaatgtgattattttaaagttaagacattttaatcttgacacagtagatcttactttcaaagttataaacttgaagtgattgtagttaacattggcacagctttggtattttttctctatttcacaaaatccaaactttgccacataaatcatgtgaaaagaaagagatacaaatttgttttcatatagtgattatcagagtgttctgcaaaccagggtccaccacggtgttctagtcctttactgagcaatgctgtaggctgtgaaactaagcaacctggtcggctttactgttgtgttcagcttgggatttggactatgtctctaagtcatttcttccctgaactagtcatttatattccattgtggtatctcctatttcatttaaaagcacttccattctttccatatattctgctgagatttgtttatggctataaatgagatatggatgggtggtcactgagataattaatatggtttagaactactgattaataaatctaacaggagaccaggagaggcatgacaagaaaatcttaaaaacaggaaaaacccaaaggagagaactaaattaccagtttctaatcatagatactatcttccatttcattgtatagcagtagtatcataagatatgccattttctcagctatctgaaaatttttaaccaattttacacacataaaataattagcttcaattgtgagtccacttacattagtaggtgtgataaaacctcatttaactggaacataggtaatcataactcaaactttttttctactgcctactactaggagaaagaggcaaatgataataaagctggaataaatcagagatttaatttttaaaacaagcctttcaggacatattacatattcgcccagtttcatatgctttctgaatctataatggaggtcagtgaacttttttaatgtaaagggccagtttgtaaataattttggcttttcaggccacatatgatgtctatgagacattcttctttgtgtgtgtgtgtgtgtgtgtgtgtgtgtgtgtgtgttttacagccctttaaaatgataaaaaccattgttaactcacaggcctcataaaacataggctgttggctattattctccaacccttgatctagagaattttaaacattagaattttgttttacatttgttaagctttacgtcatcttcaaatgacaccaaaactcagaattatgatctgcatttaagccaattttaaaataaaataagcagtcaatgctgcctcatttattgaaattcagtagattttagtttatttcttagtagtcagagaattgatttatagctattcaccaaacattcttactaacgtttccttatatctaaatcagattgattctatattttgctttgtttgtaatcaatagccaatgaagaataaggagtattggaagaagcagtgagtcagctttaggtgacctggttcttgtctcaactttgtgatttggggagatacagtttactttccctgagccttaattcttgtgtaactgaagtctaacttaacttcttaatgtccttccagaactaaaattttattgttcattctaatcgttggactactcttgtgaagtttatattttgagttaatacagtttccaaattaacatacatttaaaaaaaaaagggtagtatttttccatttctctgtgtgcacttaggataaacagtgaagtatagcttataaaacaattagtttgagggctgagagtgtaagaggaactataccaaaagtcaggaaacctgagctcttaccctaactctgttaccaactttgctgtgtgaccttaatcaaaacacataacctggaccccatgctcctcaccagtaaatcaagggcctgaattttatggcttagtattcccttccaagctccgaagttgcgtgattctgtgaaaggcagtgattgattcctttgtactcatcttccttttgacctgtttcctcatgatatattggggaacaaatactaaaaagtgttttatactagctttcttgattgacatttccctataatactgatgaatttgggtgatggaaagtaatggaaattgttaaaagttctgctctcaaatctgagtctccttgccctgtgtgccaatgtttaaccatatttgctaatctaagccatattgcgaggatctcaaggatgatacttgtcaagagtttggggccttgagagcacagttttcaaaataatacttagtattttctgactatagagtacatttgtcttgtaaagtatattttaaaatacagagaagtgtgaagtacaaatatctcagtgctactatttaaaaaaacacaattagtatataaatccttccccatttttttgacagtataattttagtatgttaaacttggttacttctttctctcttcctccatcattttccctgcttcctttttcttttgtcatattcttaaaacaattttgcaaccacaggtacccacattgctggcactaccagccttgggctactaccgaggataatggagccagggccttgtagaagcacagaggaagtctagaactgagggggcctatgatacaggaagttcaggaggcagagtctcaaaggaacacctgcctttaataatgtttacagaagtggagaaaggactaaaggacttaaagacatgcaggtgtcttcatcctgattctgtctttgttattgcacaatgactataaaataatgacctaatttttttttttttctggcttggctaatggaaatcgacactagcgcttccccaatattagacttaatctaattccaaagtaacattcaagaaaagaaaaaccagtggaacaggatcagtaagctcagactctccatctccattattttagccttgaccattcttctctaatccttttaaattatcttcagtttccagttcaagttacattgcttcagttacagtttgtttgaccctgtattcagagctgcattatgattcttgtgggccctagatagttttgccatcttagaccccttcttccatacaaaattaaaagtgatattttacaattgtatctgtatgaaatgaatgtattaatattttagattaaaacattttgtttagaagttcagttttttcttatgaggctaaaaaaaattaaaacatttttgtgggcttctaaaaaactgtgggccttaggtactgtgcctaatggataagttggcattgcctgtattctgaagggcatcattggaaaaatagcagtcattattctgtccccttctcccaccaccacagtccttggagaagcctttgccactccatccaggagcactgcagtttccacggttatagatctatagacttgaacttacttccttcccaacctaacgaaaactcacaaggattacttgggaccattcatcctcaaaaaagataggaggcagtggtttgttttagtcttcagatatttttgttttggtcagtccctaatctgtagttttgaaactcgtgccacacttgaaagggaaacatcctactacctttctttcctctccatttcccacaaaccctttccttcatcatcactccctgcattcttacttctcagcatataaatacaagacccttctttctattatttgttgaaagctaggcctgtaaaatagagatggacagaccatgcatgtttccatgaagctatttaatgctgctcccagtcttctgtccataccattccttccctgcccctaggagtggggttgaggtctgtgacatgcagactgtaagcacagtcagaacctctgcagctctcaacccaacagaggagactgtggcttcaacatgccaacctgagcaggtctcctctgcattaccttcctcccatttctcttcctgggtcctgatgaggtgagctggaggaaccaatagtcaggatgccctggaattgatgttgctctgttttgtgctcacaaaacagccatgtaacacatgagcacctgagttgaagccatccagtcgcaagtcagcagacagcagttgatggaattctcagtagaaattcagtaagggtgcccaaattttattttttttttcacctatactctaccaatatatggtatttaggaaaacttcttttatccaagcacaaagaaaagcacacacatttttataatcatctgcttcatcagggtaaataaataatttaacaaatttgatcagcatctctagtttaccagtactttaatattagttttcttacaaattaatgtattttgcaatatttccagaaaatcactgtgggagaataatgtaatatactttaggatatatttcctgaccttttcttaaatggcttcatgtgctattcccccaaattctgctttctctattttcttttttatttaacctataattatactttctagtatattctgagtctatcttctaagccaccttacatttttcctggaacaagggagggaataaatagttgcctccactaaatcaggaaaaaataaaaatatcccaggggagctgtgattatgccaagagctctaaacagaagtttgagaaggtaaaaattaagttgtagtatctgagttgtttttattttcttcctttggtgtttatgaaggtattcataagaactttaatttcaggggaaaaaatgcctgatttgctatttttgacatttcctcgtctcttaagaagtcagttaaatatgttttcatagtttatattcctgtttcatagattactgtgaaacatgtatttaaacctatgaattataaaatagtatttagattctagcgtgagttaaatagattagtcatatatcttttagatttgtggatttgacatgtaaattatgtgttgtgtataagtaagttagttactaaacatatggcatggttattgataaacttgttgctatttttttccaaatgctatcagtgtttgtggacttttaaaaattagtttgaattttggaatgttctgtgataaaatataatttcaactattttgtacatttaaatatgccatgttgtatatgtctgtatttaaaaatgttgtaaatatctgcattttaagaattatgaaagattttcctcaaaaatgacagaactctccatacttaattgtgacacattataagatatctgattttaagcttttggattttgttctaaaaattaagtttaaacatgctgaaaattccataaaaataaaattttgaaaataaagtgaaaaattgga

SEQ ID NO: 432226 - DNA, 702 bp, Homo sapiens
  misc_feature (663)..(663): n is a, c, g, or t
ctagaggatccctgtgatacgcacaccctgtgagatttgtttatggctataaatgagatatggatgggtggtcactgagataattaatatggtttagaactactgattaataaatctaacaggagaccaggagaggcatgacaagaaaatcttaaaaacaggaaaaacccaaaggagagaactaaattaccagtttctaatcatagatactatcttccatttcattgtatagcagtagtatcataagatatgccattttctcagctatctgaaaatttttaaccaattttacacacataaaataattagcttcaattgtgagtccacttacattagtaggtgtgataaaacctcatttaactggaacataggtaatcataactcaaactttttttctactgcctactactaggagaaagaggcaaatgataataaagctggaataaatcagagatttaatttttaaaacaagcctttcaggacatattacatattcgcccagtttcatatgctttctgaatctataatggaggtcagtgaacttttttaatgtaaagggccagtttgtaaataattttggcttttcaggccacatatgatgtctatgagacattcttctttgtgtgtgtgtgtgtgtgtgtgtgtgtgtgtgtgtgtgtgtgngtgtgcttcacagggaccgagccgaattctaatcaggtc

SEQ ID NO: 432227 - DNA, 688 bp, Homo sapiens
taaatcttttctatatattatcaaactgctctttgtatttaaagattcaatttgtgtctgtacataaatttctgaattcaaggtcctgggataactggaatctatgaatttaacattggggaagaaatattgcttgtaaaaaattatgctaataagttattgtatcatttaaggatattttatttcagaaaaaaagtacatgggtattatgtattagtattgtatttattacacatttatacattgaaaggggttaaaatttagagatatttcaaatattgaaagttttccccagaaatcttttttcacgtttttatttatccaaaataattgtacttctgtctcttaattagggagatatgcaaaccgaaatacttaaataagacctcagtacgtcctggcctgaagaactgtggagatgttaattgtattggacggattcatacatacctcgaattgataggagcaatcaattttggatgtggtaaaaataaaaacccaacaacatcttttactcgacattttttatccttacagcacttattcatttctatgatggttagaattcaagtagttataggtatatagaattcagaggtgctgtaacattatttaataaatgttttattaagattttactgttggttaaactgtgttttcatttgacctacactgaaaattgagagtg

SEQ ID NO: 432228 - DNA, 7747 bp, Homo sapiens
gttaacaaaaggattaatgggttgcttaaattagtgagcttcatcagttttatttttaattccttgagataatgaattttaaaagcaataaatacaatgctgtagtttttgacttcttttctaaatatttacatggatttacatgaaagaactaaagagatagtatttgtggaaccaatttaaactcttacatgcctttcaggatttgggaatgtattaacacctgctgctttgtatccagtctaagggagcctatttgtttgttatcacattgacttcctttgatgtcttttagtgttaccctcactcagacccaaggattatgtcttttggggctcccatcatcctgagctagagacacgtgacaggggtacactctcctacaaaaccagccagttactcagtaaagtggacgatagaagaaaaagagctgtttgaacaagggctggctaaatttggccgaagatggaccaaaatttcaaagctaattggaagccgcactgttttacaagtgaagagttatgcaagacagtattttaaaaataaggtcaaatgcggtctggataaagaaacaccaaatcagaagaccggccataatcttcaagttaaaaatgaagataaagggacaaaggcatggacaccatcatgtttaaggggacgtgctgatcccaacttgaatgctgtaaaaattgaaaagttatctgatgatgaagaagtagacatcacagatgaggtggacgagttgtcttctcaaacaccccagaagaattctagcagtgatctcttgttagactttcctaatagtaaaatgcatgaaaccaatcaaggagaattcattacttctgacagccaggaagctctcttttctaagtcttccaggggctgtcttcaaaatgaaaagcaagatgaaacactttcaagctcagaaattacactgtggactgagaaacagagcaatggtgacaaaaaatcaattgaattaaatgaccagaaatttaatgaattgattaaaaactgcaacaagcatgatggaaggggaataatagttgatgccaggcagttgccttctccagagccttgtgaaattcagaaaaatttgaatgataatgaaatgctttttcattcttgccaaatggtagaggaaagccatgaggaagaagagcttaagccaccagaacaggaaatagaaatagatagaaatatcattcaagaagaagaaaaacaagcaattcctgagttttttgaggggcgccaagctaaaacaccagaacgctatttgaaaattagaaattatattttggatcaatgggagatatgcaaaccgaaatacttaaataagacctcagtacgtcctggcctgaagaactgtggagatgttaattgtattggacggattcatacatacctcgaattgataggagcaatcaattttggatgtgaacaggctgtgtataataggccacaaacagttgacaaagtacgaatcagagacagaaaagatgcagtagaagcataccaacttgcccagcgtctgcagtctatgcgtacaaggagacgtagggtccgagacccatggggaaactggtgtgatgcaaaggacttagaaggacaaacgtttgagcatctctctgctgaggagttggcaaaaagaagagaagaggaaaaaggcagacctgttaaatctttaaaagtgccaagaccaacaaaaagctcgtttgatcccttccaactgataccttgtaatttttttagtgaagaaaagcaggagccatttcaggtgaaagtggcttcagaagcacttttaataatggatttgcatgctcatgtttctatggcagaagtgattggtctgttaggaggaagatactcagaagttgataaagtagttgaagtctgtgcagcagaaccatgtaacagtctgagtacaggactacagtgtgagatggatcctgtatcacaaacacaggcctcagaaaccttggctgttagaggcttcagtgttattggatggtatcattctcatcctgcttttgatcctaatccttccttacgagatattgacacacaagctaaataccagagttacttctccagaggaggtgcaaagttcattgggatgattgttagtccctataatcgaaataatcccttaccatattctcagattacctgcctggttataagtgaggaaattagcccagatggctcttatcgcttaccttacaaatttgaagtacagcagatgttagaagaacctcagtggggattagtatttgaaaagacaagatggataatagaaaaatacaggctctcccatagcagcgtccccatggataaaatctttcgccgggattctgacctgacttgtttgcagaaacttttggagtgtatgaggaagactctgagcaaagtgaccaattgctttatggctgaagaattcttgactgaaatagaaaatttgttcctttccaattataaaagcaaccaagagaatggagtaaccgaagagaactgtacaaaggaattgttaatgtgattattttaaagttaagacattttaatcttgacacagtagatcttactttcaaagttataaacttgaagtgattgtagttaacattggcacagctttggtattttttctctatttcacaaaatccaaactttgccacataaatcatgtgaaaagaaagagatacaaatttgttttcatatagtgattatcagagtgttctgcaaaccagggtccaccacggtgttctagtcctttactgagcaatgctgtaggctgtgaaactaagcaacctggtcggctttactgttgtgttcagcttgggatttggactatgtctctaagtcatttcttccctgaactagtcatttatattccattgtggtatctcctatttcatttaaaagcacttccattctttccatatattctgctgagatttgtttatggctataaatgagatatggatgggtggtcactgagataattaatatggtttagaactactgattaataaatctaacaggagaccaggagaggcatgacaagaaaatcttaaaaacaggaaaaacccaaaggagagaactaaattaccagtttctaatcatagatactatcttccatttcattgtatagcagtagtatcataagatatgccattttctcagctatctgaaaatttttaaccaattttacacacataaaataattagcttcaattgtgagtccacttacattagtaggtgtgataaaacctcatttaactggaacataggtaatcataactcaaactttttttctactgcctactactaggagaaagaggcaaatgataataaagctggaataaatcagagatttaatttttaaaacaagcctttcaggacatattacatattcgcccagtttcatatgctttctgaatctataatggaggtcagtgaacttttttaatgtaaagggccagtttgtaaataattttggcttttcaggccacatatgatgtctatgagacattcttctttgtgtgtgtgtgtgtgtgtgtgtgtgtgtgtgtgtgttttacagccctttaaaatgataaaaaccattgttaactcacaggcctcataaaacataggctgttggctattattctccaacccttgatctagagaattttaaacattagaattttgttttacatttgttaagctttacgtcatcttcaaatgacaccaaaactcagaattatgatctgcatttaagccaattttaaaataaaataagcagtcaatgctgcctcatttattgaaattcagtagattttagtttatttcttagtagtcagagaattgatttatagctattcaccaaacattcttactaacgtttccttatatctaaatcagattgattctatattttgctttgtttgtaatcaatagccaatgaagaataaggagtattggaagaagcagtgagtcagctttaggtgacctggttcttgtctcaactttgtgatttggggagatacagtttactttccctgagccttaattcttgtgtaactgaagtctaacttaacttcttaatgtccttccagaactaaaattttattgttcattctaatcgttggactactcttgtgaagtttatattttgagttaatacagtttccaaattaacatacatttaaaaaaaaaagggtagtatttttccatttctctgtgtgcacttaggataaacagtgaagtatagcttataaaacaattagtttgagggctgagagtgtaagaggaactataccaaaagtcaggaaacctgagctcttaccctaactctgttaccaactttgctgtgtgaccttaatcaaaacacataacctggaccccatgctcctcaccagtaaatcaagggcctgaattttatggcttagtattcccttccaagctccgaagttgcgtgattctgtgaaaggcagtgattgattcctttgtactcatcttccttttgacctgtttcctcatgatatattggggaacaaatactaaaaagtgttttatactagctttcttgattgacatttccctataatactgatgaatttgggtgatggaaagtaatggaaattgttaaaagttctgctctcaaatctgagtctccttgccctgtgtgccaatgtttaaccatatttgctaatctaagccatattgcgaggatctcaaggatgatacttgtcaagagtttggggccttgagagcacagttttcaaaataatacttagtattttctgactatagagtacatttgtcttgtaaagtatattttaaaatacagagaagtgtgaagtacaaatatctcagtgctactatttaaaaaaacacaattagtatataaatccttccccatttttttgacagtataattttagtatgttaaacttggttacttctttctctcttcctccatcattttccctgcttcctttttcttttgtcatattcttaaaacaattttgcaaccacaggtacccacattgctggcactaccagccttgggctactaccgaggataatggagccagggccttgtagaagcacagaggaagtctagaactgagggggcctatgatacaggaagttcaggaggcagagtctcaaaggaacacctgcctttaataatgtttacagaagtggagaaaggactaaaggacttaaagacatgcaggtgtcttcatcctgattctgtctttgttattgcacaatgactataaaataatgacctaatttttttttttttctggcttggctaatggaaatcgacactagcgcttccccaatattagacttaatctaattccaaagtaacattcaagaaaagaaaaaccagtggaacaggatcagtaagctcagactctccatctccattattttagccttgaccattcttctctaatccttttaaattatcttcagtttccagttcaagttacattgcttcagttacagtttgtttgaccctgtattcagagctgcattatgattcttgtgggccctagatagttttgccatcttagaccccttcttccatacaaaattaaaagtgatattttacaattgtatctgtatgaaatgaatgtattaatattttagattaaaacattttgtttagaagttcagttttttcttatgaggctaaaaaaaattaaaacatttttgtgggcttctaaaaaactgtgggccttaggtactgtgcctaatggataagttggcattgcctgtattctgaagggcatcattggaaaaatagcagtcattattctgtccccttctcccaccaccacagtccttggagaagcctttgccactccatccaggagcactgcagtttccacggttatagatctatagacttgaacttacttccttcccaacctaacgaaaactcacaaggattacttgggaccattcatcctcaaaaaagataggaggcagtggtttgttttagtcttcagatatttttgttttggtcagtccctaatctgtagttttgaaactcgtgccacacttgaaagggaaacatcctactacctttctttcctctccatttcccacaaaccctttccttcatcatcactccctgcattcttacttctcagcatataaatacaagacccttctttctattatttgttgaaagctaggccttcccagtcttctgtccataccattccttccctgcccctaggagtggggttgaggtctgtgacatgcagactgtaagcacagtcagaacctctgcagctctcaacccaacagaggagactgtggcttcaacatgccaacctgagcaggtctcctctgcattaccttcctcccatttctcttcctgggtcctgatgaggtgagctggaggaaccaatagtcaggatgccctggaattgatgttgctctgttttgtgctcacaaaacagccatgtaacacatgagcacctgagttgaagccatccagtcgcaagtcagcagacagcagttgatggaattctcagtagaaattcagtaagggtgcccaaattttattttttttttcacctatactctaccaatatatggtatttaggaaaacttcttttatccaagcacaaagaaaagcacacacatttttataatcatctgcttcatcagggtaaataaataatttaacaaatttgatcagcatctctagtttaccagtactttaatattagttttcttacaaattaatgtattttgcaatatttccagaaaatcactgtgggagaataatgtaatatactttaggatatatttcctgaccttttcttaaatggcttcatgtgctattcccccaaattctgctttctctattttcttttttatttaacctataattatactttctagtatattctgagtctatcttctaagccaccttacatttttcctggaacaagggagggaataaatagttgcctccactaaatcaggaaaaaataaaaatatcccaggggagctgtgattatgccaagagctctaaacagaagtttgagaaggtaaaaattaagttgtagtatctgagttgtttttattttcttcctttggtgtttatgaaggtattcataagaactttaatttcaggggaaaaaatgcctgatttgctatttttgacatttcctcgtctcttaagaagtcagttaaatatgttttcatagtttatattcctgtttcatagattactgtgaaacatgtatttaaacctatgaattataaaatagtatttagattctagcgtgagttaaatagattagtcatatatcttttagatttgtggatttgacatgtaaattatgtgttgtgtataagtaagttagttactaaacatatggcatggttattgataaacttgttgctatttttttccaaatgctatcagtgtttgtggacttttaaaaattagtttgaattttggaatgttctgtgataaaatataatttcaactattttgtacatttaaatatgccatgttgtatatgtctgtatttaaaaatgttgtaaatatctgcattttaagaattatgaaagattttcctcaaaaatgacagaactctccatacttaattgtgacacattataagatatctgattttaagcttttggattttgttctaaaaattaagtttaaacatgctgaaaattccataaaaataaaattttgaaaataaagtgaaaaattgga

SEQ ID NO: 432229 - DNA, 5663 bp, Homo sapiens
gttaacaaaaggattaatgggttgcttaaattagtgagcttcatcagttttatttttaattccttgagataatgaattttaaaagcaataaatacaatgctgtagtttttgacttcttttctaaatatttacatggatttacatgaaagaactaaagagatagtatttgtggaaccaatttaaactcttacatgcctttcaggatttgggaatgtattaacacctgctgctttgtatccagtctaagggagcctatttgtttgttatcacattgacttcctttgatgtcttttagtgttaccctcactcagacccaaggattatgtcttttggggctcccatcatcctgagctagagacacgtgacaggggtacactctcctacaaaaccagccagttactcagtaaagtggacgatagaagaaaaagagctgtttgaacaagggctggctaaatttggccgaagatggaccaaaatttcaaagctaattggaagccgcactgttttacaagtgaagagttatgcaagacagtattttaaaaataaggtcaaatgcggtctggataaagaaacaccaaatcagaagaccggccataatcttcaagttaaaaatgaagataaagggacaaaggcatggacaccatcatgtttaaggggacgtgctgatcccaacttgaatgctgtaaaaattgaaaagttatctgatgatgaagaagtagacatcacagatgaggtggacgagttgtcttctcaaacaccccagaagaattctagcagtgatctcttgttagactttcctaatagtaaaatgcatgaaaccaatcaaggagaattcattacttctgacagccaggaagctctcttttctaagtcttccaggggctgtcttcaaaatgaaaagcaagatgaaacactttcaagctcagaaattacactgtggactgagaaacagagcaatggtgacaaaaaatcaattgaattaaatgaccagaaatttaatgaattgattaaaaactgcaacaagcatgatggaaggggaataatagttgatgccaggcagttgccttctccagagccttgtgaaattcagaaaaatttgaatgataatgaaatgctttttcattcttgccaaatggtagaggaaagccatgaggaagaagagcttaagccaccagaacaggaaatagaaatagatagaaatatcattcaagaagaagaaaaacaagcaattcctgagttttttgaggggcgccaagctaaaacaccagaacgctatttgaaaattagaaattatattttggatcaatgggagatatgcaaaccgaaatacttaaataagacctcagtacgtcctggcctgaagaactgtggagatgttaattgtattggacggattcatacatacctcgaattgataggagcaatcaattttggatgtgaacaggctgtgtataataggccacaaacagttgacaaagtacgaatcagagacagaaaagatgcagtagaagcataccaacttgcccagcgtctgcagtctatgcgtacaaggagacgtagggtccgagacccatggggaaactggtgtgatgcaaaggacttagaaggacaaacgtttgagcatctctctgctgaggagttggcaaaaagaagagaagaggaaaaaggcagacctgttaaatctttaaaagtgccaagaccaacaaaaagctcgtttgatcccttccaactgataccttgtaatttttttagtgaagaaaagcaggagccatttcaggtgaaagtggcttcagaagcacttttaataatggatttgcatgctcatgtttctatggcagaagtgattggtctgttaggaggaagatactcagaagttgataaagtagttgaagtctgtgcagcagaaccatgtaacagtctgagtacaggactacagtgtgagatggatcctgtatcacaaacacaggcctcagaaaccttggctgttagaggcttcagtgttattggatggtatcattctcatcctgcttttgatcctaatccttccttacgagatattgacacacaagctaaataccagagttacttctccagaggaggtgcaaagttcattgggatgattgttagtccctataatcgaaataatcccttaccatattctcagattacctgcctggttataagtgaggaaattagcccagatggctcttatcgcttaccttacaaatttgaagtacagcagatgttagaagaacctcagtggggattagtatttgaaaagacaagatggataatagaaaaatacaggctctcccatagcagcgtccccatggataaaatctttcgccgggattctgacctgacttgtttgcagaaacttttggagtgtatgaggaagactctgagcaaagtgaccaattgctttatggctgaagaattcttgactgaaatagaaaatttgttcctttccaattataaaagcaaccaagagaatggagtaaccgaagagaactgtacaaaggaattgttaatgtgattattttaaagttaagacattttaatcttgacacagtagatcttactttcaaagttataaacttgaagtgattgtagttaacattggcacagctttggtattttttctctatttcacaaaatccaaactttgccacataaatcatgtgaaaagaaagagatacaaatttgttttcatatagtgattatcagagtgttctgcaaaccagggtccaccacggtgttctagtcctttactgagcaatgctgtaggctgtgaaactaagcaacctggtcggctttactgttgtgttcagcttgggatttggactatgtctctaagtcatttcttccctgaactagtcatttatattccattgtggtatctcctatttcatttaaaagcacttccattctttccatatattctgctgagatttgtttatggctataaatgagatatggatgggtggtcactgagataattaatatggtttagaactactgattaataaatctaacaggagaccaggagaggcatgacaagaaaatcttaaaaacaggaaaaacccaaaggagagaactaaattaccagtttctaatcatagatactatcttccatttcattgtatagcagtagtatcataagatatgccattttctcagctatctgaaaatttttaaccaattttacacacataaaataattagcttcaattgtgagtccacttacattagtaggtgtgataaaacctcatttaactggaacataggtaatcataactcaaactttttttctactgcctactactaggagaaagaggcaaatgataataaagctggaataaatcagagatttaatttttaaaacaagcctttcaggacatattacatattcgcccagtttcatatgctttctgaatctataatggaggtcagtgaacttttttaatgtaaagggccagtttgtaaataattttggcttttcaggccacatatgatgtctatgagacattcttctttgtgtgtgtgtgtgtgtgtgtgtgtgtgtgtgtgtgttttacagccctttaaaatgataaaaaccattgttaactcacaggcctcataaaacataggctgttggctattattctccaacccttgatctagagaattttaaacattagaattttgttttacatttgttaagctttacgtcatcttcaaatgacaccaaaactcagaattatgatctgcatttaagccaattttaaaataaaataagcagtcaatgctgcctcatttattgaaattcagtagattttagtttatttcttagtagtcagagaattgatttatagctattcaccaaacattcttactaacgtttccttatatctaaatcagattgattctatattttgctttgtttgtaatcaatagccaatgaagaataaggagtattggaagaagcagtgagtcagctttaggtgacctggttcttgtctcaactttgtgatttggggagatacagtttactttccctgagccttaattcttgtgtaactgaagtctaacttaacttcttaatgtccttccagaactaaaattttattgttcattctaatcgttggactactcttgtgaagtttatattttgagttaatacagtttccaaattaacatacatttaaaaaaaaaagggtagtatttttccatttctctgtgtgcacttaggataaacagtgaagtatagcttataaaacaattagtttgagggctgagagtgtaagaggaactataccaaaagtcaggaaacctgagctcttaccctaactctgttaccaactttgctgtgtgaccttaatcaaaacacataacctggaccccatgctcctcaccagtaaatcaagggcctgaattttatggcttagtattcccttccaagctccgaagttgcgtgattctgtgaaaggcagtgattgattcctttgtactcatcttccttttgacctgtttcctcatgatatattggggaacaaatactaaaaagtgttttatactagctttcttgattgacatttccctataatactgatgaatttgggtgatggaaagtaatggaaattgttaaaagttctgctctcaaatctgagtctccttgccctgtgtgccaatgtttaaccatatttgctaatctaagccatattgcgaggatctcaaggatgatacttgtcaagagtttggggccttgagagcacagttttcaaaataatacttagtattttctgactatagagtacatttgtcttgtaaagtatattttaaaatacagagaagtgtgaagtacaaatatctcagtgctactatttaaaaaaacacaattagtatataaatccttccccatttttttgacagtataattttagtatgttaaacttggttacttctttctctcttcctccatcattttccctgcttcctttttcttttgtcatattcttaaaacaattttgcaaccacaggtacccacattgctggcactaccagccttgggctactaccgaggataatggagccagggccttgtagaagcacagaggaagtctagaactgagggggcctatgatacaggaagttcaggaggcagagtctcaaaggaacacctgcctttaataatgtttacagaagtggagaaaggactaaaggacttaaagacatgcaggtgtcttcatcctgattctgtctttgttattgcacaatgactataaaataatgacctaatttttttttttttctggcttggctaatggaaatcgacactagcgcttccccaatattagacttaatctaattccaaagtaacattcaagaaaagaaaaaccagtggaacaggatcagtaagctcagactctccatctccattattttagccttgaccattcttctctaatccttttaaattatcttcagtttccagttcaagttacattgcttcagttacagtttgtttgaccctgtattcagagctgcattatgattcttgtgggccctagatagttttgccatcttagaccccttcttccatacaaaattaaaagtgatattttacaattgtatctgtatgaaatgaatgtattaatattttagattaaaacattttgttt

SEQ ID NO: 432230 - DNA, 5535 bp, Homo sapiens
gttaacaaaaggattaatgggttgcttaaattagtgagcttcatcagttttatttttaattccttgagataatgaattttaaaagcaataaatacaatgctgtagtttttgacttcttttctaaatatttacatggatttacatgaaagaactaaagagatagtatttgtggaaccaatttaaactcttacatgcctttcaggatttgggaatgtattaacacctgctgctttgtatccagtctaagggagcctatttgtttgttatcacattgacttcctttgatgtcttttagtgttaccctcactcagacccaaggattatgtcttttggggctcccatcatcctgagctagagacacgtgacaggggtacactctcctacaaaaccagccagttactcagtaaagtggacgatagaagaaaaagagctgtttgaacaagggctggctaaatttggccgaagatggaccaaaatttcaaagctaattggaagccgcactgttttacaagtgaagagttatgcaagacagtattttaaaaataaggtcaaatgcggtctggataaagaaacaccaaatcagaagaccggccataatcttcaagttaaaaatgaagataaagggacaaaggcatggacaccatcatgtttaaggggacgtgctgatcccaacttgaatgctgtaaaaattgaaaagttatctgatgatgaagaagtagacatcacagatgaggtggacgagttgtcttctcaaacaccccagaagaattctagcagtgatctcttgttagactttcctaatagtaaaatgcatgaaaccaatcaaggagaattcattacttctgacagccaggaagctctcttttctaagtcttccaggggctgtcttcaaaatgaaaagcaagatgaaacactttcaagctcagaaattacactgtggactgagaaacagagcaatggtgacaaaaaatcaattgaattaaatgaccagaaatttaatgaattgattaaaaactgcaacaagcatgatggaaggggaataatagttgatgccaggcagttgccttctccagagccttgtgaaattcagaaaaatttgaatgataatgaaatgctttttcattcttgccaaatggtagaggaaagccatgaggaagaagagcttaagccaccagaacaggaaatagaaatagatagaaatatcattcaagaagaagaaaaacaagcaattcctgagttttttgaggggcgccaagctaaaacaccagaacgctatttgaaaattagaaattatattttggatcaatgggagatatgcaaaccgaaatacttaaataagacctcagtacgtcctggcctgaagaactgtggagatgttaattgtattggacggattcatacatacctcgaattgataggagcaatcaattttggatgtgaacaggctgtgtataataggccacaaacagttgacaaagtacgaatcagagacagaaaagatgcagtagaagcataccaacttgcccagcgtctgcagtctatgcgtacaaggagacgtagggtccgagacccatggggaaactggtgtgatgcaaaggacttagaaggacaaacgtttgagcatctctctgctgaggagttggcaaaaagaagagaagaggaaaaaggcagacctgttaaatctttaaaagtgccaagaccaacaaaaagctcgtttgatcccttccaactgataccttgtaatttttttagtgaagaaaagcaggagccatttcaggtgaaagtggcttcagaagcacttttaataatggatttgcatgctcatgtttctatggcagaagtgattggtctgttaggaggaagatactcagaagttgataaagtagttgaagtctgtgcagcagaaccatgtaacagtctgagtacaggactacagtgtgagatggatcctgtatcacaaacacaggcctcagaaaccttggctgttagaggcttcagtgttattggatggtatcattctcatcctgcttttgatcctaatccttccttacgagatattgacacacaagctaaataccagagttacttctccagaggaggtgcaaagttcattgggatgattgttagtccctataatcgaaataatcccttaccatattctcagattacctgcctggttataagtgaggaaattagcccagatggctcttatcgcttaccttacaaatttgaagtacagcagatgttagaagaacctcagtggggattagtatttgaaaagacaagatggataatagaaaaatacaggctctcccatagcagcgtccccatggataaaatctttcgccgggattctgacctgacttgtttgcagaaacttttggagtgtatgaggaagactctgagcaaagtgaccaattgctttatggctgaagaattcttgactgaaatagaaaatttgttcctttccaattataaaagcaaccaagagaatggagtaaccgaagagaactgtacaaaggaattgttaatgtgattattttaaagttaagacattttaatcttgacacagtagatcttactttcaaagttataaacttgaagtgattgtagttaacattggcacagctttggtattttttctctatttcacaaaatccaaactttgccacataaatcatgtgaaaagaaagagatacaaatttgttttcatatagtgattatcagagtgttctgcaaaccagggtccaccacggtgttctagtcctttactgagcaatgctgtaggctgtgaaactaagcaacctggtcggctttactgttgtgttcagcttgggatttggactatgtctctaagtcatttcttccctgaactagtcatttatattccattgtggtatctcctatttcatttaaaagcacttccattctttccatatattctgctgagatttgtttatggctataaatgagatatggatgggtggtcactgagataattaatatggtttagaactactgattaataaatctaacaggagaccaggagaggcatgacaagaaaatcttaaaaacaggaaaaacccaaaggagagaactaaattaccagtttctaatcatagatactatcttccatttcattgtatagcagtagtatcataagatatgccattttctcagctatctgaaaatttttaaccaattttacacacataaaataattagcttcaattgtgagtccacttacattagtaggtgtgataaaacctcatttaactggaacataggtaatcataactcaaactttttttctactgcctactactaggagaaagaggcaaatgataataaagctggaataaatcagagatttaatttttaaaacaagcctttcaggacatattacatattcgcccagtttcatatgctttctgaatctataatggaggtcagtgaacttttttaatgtaaagggccagtttgtaaataattttggcttttcaggccacatatgatgtctatgagacattcttctttgtgtgtgtgtgtgtgtgtgtgtgtgtgtgtgtgtgttttacagccctttaaaatgataaaaaccattgttaactcacaggcctcataaaacataggctgttggctattattctccaacccttgatctagagaattttaaacattagaattttgttttacatttgttaagctttacgtcatcttcaaatgacaccaaaactcagaattatgatctgcatttaagccaattttaaaataaaataagcagtcaatgctgcctcatttattgaaattcagtagattttagtttatttcttagtagtcagagaattgatttatagctattcaccaaacattcttactaacgtttccttatatctaaatcagattgattctatattttgctttgtttgtaatcaatagccaatgaagaataaggagtattggaagaagcagtgagtcagctttaggtgacctggttcttgtctcaactttgtgatttggggagatacagtttactttccctgagccttaattcttgtgtaactgaagtctaacttaacttcttaatgtccttccagaactaaaattttattgttcattctaatcgttggactactcttgtgaagtttatattttgagttaatacagtttccaaattaacatacatttaaaaaaaaaagggtagtatttttccatttctctgtgtgcacttaggataaacagtgaagtatagcttataaaacaattagtttgagggctgagagtgtaagaggaactataccaaaagtcaggaaacctgagctcttaccctaactctgttaccaactttgctgtgtgaccttaatcaaaacacataacctggaccccatgctcctcaccagtaaatcaagggcctgaattttatggcttagtattcccttccaagctccgaagttgcgtgattctgtgaaaggcagtgattgattcctttgtactcatcttccttttgacctgtttcctcatgatatattggggaacaaatactaaaaagtgttttatactagctttcttgattgacatttccctataatactgatgaatttgggtgatggaaagtaatggaaattgttaaaagttctgctctcaaatctgagtctccttgccctgtgtgccaatgtttaaccatatttgctaatctaagccatattgcgaggatctcaaggatgatacttgtcaagagtttggggccttgagagcacagttttcaaaataatacttagtattttctgactatagagtacatttgtcttgtaaagtatattttaaaatacagagaagtgtgaagtacaaatatctcagtgctactatttaaaaaaacacaattagtatataaatccttccccatttttttgacagtataattttagtatgttaaacttggttacttctttctctcttcctccatcattttccctgcttcctttttcttttgtcatattcttaaaacaattttgcaaccacaggtacccacattgctggcactaccagccttgggctactaccgaggataatggagccagggccttgtagaagcacagaggaagtctagaactgagggggcctatgatacaggaagttcaggaggcagagtctcaaaggaacacctgcctttaataatgtttacagaagtggagaaaggactaaaggacttaaagacatgcaggtgtcttcatcctgattctgtctttgttattgcacaatgactataaaataatgacctaatttttttttttttctggcttggctaatggaaatcgacactagcgcttccccaatattagacttaatctaattccaaagtaacattcaagaaaagaaaaaccagtggaacaggatcagtaagctcagactctccatctccattattttagccttgtcttctccaaaattactgagtaggagtttattttatctttttgagacggggatcactgtcacccagactggagtgcagtggtgggatcttgactactcccg

SEQ ID NO: 432231 - DNA, 1705 bp, Homo sapiens
gttaacaaaaggattaatgggttgcttaaattagtgagcttcatcagttttatttttaattccttgagataatgaattttaaaagcaataaatacaatgctgtagtttttgacttcttttctaaatatttacatggatttacatgaaagaactaaagagatagtatttgtggaaccaatttaaactcttacatgcctttcaggatttgggaatgtattaacacctgctgctttgtatccagtctaagggagcctatttgtttgttatcacattgacttcctttgatgtcttttagtgttaccctcactcagacccaaggattatgtcttttggggctcccatcatcctgagctagagacacgtgacaggggtacactctcctacaaaaccagccagttactcagtaaagtggacgatagaagaaaaagagctgtttgaacaagggctggctaaatttggccgaagatggaccaaaatttcaaagctaattggaagccgcactgttttacaagtgaagagttatgcaagacagtattttaaaaataaggtcaaatgcggtctggataaagaaacaccaaatcagaagaccggccataatcttcaagttaaaaatgaagataaagggacaaaggcatggacaccatcatgtttaaggggacgtgctgatcccaacttgaatgctgtaaaaattgaaaagttatctgatgatgaagaagtagacatcacagatgaggtggacgagttgtcttctcaaacaccccagaagaattctagcagtgatctcttgttagactttcctaatagtaaaatgcatgaaaccaatcaaggagaattcattacttctgacagccaggaagctctcttttctaagtcttccaggggctgtcttcaaaatgaaaagcaagatgaaacactttcaagctcagaaattacactgtggactgagaaacagagcaatggtgacaaaaaatcaattgaattaaatgaccagaaatttaatgaattgattaaaaactgcaacaagcatgatggaaggggaataatagttgatgccaggcagttgccttctccagagccttgtgaaattcagaaaaatttgaatgataatgaaatgctttttcattcttgccaaatggtagaggaaagccatgaggaagaagagcttaagccaccagaacaggaaatagaaatagatagaaatatcattcaagaagaagaaaaacaagcaattcctgagttttttgaggggcgccaagctaaaacaccagaacgctatttgaaaattagaaattatattttggatcaatggtaagaaagaattacattatagatgttgttttaaaacgtgatattctgaagtattttaattaggcctatacagaatttagaattttgctagtaaatctagagatcactacagtagggaagatttaagatttcttgtaatgaaaaaaagctttggtaaacattatcacctataactctcataacccatctttttgcctattcattagattgtgggcctggaataaaagggatagacgattgctttatgaagcagtctcctaggacagcgttaggaagatatagagagaacaccactgcacgggaaaagggaaataattctttccggtttatcatgtactttgagtacaaagatagaaaaatttgatgacagcagtagtattaaatgtggccagattgc

SEQ ID NO: 432232 - DNA, 3618 bp, Homo sapiens
  misc_feature (3579)..(3579): n is a, c, g, or t
gttaacaaaaggattaatgggttgcttaaattagtgagcttcatcagttttatttttaattccttgagataatgaattttaaaagcaataaatacaatgctgtagtttttgacttcttttctaaatatttacatggatttacatgaaagaactaaagagatagtatttgtggaaccaatttaaactcttacatgcctttcaggatttgggaatgtattaacacctgctgctttgtatccagtctaagggagcctatttgtttgttatcacattgacttcctttgatgtcttttagtgttaccctcactcagacccaaggattatgtcttttggggctcccatcatcctgagctagagacacgtgacaggggtacactctcctacaaaaccagccagttactcagtaaagtggacgatagaagaaaaagagctgtttgaacaagggctggctaaatttggccgaagatggaccaaaatttcaaagctaattggaagccgcactgttttacaagtgaagagttatgcaagacagtattttaaaaataaggtcaaatgcggtctggataaagaaacaccaaatcagaagaccggccataatcttcaagttaaaaatgaagataaagggacaaaggcatggacaccatcatgtttaaggggacgtgctgatcccaacttgaatgctgtaaaaattgaaaagttatctgatgatgaagaagtagacatcacagatgaggtggacgagttgtcttctcaaacaccccagaagaattctagcagtgatctcttgttagactttcctaatagtaaaatgcatgaaaccaatcaaggagaattcattacttctgacagccaggaagctctcttttctaagtcttccaggggctgtcttcaaaatgaaaagcaagatgaaacactttcaagctcagaaattacactgtggactgagaaacagagcaatggtgacaaaaaatcaattgaattaaatgaccagaaatttaatgaattgattaaaaactgcaacaagcatgatggaaggggaataatagttgatgccaggcagttgccttctccagagccttgtgaaattcagaaaaatttgaatgataatgaaatgctttttcattcttgccaaatggtagaggaaagccatgaggaagaagagcttaagccaccagaacaggaaatagaaatagatagaaatatcattcaagaagaagaaaaacaagcaattcctgagttttttgaggggcgccaagctaaaacaccagaacgctatttgaaaattagaaattatattttggatcaatgggagatatgcaaaccgaaatacttaaataagacctcagtacgtcctggcctgaagaactgtggagatgttaattgtattggacggattcatacatacctcgaattgataggagcaatcaattttggatgtgaacaggctgtgtataataggccacaaacagttgacaaagtacgaatcagagacagaaaagatgcagtagaagcataccaacttgcccagcgtctgcagtctatgcgtacaaggagacgtagggtccgagacccatggggaaactggtgtgatgcaaaggacttagaaggacaaacgtttgagcatctctctgctgaggagttggcaaaaagaagagaagaggaaaaaggcagacctgttaaatctttaaaagtgccaagaccaacaaaaagctcgtttgatcccttccaactgataccttgtaatttttttagtgaagaaaagcaggagccatttcaggtgaaagtggcttcagaagcacttttaataatggatttgcatgctcatgtttctatggcagaagtgattggtctgttaggaggaagatactcagaagttgataaagtagttgaagtctgtgcagcagaaccatgtaacagtctgagtacaggactacagtgtgagatggatcctgtatcacaaacacaggcctcagaaaccttggctgttagaggcttcagtgttattggatggtatcattctcatcctgcttttgatcctaatccttccttacgagatattgacacacaagctaaataccagagttacttctccagaggaggtgcaaagttcattgggatgattgttagtccctataatcgaaataatcccttaccatattctcagattacctgcctggttataagtgaggaaattagcccagatggctcttatcgcttaccttacaaatttgaagtacagcagatgttagaagaacctcagtggggattagtatttgaaaagacaagatggataatagaaaaatacaggctctcccatagcagcgtccccatggataaaatctttcgccgggattctgacctgacttgtttgcagaaacttttggagtgtatgaggaagactctgagcaaagtgaccaattgctttatggctgaagaattcttgactgaaatagaaaatttgttcctttccaattataaaagcaaccaagagaatggagtaaccgaagagaactgtacaaaggaattgttaatgtgattattttaaagttaagacattttaatcttgacacagtagatcttactttcaaagttataaacttgaagtgattgtagttaacattggcacagctttggtattttttctctatttcacaaaatccaaactttgccacataaatcatgtgaaaagaaagagatacaaatttgttttcatatagtgattatcagagtgttctgcaaaccagggtccaccacggtgttctagtcctttactgagcaatgctgtaggctgtgaaactaagcaacctggtcggctttactgttgtgttcagcttgggatttggactatgtctctaagtcatttcttccctgaactagtcatttatattccattgtggtatctcctatttcatttaaaagcacttccattctttccatatattctgctgagatttgtttatggctataaatgagatatggatgggtggtcactgagataattaatatggtttagaactactgattaataaatctaacaggagaccaggagaggcatgacaagaaaatcttaaaaacaggaaaaacccaaaggagagaactaaattaccagtttctaatcatagatactatcttccatttcattgtatagcagtagtatcataagatatgccattttctcagctatctgaaaatttttaaccaattttacacacataaaataattagcttcaattgtgagtccacttacattagtaggtgtgataaaacctcatttaactggaacataggtaatcataactcaaactttttttctactgcctactactaggagaaagaggcaaatgataataaagctggaataaatcagagatttaatttttaaaacaagcctttcaggacatattacatattcgcccagtttcatatgctttctgaatctataatggaggtcagtgaacttttttaatgtaaagggccagtttgtaaataattttggcttttcaggccacatatgatgtctatgagacattcttctttgtgtgtgtgtgtgtgtgtgtgtgtgtgtgtgtgtgtgtgtgngtgtgcttcacagggaccgagccgaattctaatcaggtc

SEQ ID NO: 432233 - DNA, 1643 bp, Homo sapiens
gttaacaaaaggattaatgggttgcttaaattagtgagcttcatcagttttatttttaattccttgagataatgaattttaaaagcaataaatacaatgctgtagtttttgacttcttttctaaatatttacatggatttacatgaaagaactaaagagatagtatttgtggaaccaatttaaactcttacatgcctttcaggatttgggaatgtattaacacctgctgctttgtatccagtctaagggagcctatttgtttgttatcacattgacttcctttgatgtcttttagtgttaccctcactcagacccaaggattatgtcttttggggctcccatcatcctgagctagagacacgtgacaggggtacactctcctacaaaaccagccagttactcagtaaagtggacgatagaagaaaaagagctgtttgaacaagggctggctaaatttggccgaagatggaccaaaatttcaaagctaattggaagccgcactgttttacaagtgaagagttatgcaagacagtattttaaaaataaggtcaaatgcggtctggataaagaaacaccaaatcagaagaccggccataatcttcaagttaaaaatgaagataaagggacaaaggcatggacaccatcatgtttaaggggacgtgctgatcccaacttgaatgctgtaaaaattgaaaagttatctgatgatgaagaagtagacatcacagatgaggtggacgagttgtcttctcaaacaccccagaagaattctagcagtgatctcttgttagactttcctaatagtaaaatgcatgaaaccaatcaaggagaattcattacttctgacagccaggaagctctcttttctaagtcttccaggggctgtcttcaaaatgaaaagcaagatgaaacactttcaagctcagaaattacactgtggactgagaaacagagcaatggtgacaaaaaatcaattgaattaaatgaccagaaatttaatgaattgattaaaaactgcaacaagcatgatggaaggggaataatagttgatgccaggcagttgccttctccagagccttgtgaaattcagaaaaatttgaatgataatgaaatgctttttcattcttgccaaatggtagaggaaagccatgaggaagaagagcttaagccaccagaacaggaaatagaaatagatagaaatatcattcaagaagaagaaaaacaagcaattcctgagttttttgaggggcgccaagctaaaacaccagaacgctatttgaaaattagaaattatattttggatcaatgggagatatgcaaaccgaaatacttaaataagacctcagtacgtcctggcctgaagaactgtggagatgttaattgtattggacggattcatacatacctcgaattgataggagcaatcaattttggatgtggtaaaaataaaaacccaacaacatcttttactcgacattttttatccttacagcacttattcatttctatgatggttagaattcaagtagttataggtatatagaattcagaggtgctgtaacattatttaataaatgttttattaagattttactgttggttaaactgtgttttcatttgacctacactgaaaattgagagtg

SEQ ID NO: 432234 - DNA, 2615 bp, Homo sapiens
agtgggcatgctgggcaacccctctggcccccagggacagcagcacagggccttgacgcttaggctccaaagtccggaggtgcagaaagccaggaccaagagacaggcagctcaccagggtggacaaatcgccagagatgtggtgcattgtcctgttttcacttttggcatgggtttatgctgagcctaccatgtatggggagatcctgtcccctaactatcctcaggcatatcccagtgaggtagagaaatcttgggacatagaagttcctgaagggtatgggattcacctctacttcacccatctggacattgagctgtcagagaactgtgcgtatgactcagtgcagataatctcaggagacactgaagaagggaggctctgtggacagaggagcagtaacaatccccactctccaattgtggaagagttccaagtcccatacaacaaactccaggtgatctttaagtcagacttttccaatgaagagcgttttacggggtttgctgcatactatgttgccacagacataaatgaatgcacagattttgtagatgtcccttgtagccacttctgcaacaatttcattggtggttacttctgctcctgccccccggaatatttcctccatgatgacatgaagaattgcggagttaattgcagtggggatgtattcactgcactgattggggagattgcaagtcccaattatcccaaaccatatccagagaactcaaggtgtgaataccagatccggttggagaaagggttccaagtggtggtgaccttgcggagagaagattttgatgtggaagcagctgactcagcgggaaactgccttgacagtttagtttttgttgcaggagatcggcaatttggtccttactgtggtcatggattccctgggcctctaaatattgaaaccaagagtaatgctcttgatatcatcttccaaactgatctaacagggcaaaaaaagggctggaaacttcgctatcatggagatccaatgccctgccctaaggaagacactcccaattctgtttgggagcctgcgaaggcaaaatatgtctttagagatgtggtgcagataacctgtctggatgggtttgaagttgtggagaaataagtggtgatgtttattattctccagggacgtgttggtgcaacatctttctattcgacttgtcaaagcaatggaaagtggagtaattccaaactgaaatgtcaacctgtggactgtggcattcctgaatccattgagaatggtaaagttgaagacccagagagcactttgtttggttctgtcatccgctacacttgtgaggagccatattactacatggaaaatggaggaggtggggagtatcactgtgctggtaacgggagctgggtgaatgaggtgctgggcccggagctgccgaaatgtgttccagtctgtggagtccccagagaaccctttgaagaaaaacagaggataattggaggatccgatgcagatattaaaaacttcccctggcaagtcttctttgacaacccatgggctggtggagcgctcattaatgagtactgggtgctgacggctgctcatgttgtggagggaaacagggagccaacaatgtatgttgggtccacctcagtgcagacctcacggctggcaaaatccaagatgctcactcctgagcatgtgtttattcatccgggatggaagctgctggaagtcccagaaggacgaaccaattttgataatgacattgcactggtgcggctgaaagacccagtgaaaatgggacccaccgtctctcccatctgcctaccaggcacctcttccgactacaacctcatggatggggacctgggactgatctcaggctggggccgaacagagaagagagatcgtgctgttcgcctcaaggcggcaaggttacctgtagctcctttaagaaaatgcaaagaagtgaaagtggagaaacccacagcagatgcagaggcctatgttttcactcctaacatgatctgtgctggaggagagaagggcatggatagctgtaaaggggacagtggtggggcctttgctgtacaggatcccaatgacaagaccaaattctacgcagctggcctggtgtcctgggggccccagtgtgggacctatgggctctacacacgggtaaagaactatgttgactggataatgaagactatgcaggaaaatagcaccccccgtgaggactaatccagatacatcccaccagcctctccaagggtggtgaccaatgcattaccttctgttccttatgatattctcattatttcatcatgactgaaagaagacacgagcgaatgatttaaatagaacttgattgttgagacgccttgctagaggtagagtttgatcatagaattgtgctggtcatacatttgtggtctgactccttggggtcctttccccggagtacctattgtagataacactatgggtggggcactcctttcttgcactattccacagggataccttaattctttgtttcctctttacctgttcaaaattccatttacttgatcattctcagtatccactgtctatgtacaataaaggatgtttataagcaaa

SEQ ID NO: 432235 - DNA, 492 bp, Homo sapiens
acataccaaggcaccacacaccacctgtccaaaaggccttcgatacgggataatcctatttattacctcagaagtttttttcttcgcaggatttttctgagccttttaccattccagcctagcccctaccccccaattaggagggcactggcccccaacaggcatcaccccgctaaatcccctagaagtcccactcctaaacacatccgtattactcgcatcaggagtatcaatcacctgagctcaccatagtctaaatgcaatcatttgatcatagaattgtgctggtcatacatttgtggtctgactccttggggtcctttccccggagtacctattgtagataacactatgggtggggcactcctttcttgcactattccacagggataccttaattctttgtttcctctttacctgttcaaaattccatttacttgatcattctcagtatccactgtctatgtacaataaaggatgtttataagcaaa

SEQ ID NO: 432236 - DNA, 2704 bp, Homo sapiens
atgcacactcgggtagggaatcttatgaacagaaccaggacagggaggctggccggaggttcctgcagagggagcgtcaaggccctgtgctgctgtccctgggggccagaggggttgcccagcatgcccactggcaggagagagggaactgacccacttgctcctaccagcttctgaagtaggctccaaagtccggaggtgcagaaagccaggaccaagagacaggcagctcaccagggtggacaaatcgccagagatgtggtgcattgtcctgttttcacttttggcatgggtttatgctgagcctaccatgtatggggagatcctgtcccctaactatcctcaggcatatcccagtgaggtagagaaatcttgggacatagaagttcctgaagggtatgggattcacctctacttcacccatctggacattgagctgtcagagaactgtgcgtatgactcagtgcagataatctcaggagacactgaagaagggaggctctgtggacagaggagcagtaacaatccccactctccaattgtggaagagttccaagtcccatacaacaaactccaggtgatctttaagtcagacttttccaatgaagagcgttttacggggtttgctgcatactatgttgccacagacataaatgaatgcacagattttgtagatgtcccttgtagccacttctgcaacaatttcattggtggttacttctgctcctgccccccggaatatttcctccatgatgacatgaagaattgcggagttaattgcagtggggatgtattcactgcactgattggggagattgcaagtcccaattatcccaaaccatatccagagaactcaaggtgtgaataccagatccggttggagaaagggttccaagtggtggtgaccttgcggagagaagattttgatgtggaagcagctgactcagcgggaaactgccttgacagtttagtttttgttgcaggagatcggcaatttggtccttactgtggtcatggattccctgggcctctaaatattgaaaccaagagtaatgctcttgatatcatcttccaaactgatctaacagggcaaaaaaagggctggaaacttcgctatcatggagatccaatgccctgccctaaggaagacactcccaattctgtttgggagcctgcgaaggcaaaatatgtctttagagatgtggtgcagataacctgtctggatgggtttgaagttgtggagggacgtgttggtgcaacatctttctattcgacttgtcaaagcaatggaaagtggagtaattccaaactgaaatgtcaacctgtggactgtggcattcctgaatccattgagaatggtaaagttgaagacccagagagcactttgtttggttctgtcatccgctacacttgtgaggagccatattactacatggaaaatggaggaggtggggagtatcactgtgctggtaacgggagctgggtgaatgaggtgctgggcccggagctgccgaaatgtgttccagtctgtggagtccccagagaaccctttgaagaaaaacagaggataattggaggatccgatgcagatattaaaaacttcccctggcaagtcttctttgacaacccatgggctggtggagcgctcattaatgagtactgggtgctgacggctgctcatgttgtggagggaaacagggagccaacaatgtatgttgggtccacctcagtgcagacctcacggctggcaaaatccaagatgctcactcctgagcatgtgtttattcatccgggatggaagctgctggaagtcccagaaggacgaaccaattttgataatgacattgcactggtgcggctgaaagacccagtgaaaatgggacccaccgtctctcccatctgcctaccaggcacctcttccgactacaacctcatggatggggacctgggactgatctcaggctggggccgaacagagaagagagatcgtgctgttcgcctcaaggcggcaaggttacctgtagctcctttaagaaaatgcaaagaagtgaaagtggagaaacccacagcagatgcagaggcctatgttttcactcctaacatgatctgtgctggaggagagaagggcatggatagctgtaaaggggacagtggtggggcctttgctgtacaggatcccaatgacaagaccaaattctacgcagctggcctggtgtcctgggggccccagtgtgggacctatgggctctacacacgggtaaagaactatgttgactggataatgaagactatgcaggaaaatagcaccccccgtgaggactaatccagatacatcccaccagcctctccaagggtggtgaccaatgcattaccttctgttccttatgatattctcattatttcatcatgactgaaagaagacacgagcgaatgatttaaatagaacttgattgttgagacgccttgctagaggtagagtttgatcatagaattgtgctggtcatacatttgtggtctgactccttggggtcctttccccggagtacctattgtagataacactatgggtggggcactcctttcttgcactattccacagggataccttaattctttgtttcctctttacctgttcaaaattccatttacttgatcattctcagtatccactgtctatgtacaataaaggatgtttataagcaaa

SEQ ID NO: 432237 - DNA, 2788 bp, Homo sapiens
atgcacactcgggtagggaatcttatgaacagaaccaggacagggaggctggccggaggttcctgcagagggagcgtcaaggccctgtgctgctgtccctgggggccagaggggttgcccagcatgcccactggcaggagagagggaactgacccacttgctcctaccagcttctgaaggtgacactgagccccaggtgacgccgcaccaccaaagaaggtgcttgtgtttgtcagacaaatacagccaggcctgccaccccttaggctccaaagtccggaggtgcagaaagccaggaccaagagacaggcagctcaccagggtggacaaatcgccagagatgtggtgcattgtcctgttttcacttttggcatgggtttatgctgagcctaccatgtatggggagatcctgtcccctaactatcctcaggcatatcccagtgaggtagagaaatcttgggacatagaagttcctgaagggtatgggattcacctctacttcacccatctggacattgagctgtcagagaactgtgcgtatgactcagtgcagataatctcaggagacactgaagaagggaggctctgtggacagaggagcagtaacaatccccactctccaattgtggaagagttccaagtcccatacaacaaactccaggtgatctttaagtcagacttttccaatgaagagcgttttacggggtttgctgcatactatgttgccacagacataaatgaatgcacagattttgtagatgtcccttgtagccacttctgcaacaatttcattggtggttacttctgctcctgccccccggaatatttcctccatgatgacatgaagaattgcggagttaattgcagtggggatgtattcactgcactgattggggagattgcaagtcccaattatcccaaaccatatccagagaactcaaggtgtgaataccagatccggttggagaaagggttccaagtggtggtgaccttgcggagagaagattttgatgtggaagcagctgactcagcgggaaactgccttgacagtttagtttttgttgcaggagatcggcaatttggtccttactgtggtcatggattccctgggcctctaaatattgaaaccaagagtaatgctcttgatatcatcttccaaactgatctaacagggcaaaaaaagggctggaaacttcgctatcatggagatccaatgccctgccctaaggaagacactcccaattctgtttgggagcctgcgaaggcaaaatatgtctttagagatgtggtgcagataacctgtctggatgggtttgaagttgtggagggacgtgttggtgcaacatctttctattcgacttgtcaaagcaatggaaagtggagtaattccaaactgaaatgtcaacctgtggactgtggcattcctgaatccattgagaatggtaaagttgaagacccagagagcactttgtttggttctgtcatccgctacacttgtgaggagccatattactacatggaaaatggaggaggtggggagtatcactgtgctggtaacgggagctgggtgaatgaggtgctgggcccggagctgccgaaatgtgttccagtctgtggagtccccagagaaccctttgaagaaaaacagaggataattggaggatccgatgcagatattaaaaacttcccctggcaagtcttctttgacaacccatgggctggtggagcgctcattaatgagtactgggtgctgacggctgctcatgttgtggagggaaacagggagccaacaatgtatgttgggtccacctcagtgcagacctcacggctggcaaaatccaagatgctcactcctgagcatgtgtttattcatccgggatggaagctgctggaagtcccagaaggacgaaccaattttgataatgacattgcactggtgcggctgaaagacccagtgaaaatgggacccaccgtctctcccatctgcctaccaggcacctcttccgactacaacctcatggatggggacctgggactgatctcaggctggggccgaacagagaagagagatcgtgctgttcgcctcaaggcggcaaggttacctgtagctcctttaagaaaatgcaaagaagtgaaagtggagaaacccacagcagatgcagaggcctatgttttcactcctaacatgatctgtgctggaggagagaagggcatggatagctgtaaaggggacagtggtggggcctttgctgtacaggatcccaatgacaagaccaaattctacgcagctggcctggtgtcctgggggccccagtgtgggacctatgggctctacacacgggtaaagaactatgttgactggataatgaagactatgcaggaaaatagcaccccccgtgaggactaatccagatacatcccaccagcctctccaagggtggtgaccaatgcattaccttctgttccttatgatattctcattatttcatcatgactgaaagaagacacgagcgaatgatttaaatagaacttgattgttgagacgccttgctagaggtagagtttgatcatagaattgtgctggtcatacatttgtggtctgactccttggggtcctttccccggagtacctattgtagataacactatgggtggggcactcctttcttgcactattccacagggataccttaattctttgtttcctctttacctgttcaaaattccatttacttgatcattctcagtatccactgtctatgtacaataaaggatgtttataagcaaa

SEQ ID NO: 432238 - DNA, 2684 bp, Homo sapiens
actagggagggtgtgaggggcacggtgccatgtggggatgttggtgatatggccctgtgtgttatacctttgaaggtgacactgagccccaggtgacgccgcaccaccaaagaaggtgcttgtgtttgtcagacaaatacagccaggcctgccaccccttaggctccaaagtccggaggtgcagaaagccaggaccaagagacaggcagctcaccagggtggacaaatcgccagagatgtggtgcattgtcctgttttcacttttggcatgggtttatgctgagcctaccatgtatggggagatcctgtcccctaactatcctcaggcatatcccagtgaggtagagaaatcttgggacatagaagttcctgaagggtatgggattcacctctacttcacccatctggacattgagctgtcagagaactgtgcgtatgactcagtgcagataatctcaggagacactgaagaagggaggctctgtggacagaggagcagtaacaatccccactctccaattgtggaagagttccaagtcccatacaacaaactccaggtgatctttaagtcagacttttccaatgaagagcgttttacggggtttgctgcatactatgttgccacagacataaatgaatgcacagattttgtagatgtcccttgtagccacttctgcaacaatttcattggtggttacttctgctcctgccccccggaatatttcctccatgatgacatgaagaattgcggagttaattgcagtggggatgtattcactgcactgattggggagattgcaagtcccaattatcccaaaccatatccagagaactcaaggtgtgaataccagatccggttggagaaagggttccaagtggtggtgaccttgcggagagaagattttgatgtggaagcagctgactcagcgggaaactgccttgacagtttagtttttgttgcaggagatcggcaatttggtccttactgtggtcatggattccctgggcctctaaatattgaaaccaagagtaatgctcttgatatcatcttccaaactgatctaacagggcaaaaaaagggctggaaacttcgctatcatggagatccaatgccctgccctaaggaagacactcccaattctgtttgggagcctgcgaaggcaaaatatgtctttagagatgtggtgcagataacctgtctggatgggtttgaagttgtggagggacgtgttggtgcaacatctttctattcgacttgtcaaagcaatggaaagtggagtaattccaaactgaaatgtcaacctgtggactgtggcattcctgaatccattgagaatggtaaagttgaagacccagagagcactttgtttggttctgtcatccgctacacttgtgaggagccatattactacatggaaaatggaggaggtggggagtatcactgtgctggtaacgggagctgggtgaatgaggtgctgggcccggagctgccgaaatgtgttccagtctgtggagtccccagagaaccctttgaagaaaaacagaggataattggaggatccgatgcagatattaaaaacttcccctggcaagtcttctttgacaacccatgggctggtggagcgctcattaatgagtactgggtgctgacggctgctcatgttgtggagggaaacagggagccaacaatgtatgttgggtccacctcagtgcagacctcacggctggcaaaatccaagatgctcactcctgagcatgtgtttattcatccgggatggaagctgctggaagtcccagaaggacgaaccaattttgataatgacattgcactggtgcggctgaaagacccagtgaaaatgggacccaccgtctctcccatctgcctaccaggcacctcttccgactacaacctcatggatggggacctgggactgatctcaggctggggccgaacagagaagagagatcgtgctgttcgcctcaaggcggcaaggttacctgtagctcctttaagaaaatgcaaagaagtgaaagtggagaaacccacagcagatgcagaggcctatgttttcactcctaacatgatctgtgctggaggagagaagggcatggatagctgtaaaggggacagtggtggggcctttgctgtacaggatcccaatgacaagaccaaattctacgcagctggcctggtgtcctgggggccccagtgtgggacctatgggctctacacacgggtaaagaactatgttgactggataatgaagactatgcaggaaaatagcaccccccgtgaggactaatccagatacatcccaccagcctctccaagggtggtgaccaatgcattaccttctgttccttatgatattctcattatttcatcatgactgaaagaagacacgagcgaatgatttaaatagaacttgattgttgagacgccttgctagaggtagagtttgatcatagaattgtgctggtcatacatttgtggtctgactccttggggtcctttccccggagtacctattgtagataacactatgggtggggcactcctttcttgcactattccacagggataccttaattctttgtttcctctttacctgttcaaaattccatttacttgatcattctcagtatccactgtctatgtacaataaaggatgtttataagcaaa

SEQ ID NO: 432239 - DNA, 2320 bp, Homo sapiens
gaaactccgtctcaaaataataataataatattaggaataggctggcagtaggagtttctatagattgcggtgtttgcaaacaccataatctcaggagacactgaagaagggaggctctgtggacagaggagcagtaacaatccccactctccaattgtggaagagttccaagtcccatacaacaaactccaggtgatctttaagtcagacttttccaatgaagagcgttttacggggtttgctgcatactatgttgccacagacataaatgaatgcacagattttgtagatgtcccttgtagccacttctgcaacaatttcattggtggttacttctgctcctgccccccggaatatttcctccatgatgacatgaagaattgcggagttaattgcagtggggatgtattcactgcactgattggggagattgcaagtcccaattatcccaaaccatatccagagaactcaaggtgtgaataccagatccggttggagaaagggttccaagtggtggtgaccttgcggagagaagattttgatgtggaagcagctgactcagcgggaaactgccttgacagtttagtttttgttgcaggagatcggcaatttggtccttactgtggtcatggattccctgggcctctaaatattgaaaccaagagtaatgctcttgatatcatcttccaaactgatctaacagggcaaaaaaagggctggaaacttcgctatcatggagatccaatgccctgccctaaggaagacactcccaattctgtttgggagcctgcgaaggcaaaatatgtctttagagatgtggtgcagataacctgtctggatgggtttgaagttgtggagggacgtgttggtgcaacatctttctattcgacttgtcaaagcaatggaaagtggagtaattccaaactgaaatgtcaacctgtggactgtggcattcctgaatccattgagaatggtaaagttgaagacccagagagcactttgtttggttctgtcatccgctacacttgtgaggagccatattactacatggaaaatggaggaggtggggagtatcactgtgctggtaacgggagctgggtgaatgaggtgctgggcccggagctgccgaaatgtgttccagtctgtggagtccccagagaaccctttgaagaaaaacagaggataattggaggatccgatgcagatattaaaaacttcccctggcaagtcttctttgacaacccatgggctggtggagcgctcattaatgagtactgggtgctgacggctgctcatgttgtggagggaaacagggagccaacaatgtatgttgggtccacctcagtgcagacctcacggctggcaaaatccaagatgctcactcctgagcatgtgtttattcatccgggatggaagctgctggaagtcccagaaggacgaaccaattttgataatgacattgcactggtgcggctgaaagacccagtgaaaatgggacccaccgtctctcccatctgcctaccaggcacctcttccgactacaacctcatggatggggacctgggactgatctcaggctggggccgaacagagaagagagatcgtgctgttcgcctcaaggcggcaaggttacctgtagctcctttaagaaaatgcaaagaagtgaaagtggagaaacccacagcagatgcagaggcctatgttttcactcctaacatgatctgtgctggaggagagaagggcatggatagctgtaaaggggacagtggtggggcctttgctgtacaggatcccaatgacaagaccaaattctacgcagctggcctggtgtcctgggggccccagtgtgggacctatgggctctacacacgggtaaagaactatgttgactggataatgaagactatgcaggaaaatagcaccccccgtgaggactaatccagatacatcccaccagcctctccaagggtggtgaccaatgcattaccttctgttccttatgatattctcattatttcatcatgactgaaagaagacacgagcgaatgatttaaatagaacttgattgttgagacgccttgctagaggtagagtttgatcatagaattgtgctggtcatacatttgtggtctgactccttggggtcctttccccggagtacctattgtagataacactatgggtggggcactcctttcttgcactattccacagggataccttaattctttgtttcctctttacctgttcaaaattccatttacttgatcattctcagtatccactgtctatgtacaataaaggatgtttataagcaaa

SEQ ID NO: 432240 - DNA, 2319 bp, Homo sapiens
gctcggtacccctctccacactggctctacttcacccatctggacattgagctgtcagagaactgtgcgtatgactcagtgcagataatctcaggagacactgaagaagggaggctctgtggacagaggagcagtaacaatccccactctccaattgtggaagagttccaagtcccatacaacaaactccaggtgatctttaagtcagacttttccaatgaagagcgttttacggggtttgctgcatactatgttgccacagacataaatgaatgcacagattttgtagatgtcccttgtagccacttctgcaacaatttcattggtggttacttctgctcctgccccccggaatatttcctccatgatgacatgaagaattgcggagttaattgcagtggggatgtattcactgcactgattggggagattgcaagtcccaattatcccaaaccatatccagagaactcaaggtgtgaataccagatccggttggagaaagggttccaagtggtggtgaccttgcggagagaagattttgatgtggaagcagctgactcagcgggaaactgccttgacagtttagtttttgttgcaggagatcggcaatttggtccttactgtggtcatggattccctgggcctctaaatattgaaaccaagagtaatgctcttgatatcatcttccaaactgatctaacagggcaaaaaaagggctggaaacttcgctatcatggagatccaatgccctgccctaaggaagacactcccaattctgtttgggagcctgcgaaggcaaaatatgtctttagagatgtggtgcagataacctgtctggatgggtttgaagttgtggagggacgtgttggtgcaacatctttctattcgacttgtcaaagcaatggaaagtggagtaattccaaactgaaatgtcaacctgtggactgtggcattcctgaatccattgagaatggtaaagttgaagacccagagagcactttgtttggttctgtcatccgctacacttgtgaggagccatattactacatggaaaatggaggaggtggggagtatcactgtgctggtaacgggagctgggtgaatgaggtgctgggcccggagctgccgaaatgtgttccagtctgtggagtccccagagaaccctttgaagaaaaacagaggataattggaggatccgatgcagatattaaaaacttcccctggcaagtcttctttgacaacccatgggctggtggagcgctcattaatgagtactgggtgctgacggctgctcatgttgtggagggaaacagggagccaacaatgtatgttgggtccacctcagtgcagacctcacggctggcaaaatccaagatgctcactcctgagcatgtgtttattcatccgggatggaagctgctggaagtcccagaaggacgaaccaattttgataatgacattgcactggtgcggctgaaagacccagtgaaaatgggacccaccgtctctcccatctgcctaccaggcacctcttccgactacaacctcatggatggggacctgggactgatctcaggctggggccgaacagagaagagagatcgtgctgttcgcctcaaggcggcaaggttacctgtagctcctttaagaaaatgcaaagaagtgaaagtggagaaacccacagcagatgcagaggcctatgttttcactcctaacatgatctgtgctggaggagagaagggcatggatagctgtaaaggggacagtggtggggcctttgctgtacaggatcccaatgacaagaccaaattctacgcagctggcctggtgtcctgggggccccagtgtgggacctatgggctctacacacgggtaaagaactatgttgactggataatgaagactatgcaggaaaatagcaccccccgtgaggactaatccagatacatcccaccagcctctccaagggtggtgaccaatgcattaccttctgttccttatgatattctcattatttcatcatgactgaaagaagacacgagcgaatgatttaaatagaacttgattgttgagacgccttgctagaggtagagtttgatcatagaattgtgctggtcatacatttgtggtctgactccttggggtcctttccccggagtacctattgtagataacactatgggtggggcactcctttcttgcactattccacagggataccttaattctttgtttcctctttacctgttcaaaattccatttacttgatcattctcagtatccactgtctatgtacaataaaggatgtttataagcaaa

SEQ ID NO: 432241 - DNA, 1875 bp, Homo sapiens
acatctcaatggtcaatttgggacgccggattgatcagctgccaccataatcatatattgtctcaacatatttctaccttgcggagagaagattttgatgtggaagcagctgactcagcgggaaactgccttgacagtttagtttttgttgcaggagatcggcaatttggtccttactgtggtcatggattccctgggcctctaaatattgaaaccaagagtaatgctcttgatatcatcttccaaactgatctaacagggcaaaaaaagggctggaaacttcgctatcatggagatccaatgccctgccctaaggaagacactcccaattctgtttgggagcctgcgaaggcaaaatatgtctttagagatgtggtgcagataacctgtctggatgggtttgaagttgtggagggacgtgttggtgcaacatctttctattcgacttgtcaaagcaatggaaagtggagtaattccaaactgaaatgtcaacctgtggactgtggcattcctgaatccattgagaatggtaaagttgaagacccagagagcactttgtttggttctgtcatccgctacacttgtgaggagccatattactacatggaaaatggaggaggtggggagtatcactgtgctggtaacgggagctgggtgaatgaggtgctgggcccggagctgccgaaatgtgttccagtctgtggagtccccagagaaccctttgaagaaaaacagaggataattggaggatccgatgcagatattaaaaacttcccctggcaagtcttctttgacaacccatgggctggtggagcgctcattaatgagtactgggtgctgacggctgctcatgttgtggagggaaacagggagccaacaatgtatgttgggtccacctcagtgcagacctcacggctggcaaaatccaagatgctcactcctgagcatgtgtttattcatccgggatggaagctgctggaagtcccagaaggacgaaccaattttgataatgacattgcactggtgcggctgaaagacccagtgaaaatgggacccaccgtctctcccatctgcctaccaggcacctcttccgactacaacctcatggatggggacctgggactgatctcaggctggggccgaacagagaagagagatcgtgctgttcgcctcaaggcggcaaggttacctgtagctcctttaagaaaatgcaaagaagtgaaagtggagaaacccacagcagatgcagaggcctatgttttcactcctaacatgatctgtgctggaggagagaagggcatggatagctgtaaaggggacagtggtggggcctttgctgtacaggatcccaatgacaagaccaaattctacgcagctggcctggtgtcctgggggccccagtgtgggacctatgggctctacacacgggtaaagaactatgttgactggataatgaagactatgcaggaaaatagcaccccccgtgaggactaatccagatacatcccaccagcctctccaagggtggtgaccaatgcattaccttctgttccttatgatattctcattatttcatcatgactgaaagaagacacgagcgaatgatttaaatagaacttgattgttgagacgccttgctagaggtagagtttgatcatagaattgtgctggtcatacatttgtggtctgactccttggggtcctttccccggagtacctattgtagataacactatgggtggggcactcctttcttgcactattccacagggataccttaattctttgtttcctctttacctgttcaaaattccatttacttgatcattctcagtatccactgtctatgtacaataaaggatgtttataagcaaa

SEQ ID NO: 432242 - DNA, 1517 bp, Homo sapiens
ttttggtttcccatatctctcttcagaaataagtggtgatgtttattattctccagggacgtgttggtgcaacatctttctattcgacttgtcaaagcaatggaaagtggagtaattccaaactgaaatgtcaacctgtggactgtggcattcctgaatccattgagaatggtaaagttgaagacccagagagcactttgtttggttctgtcatccgctacacttgtgaggagccatattactacatggaaaatggaggaggtggggagtatcactgtgctggtaacgggagctgggtgaatgaggtgctgggcccggagctgccgaaatgtgttccagtctgtggagtccccagagaaccctttgaagaaaaacagaggataattggaggatccgatgcagatattaaaaacttcccctggcaagtcttctttgacaacccatgggctggtggagcgctcattaatgagtactgggtgctgacggctgctcatgttgtggagggaaacagggagccaacaatgtatgttgggtccacctcagtgcagacctcacggctggcaaaatccaagatgctcactcctgagcatgtgtttattcatccgggatggaagctgctggaagtcccagaaggacgaaccaattttgataatgacattgcactggtgcggctgaaagacccagtgaaaatgggacccaccgtctctcccatctgcctaccaggcacctcttccgactacaacctcatggatggggacctgggactgatctcaggctggggccgaacagagaagagagatcgtgctgttcgcctcaaggcggcaaggttacctgtagctcctttaagaaaatgcaaagaagtgaaagtggagaaacccacagcagatgcagaggcctatgttttcactcctaacatgatctgtgctggaggagagaagggcatggatagctgtaaaggggacagtggtggggcctttgctgtacaggatcccaatgacaagaccaaattctacgcagctggcctggtgtcctgggggccccagtgtgggacctatgggctctacacacgggtaaagaactatgttgactggataatgaagactatgcaggaaaatagcaccccccgtgaggactaatccagatacatcccaccagcctctccaagggtggtgaccaatgcattaccttctgttccttatgatattctcattatttcatcatgactgaaagaagacacgagcgaatgatttaaatagaacttgattgttgagacgccttgctagaggtagagtttgatcatagaattgtgctggtcatacatttgtggtctgactccttggggtcctttccccggagtacctattgtagataacactatgggtggggcactcctttcttgcactattccacagggataccttaattctttgtttcctctttacctgttcaaaattccatttacttgatcattctcagtatccactgtctatgtacaataaaggatgtttataagcaaa

SEQ ID NO: 432243 - DNA, 1527 bp, Homo sapiens
tctagagtatcccagatccccttccatcctcagataacctgtctggatgggtttgaagttgtggagggacgtgttggtgcaacatctttctattcgacttgtcaaagcaatggaaagtggagtaattccaaactgaaatgtcaacctgtggactgtggcattcctgaatccattgagaatggtaaagttgaagacccagagagcactttgtttggttctgtcatccgctacacttgtgaggagccatattactacatggaaaatggaggaggtggggagtatcactgtgctggtaacgggagctgggtgaatgaggtgctgggcccggagctgccgaaatgtgttccagtctgtggagtccccagagaaccctttgaagaaaaacagaggataattggaggatccgatgcagatattaaaaacttcccctggcaagtcttctttgacaacccatgggctggtggagcgctcattaatgagtactgggtgctgacggctgctcatgttgtggagggaaacagggagccaacaatgtatgttgggtccacctcagtgcagacctcacggctggcaaaatccaagatgctcactcctgagcatgtgtttattcatccgggatggaagctgctggaagtcccagaaggacgaaccaattttgataatgacattgcactggtgcggctgaaagacccagtgaaaatgggacccaccgtctctcccatctgcctaccaggcacctcttccgactacaacctcatggatggggacctgggactgatctcaggctggggccgaacagagaagagagatcgtgctgttcgcctcaaggcggcaaggttacctgtagctcctttaagaaaatgcaaagaagtgaaagtggagaaacccacagcagatgcagaggcctatgttttcactcctaacatgatctgtgctggaggagagaagggcatggatagctgtaaaggggacagtggtggggcctttgctgtacaggatcccaatgacaagaccaaattctacgcagctggcctggtgtcctgggggccccagtgtgggacctatgggctctacacacgggtaaagaactatgttgactggataatgaagactatgcaggaaaatagcaccccccgtgaggactaatccagatacatcccaccagcctctccaagggtggtgaccaatgcattaccttctgttccttatgatattctcattatttcatcatgactgaaagaagacacgagcgaatgatttaaatagaacttgattgttgagacgccttgctagaggtagagtttgatcatagaattgtgctggtcatacatttgtggtctgactccttggggtcctttccccggagtacctattgtagataacactatgggtggggcactcctttcttgcactattccacagggataccttaattctttgtttcctctttacctgttcaaaattccatttacttgatcattctcagtatccactgtctatgtacaataaaggatgtttataagcaaa

SEQ ID NO: 432244 - DNA, 1448 bp, Homo sapiens
gccccatgactcttccttggaggaagtggctgtcctgaccatcgctctccttccttcgtctggtagctgtggactgtggcattcctgaatccattgagaatggtaaagttgaagacccagagagcactttgtttggttctgtcatccgctacacttgtgaggagccatattactacatggaaaatggaggaggtggggagtatcactgtgctggtaacgggagctgggtgaatgaggtgctgggcccggagctgccgaaatgtgttccagtctgtggagtccccagagaaccctttgaagaaaaacagaggataattggaggatccgatgcagatattaaaaacttcccctggcaagtcttctttgacaacccatgggctggtggagcgctcattaatgagtactgggtgctgacggctgctcatgttgtggagggaaacagggagccaacaatgtatgttgggtccacctcagtgcagacctcacggctggcaaaatccaagatgctcactcctgagcatgtgtttattcatccgggatggaagctgctggaagtcccagaaggacgaaccaattttgataatgacattgcactggtgcggctgaaagacccagtgaaaatgggacccaccgtctctcccatctgcctaccaggcacctcttccgactacaacctcatggatggggacctgggactgatctcaggctggggccgaacagagaagagagatcgtgctgttcgcctcaaggcggcaaggttacctgtagctcctttaagaaaatgcaaagaagtgaaagtggagaaacccacagcagatgcagaggcctatgttttcactcctaacatgatctgtgctggaggagagaagggcatggatagctgtaaaggggacagtggtggggcctttgctgtacaggatcccaatgacaagaccaaattctacgcagctggcctggtgtcctgggggccccagtgtgggacctatgggctctacacacgggtaaagaactatgttgactggataatgaagactatgcaggaaaatagcaccccccgtgaggactaatccagatacatcccaccagcctctccaagggtggtgaccaatgcattaccttctgttccttatgatattctcattatttcatcatgactgaaagaagacacgagcgaatgatttaaatagaacttgattgttgagacgccttgctagaggtagagtttgatcatagaattgtgctggtcatacatttgtggtctgactccttggggtcctttccccggagtacctattgtagataacactatgggtggggcactcctttcttgcactattccacagggataccttaattctttgtttcctctttacctgttcaaaattccatttacttgatcattctcagtatccactgtctatgtacaataaaggatgtttataagcaaa

SEQ ID NO: 432245 - DNA, 1476 bp, Homo sapiens
ggtccacctcagtgcagacctcacggctggcaaaatccaagatgctcactcctgagcatgtgtttattcatccgggatggaagctgggggaagtcccagaaggacgaaccaattttgatgatgacattgcactggtgaggctgaaagacccagtgaaaatgggacccaccgtctatccaatctgcctaggagccatattactacatggaaaatggaggaggtggggagtatcactgtgctggtaacgggagctgggtgaatgaggtgctgggcccggagctgccgaaatgtgttccagtctgtggagtccccagagaaccctttgaagaaaaacagaggataattggaggatccgatgcagatattaaaaacttcccctggcaagtcttctttgacaacccatgggctggtggagcgctcattaatgagtactgggtgctgacggctgctcatgttgtggagggaaacagggagccaacaatgtatgttgggtccacctcagtgcagacctcacggctggcaaaatccaagatgctcactcctgagcatgtgtttattcatccgggatggaagctgctggaagtcccagaaggacgaaccaattttgataatgacattgcactggtgcggctgaaagacccagtgaaaatgggacccaccgtctctcccatctgcctaccaggcacctcttccgactacaacctcatggatggggacctgggactgatctcaggctggggccgaacagagaagagagatcgtgctgttcgcctcaaggcggcaaggttacctgtagctcctttaagaaaatgcaaagaagtgaaagtggagaaacccacagcagatgcagaggcctatgttttcactcctaacatgatctgtgctggaggagagaagggcatggatagctgtaaaggggacagtggtggggcctttgctgtacaggatcccaatgacaagaccaaattctacgcagctggcctggtgtcctgggggccccagtgtgggacctatgggctctacacacgggtaaagaactatgttgactggataatgaagactatgcaggaaaatagcaccccccgtgaggactaatccagatacatcccaccagcctctccaagggtggtgaccaatgcattaccttctgttccttatgatattctcattatttcatcatgactgaaagaagacacgagcgaatgatttaaatagaacttgattgttgagacgccttgctagaggtagagtttgatcatagaattgtgctggtcatacatttgtggtctgactccttggggtcctttccccggagtacctattgtagataacactatgggtggggcactcctttcttgcactattccacagggataccttaattctttgtttcctctttacctgttcaaaattccatttacttgatcattctcagtatccactgtctatgtacaataaaggatgtttataagcaaa

SEQ ID NO: 432246 - DNA, 1310 bp, Homo sapiens
tctagaggatccctttctctgatcgctcatattactacatggaaaatggaggaggtggggagtatcactgtgctggtaacgggagctgggtgaatgaggtgctgggcccggagctgccgaaatgtgttccagtctgtggagtccccagagaaccctttgaagaaaaacagaggataattggaggatccgatgcagatattaaaaacttcccctggcaagtcttctttgacaacccatgggctggtggagcgctcattaatgagtactgggtgctgacggctgctcatgttgtggagggaaacagggagccaacaatgtatgttgggtccacctcagtgcagacctcacggctggcaaaatccaagatgctcactcctgagcatgtgtttattcatccgggatggaagctgctggaagtcccagaaggacgaaccaattttgataatgacattgcactggtgcggctgaaagacccagtgaaaatgggacccaccgtctctcccatctgcctaccaggcacctcttccgactacaacctcatggatggggacctgggactgatctcaggctggggccgaacagagaagagagatcgtgctgttcgcctcaaggcggcaaggttacctgtagctcctttaagaaaatgcaaagaagtgaaagtggagaaacccacagcagatgcagaggcctatgttttcactcctaacatgatctgtgctggaggagagaagggcatggatagctgtaaaggggacagtggtggggcctttgctgtacaggatcccaatgacaagaccaaattctacgcagctggcctggtgtcctgggggccccagtgtgggacctatgggctctacacacgggtaaagaactatgttgactggataatgaagactatgcaggaaaatagcaccccccgtgaggactaatccagatacatcccaccagcctctccaagggtggtgaccaatgcattaccttctgttccttatgatattctcattatttcatcatgactgaaagaagacacgagcgaatgatttaaatagaacttgattgttgagacgccttgctagaggtagagtttgatcatagaattgtgctggtcatacatttgtggtctgactccttggggtcctttccccggagtacctattgtagataacactatgggtggggcactcctttcttgcactattccacagggataccttaattctttgtttcctctttacctgttcaaaattccatttacttgatcattctcagtatccactgtctatgtacaataaaggatgtttataagcaaa

SEQ ID NO: 432247 - DNA, 1327 bp, Homo sapiens
gcagctcgtcgaaacgcagtgttcggagtcatgtcgcaaaattggcttcataataatttggggttagggaggtggggagtatcactgtgctggtaacgggagctgggtgaatgaggtgctgggcccggagctgccgaaatgtgttccagtctgtggagtccccagagaaccctttgaagaaaaacagaggataattggaggatccgatgcagatattaaaaacttcccctggcaagtcttctttgacaacccatgggctggtggagcgctcattaatgagtactgggtgctgacggctgctcatgttgtggagggaaacagggagccaacaatgtatgttgggtccacctcagtgcagacctcacggctggcaaaatccaagatgctcactcctgagcatgtgtttattcatccgggatggaagctgctggaagtcccagaaggacgaaccaattttgataatgacattgcactggtgcggctgaaagacccagtgaaaatgggacccaccgtctctcccatctgcctaccaggcacctcttccgactacaacctcatggatggggacctgggactgatctcaggctggggccgaacagagaagagagatcgtgctgttcgcctcaaggcggcaaggttacctgtagctcctttaagaaaatgcaaagaagtgaaagtggagaaacccacagcagatgcagaggcctatgttttcactcctaacatgatctgtgctggaggagagaagggcatggatagctgtaaaggggacagtggtggggcctttgctgtacaggatcccaatgacaagaccaaattctacgcagctggcctggtgtcctgggggccccagtgtgggacctatgggctctacacacgggtaaagaactatgttgactggataatgaagactatgcaggaaaatagcaccccccgtgaggactaatccagatacatcccaccagcctctccaagggtggtgaccaatgcattaccttctgttccttatgatattctcattatttcatcatgactgaaagaagacacgagcgaatgatttaaatagaacttgattgttgagacgccttgctagaggtagagtttgatcatagaattgtgctggtcatacatttgtggtctgactccttggggtcctttccccggagtacctattgtagataacactatgggtggggcactcctttcttgcactattccacagggataccttaattctttgtttcctctttacctgttcaaaattccatttacttgatcattctcagtatccactgtctatgtacaataaaggatgtttataagcaaa

SEQ ID NO: 432248 - DNA, 1247 bp, Homo sapiens
aagtatcagtgttttgaaaatccaggaaaaatatcaggatggggccggggctgccgaaatgtgttccagtctgtggagtccccagagaaccctttgaagaaaaacagaggataattggaggatccgatgcagatattaaaaacttcccctggcaagtcttctttgacaacccatgggctggtggagcgctcattaatgagtactgggtgctgacggctgctcatgttgtggagggaaacagggagccaacaatgtatgttgggtccacctcagtgcagacctcacggctggcaaaatccaagatgctcactcctgagcatgtgtttattcatccgggatggaagctgctggaagtcccagaaggacgaaccaattttgataatgacattgcactggtgcggctgaaagacccagtgaaaatgggacccaccgtctctcccatctgcctaccaggcacctcttccgactacaacctcatggatggggacctgggactgatctcaggctggggccgaacagagaagagagatcgtgctgttcgcctcaaggcggcaaggttacctgtagctcctttaagaaaatgcaaagaagtgaaagtggagaaacccacagcagatgcagaggcctatgttttcactcctaacatgatctgtgctggaggagagaagggcatggatagctgtaaaggggacagtggtggggcctttgctgtacaggatcccaatgacaagaccaaattctacgcagctggcctggtgtcctgggggccccagtgtgggacctatgggctctacacacgggtaaagaactatgttgactggataatgaagactatgcaggaaaatagcaccccccgtgaggactaatccagatacatcccaccagcctctccaagggtggtgaccaatgcattaccttctgttccttatgatattctcattatttcatcatgactgaaagaagacacgagcgaatgatttaaatagaacttgattgttgagacgccttgctagaggtagagtttgatcatagaattgtgctggtcatacatttgtggtctgactccttggggtcctttccccggagtacctattgtagataacactatgggtggggcactcctttcttgcactattccacagggataccttaattctttgtttcctctttacctgttcaaaattccatttacttgatcattctcagtatccactgtctatgtacaataaaggatgtttataagcaaa

SEQ ID NO: 432249 - DNA, 2736 bp, Homo sapiens
atgcacactcgggtagggaatcttatgaacagaaccaggacagggaggctggccggaggttcctgcagagggagcgtcaaggccctgtgctgctgtccctgggggccagaggggttgcccagcatgcccactggcaggagagagggaactgacccacttgctcctaccagcttctgaaggtgacactgagccccaggtgacgccgcaccaccaaagaaggtgcttgtgtttgtcagacaaatacagccaggcctgccaccccttaggctccaaagtccggaggtgcagaaagccaggaccaagagacaggcagctcaccagggtggacaaatcgccagagatgtggtgcattgtcctgttttcacttttggcatgggtttatgctgagcctaccatgtatggggagatcctgtcccctaactatcctcaggcatatcccagtgaggtagagaaatcttgggacatagaagttcctgaagggtatgggattcacctctacttcacccatctggacattgagctgtcagagaactgtgcgtatgactcagtgcagataatctcaggagacactgaagaagggaggctctgtggacagaggagcagtaacaatccccactctccaattgtggaagagttccaagtcccatacaacaaactccaggtgatctttaagtcagacttttccaatgaagagcgttttacggggtttgctgcatactatgttgccacagacataaatgaatgcacagattttgtagatgtcccttgtagccacttctgcaacaatttcattggtggttacttctgctcctgccccccggaatatttcctccatgatgacatgaagaattgcggagttaattgcagtggggatgtattcactgcactgattggggagattgcaagtcccaattatcccaaaccatatccagagaactcaaggtgtgaataccagatccggttggagaaagggttccaagtggtggtgaccttgcggagagaagattttgatgtggaagcagctgactcagcgggaaactgccttgacagtttagtttttgttgcaggagatcggcaatttggtccttactgtggtcatggattccctgggcctctaaatattgaaaccaagagtaatgctcttgatatcatcttccaaactgatctaacagggcaaaaaaagggctggaaacttcgctatcatggagatccaatgccctgccctaaggaagacactcccaattctgtttgggagcctgcgaaggcaaaatatgtctttagagatgtggtgcagataacctgtctggatgggtttgaagttgtggagggacgtgttggtgcaacatctttctattcgacttgtcaaagcaatggaaagtggagtaattccaaactgaaatgtcaacctgtggactgtggcattcctgaatccattgagaatggtaaagttgaagacccagagagcactttgtttggttctgtcatccgctacacttgtgaggagccatattactacatggaaaatggaggaggtggggagtatcactgtgctggtaacgggagctgggtgaatgaggtgctgggcccggagctgccgaaatgtgttccagtctgtggagtccccagagaaccctttgaagaaaaacagaggataattggaggatccgatgcagatattaaaaacttcccctggcaagtcttctttgacaacccatgggctggtggagcgctcattaatgagtactgggtgctgacggctgctcatgttgtggagggaaacagggagccaacaatgtatgttgggtccacctcagtgcagacctcacggctggcaaaatccaagatgctcactcctgagcatgtgtttattcatccgggatggaagctgctggaagtcccagaaggacgaaccaattttgataatgacattgcactggtgcggctgaaagacccagtgaaaatgggacccaccgtctctcccatctgcctaccaggcacctcttccgactacaacctcatggatggggacctgggactgatctcaggctggggccgaacagagaagagagatcgtgctgttcgcctcaaggcggcaaggttacctgtagctcctttaagaatttcactcctaacatgatctgtgctggaggagagaagggcatggatagctgtaaaggggacagtggtggggcctttgctgtacaggatcccaatgacaagaccaaattctacgcagctggcctggtgtcctgggggccccagtgtgggacctatgggctctacacacgggtaaagaactatgttgactggataatgaagactatgcaggaaaatagcaccccccgtgaggactaatccagatacatcccaccagcctctccaagggtggtgaccaatgcattaccttctgttccttatgatattctcattatttcatcatgactgaaagaagacacgagcgaatgatttaaatagaacttgattgttgagacgccttgctagaggtagagtttgatcatagaattgtgctggtcatacatttgtggtctgactccttggggtcctttccccggagtacctattgtagataacactatgggtggggcactcctttcttgcactattccacagggataccttaattctttgtttcctctttacctgttcaaaattccatttacttgatcattctcagtatccactgtctatgtacaataaaggatgtttataagcaaa

SEQ ID NO: 432250 - DNA, 2732 bp, Homo sapiens
atgcacactcgggtagggaatcttatgaacagaaccaggacagggaggctggccggaggttcctgcagagggagcgtcaaggccctgtgctgctgtccctgggggccagaggggttgcccagcatgcccactggcaggagagagggaactgacccacttgctcctaccagcttctgaagtaggctccaaagtccggaggtgcagaaagccaggaccaagagacaggcagctcaccagggtggacaaatcgccagagatgtggtgcattgtcctgttttcacttttggcatgggtttatgctgagcctaccatgtatggggagatcctgtcccctaactatcctcaggcatatcccagtgaggtagagaaatcttgggacatagaagttcctgaagggtatgggattcacctctacttcacccatctggacattgagctgtcagagaactgtgcgtatgactcagtgcagataatctcaggagacactgaagaagggaggctctgtggacagaggagcagtaacaatccccactctccaattgtggaagagttccaagtcccatacaacaaactccaggtgatctttaagtcagacttttccaatgaagagcgttttacggggtttgctgcatactatgttgccacagacataaatgaatgcacagattttgtagatgtcccttgtagccacttctgcaacaatttcattggtggttacttctgctcctgccccccggaatatttcctccatgatgacatgaagaattgcggagttaattgcagtggggatgtattcactgcactgattggggagattgcaagtcccaattatcccaaaccatatccagagaactcaaggtgtgaataccagatccggttggagaaagggttccaagtggtggtgaccttgcggagagaagattttgatgtggaagcagctgactcagcgggaaactgccttgacagtttagtttttgttgcaggagatcggcaatttggtccttactgtggtcatggattccctgggcctctaaatattgaaaccaagagtaatgctcttgatatcatcttccaaactgatctaacagggcaaaaaaagggctggaaacttcgctatcatggagatccaatgccctgccctaaggaagacactcccaattctgtttgggagcctgcgaaggcaaaatatgtctttagagatgtggtgcagataacctgtctggatgggtttgaagttgtggagggacgtgttggtgcaacatctttctattcgacttgtcaaagcaatggaaagtggagtaattccaaactgaaatgtcaacctgtggactgtggcattcctgaatccattgagaatggtaaagttgaagacccagagagcactttgtttggttctgtcatccgctacacttgtgaggagccatattactacatggaaaatggaggaggtggggagtatcactgtgctggtaacgggagctgggtgaatgaggtgctgggcccggagctgccgaaatgtgttccagtctgtggagtccccagagaaccctttgaagaaaaacagaggataattggaggatccgatgcagatattaaaaacttcccctggcaagtcttctttgacaacccatgggctggtggagcgctcattaatgagtactgggtgctgacggctgctcatgttgtggagggaaacagggagccaacaatgtatgttgggtccacctcagtgcagacctcacggctggcaaaatccaagatgctcactcctgagcatgtgtttattcatccgggatggaagctgctggaagtcccagaaggacgaaccaattttgataatgacattgcactggtgcggctgaaagacccagtgaaaatgggacccaccgtctctcccatctgcctaccaggcacctcttccgactacaacctcatggatggggacctgggactgatctcaggctggggccgaacagagaagagagatcgtgctgttcgcctcaaggcggcaaggttacctgtagctcctttaagaaaatgcaaagaagtgaaagtggagaaacccacagcagatgcagaggcctatgttttcactcctaacatgatctgtgctggaggagagaagggcatggatagctgtaaaggggacagtggtggggcctttgctgtacaggatcccaatgacaagaccaaattctacgcagctggcctggtgtcctgggggccccagtgtgggacctatgggctctacacacgggtaaagaactatgttgactggataatgaagactatgcaggaaaatagcaccccccgtgaggactaatccagatacatcccaccagcctctccaagggtggtgaccaatgcattaccttctgttccttatgatattctcattatttcatcatgactgaaagaagacacgagcgaatgatttaaatagaacttgattgttgagacgccttgctagaggtagagtttgatcatagaattgtgctggtcatacatttgtggtctgactccttggggtcctttccccggagtacctattgtagataacactatgggtggggcactcctttcttgcactattccacagggataccttaattctttgtttcctctttacctgttcaaaattccatttacttgatcattctcagtatccactgtctatgtacaataaaggatgtttataagcaaagaccccaaaagggaaaccgagctggaat

SEQ ID NO: 432251 - DNA, 2732 bp, Homo sapiens
atgcacactcgggtagggaatcttatgaacagaaccaggacagggaggctggccggaggttcctgcagagggagcgtcaaggccctgtgctgctgtccctgggggccagaggggttgcccagcatgcccactggcaggagagagggaactgacccacttgctcctaccagcttctgaagtaggctccaaagtccggaggtgcagaaagccaggaccaagagacaggcagctcaccagggtggacaaatcgccagagatgtggtgcattgtcctgttttcacttttggcatgggtttatgctgagcctaccatgtatggggagatcctgtcccctaactatcctcaggcatatcccagtgaggtagagaaatcttgggacatagaagttcctgaagggtatgggattcacctctacttcacccatctggacattgagctgtcagagaactgtgcgtatgactcagtgcagataatctcaggagacactgaagaagggaggctctgtggacagaggagcagtaacaatccccactctccaattgtggaagagttccaagtcccatacaacaaactccaggtgatctttaagtcagacttttccaatgaagagcgttttacggggtttgctgcatactatgttgccacagacataaatgaatgcacagattttgtagatgtcccttgtagccacttctgcaacaatttcattggtggttacttctgctcctgccccccggaatatttcctccatgatgacatgaagaattgcggagttaattgcagtggggatgtattcactgcactgattggggagattgcaagtcccaattatcccaaaccatatccagagaactcaaggtgtgaataccagatccggttggagaaagggttccaagtggtggtgaccttgcggagagaagattttgatgtggaagcagctgactcagcgggaaactgccttgacagtttagtttttgttgcaggagatcggcaatttggtccttactgtggtcatggattccctgggcctctaaatattgaaaccaagagtaatgctcttgatatcatcttccaaactgatctaacagggcaaaaaaagggctggaaacttcgctatcatggagatccaatgccctgccctaaggaagacactcccaattctgtttgggagcctgcgaaggcaaaatatgtctttagagatgtggtgcagataacctgtctggatgggtttgaagttgtggagggacgtgttggtgcaacatctttctattcgacttgtcaaagcaatggaaagtggagtaattccaaactgaaatgtcaacctgtggactgtggcattcctgaatccattgagaatggtaaagttgaagacccagagagcactttgtttggttctgtcatccgctacacttgtgaggagccatattactacatggaaaatggaggaggtggggagtatcactgtgctggtaacgggagctgggtgaatgaggtgctgggcccggagctgccgaaatgtgttccagtctgtggagtccccagagaaccctttgaagaaaaacagaggataattggaggatccgatgcagatattaaaaacttcccctggcaagtcttctttgacaacccatgggctggtggagcgctcattaatgagtactgggtgctgacggctgctcatgttgtggagggaaacagggagccaacaatgtatgttgggtccacctcagtgcagacctcacggctggcaaaatccaagatgctcactcctgagcatgtgtttattcatccgggatggaagctgctggaagtcccagaaggacgaaccaattttgataatgacattgcactggtgcggctgaaagacccagtgaaaatgggacccaccgtctctcccatctgcctaccaggcacctcttccgactacaacctcatggatggggacctgggactgatctcaggctggggccgaacagagaagagagatcgtgctgttcgcctcaaggcggcaaggttacctgtagctcctttaagaaaatgcaaagaagtgaaagtggagaaacccacagcagatgcagaggcctatgttttcactcctaacatgatctgtgctggaggagagaagggcatggatagctgtaaaggggacagtggtggggcctttgctgtacaggatcccaatgacaagaccaaattctacgcagctggcctggtgtcctgggggccccagtgtgggacctatgggctctacacacgggtaaagaactatgttgactggataatgaagactatgcaggaaaatagcaccccccgtgaggactaatccagatacatcccaccagcctctccaagggtggtgaccaatgcattaccttctgttccttatgatattctcattatttcatcatgactgaaagaagacacgagcgaatgatttaaatagaacttgattgttgagacgccttgctagaggtagagtttgatcatagaattgtgctggtcatacatttgtggtctgactccttggggtcctttccccggagtacctattgtagataacactatgggtggggcactcctttcttgcactattccacagggataccttaattctttgtttcctctttacctgttcaaaattccatttacttgatcattctcagtatccactgtctatgtacaataaaggatgtttataagcaaaaaaaaattataaaatataatattaaaaa

SEQ ID NO: 432252 - DNA, 2742 bp, Homo sapiens
atgcacactcgggtagggaatcttatgaacagaaccaggacagggaggctggccggaggttcctgcagagggagcgtcaaggccctgtgctgctgtccctgggggccagaggggttgcccagcatgcccactggcaggagagagggaactgacccacttgctcctaccagcttctgaagtaggctccaaagtccggaggtgcagaaagccaggaccaagagacaggcagctcaccagggtggacaaatcgccagagatgtggtgcattgtcctgttttcacttttggcatgggtttatgctgagcctaccatgtatggggagatcctgtcccctaactatcctcaggcatatcccagtgaggtagagaaatcttgggacatagaagttcctgaagggtatgggattcacctctacttcacccatctggacattgagctgtcagagaactgtgcgtatgactcagtgcagataatctcaggagacactgaagaagggaggctctgtggacagaggagcagtaacaatccccactctccaattgtggaagagttccaagtcccatacaacaaactccaggtgatctttaagtcagacttttccaatgaagagcgttttacggggtttgctgcatactatgttgccacagacataaatgaatgcacagattttgtagatgtcccttgtagccacttctgcaacaatttcattggtggttacttctgctcctgccccccggaatatttcctccatgatgacatgaagaattgcggagttaattgcagtggggatgtattcactgcactgattggggagattgcaagtcccaattatcccaaaccatatccagagaactcaaggtgtgaataccagatccggttggagaaagggttccaagtggtggtgaccttgcggagagaagattttgatgtggaagcagctgactcagcgggaaactgccttgacagtttagtttttgttgcaggagatcggcaatttggtccttactgtggtcatggattccctgggcctctaaatattgaaaccaagagtaatgctcttgatatcatcttccaaactgatctaacagggcaaaaaaagggctggaaacttcgctatcatggagatccaatgccctgccctaaggaagacactcccaattctgtttgggagcctgcgaaggcaaaatatgtctttagagatgtggtgcagataacctgtctggatgggtttgaagttgtggagggacgtgttggtgcaacatctttctattcgacttgtcaaagcaatggaaagtggagtaattccaaactgaaatgtcaacctgtggactgtggcattcctgaatccattgagaatggtaaagttgaagacccagagagcactttgtttggttctgtcatccgctacacttgtgaggagccatattactacatggaaaatggaggaggtggggagtatcactgtgctggtaacgggagctgggtgaatgaggtgctgggcccggagctgccgaaatgtgttccagtctgtggagtccccagagaaccctttgaagaaaaacagaggataattggaggatccgatgcagatattaaaaacttcccctggcaagtcttctttgacaacccatgggctggtggagcgctcattaatgagtactgggtgctgacggctgctcatgttgtggagggaaacagggagccaacaatgtatgttgggtccacctcagtgcagacctcacggctggcaaaatccaagatgctcactcctgagcatgtgtttattcatccgggatggaagctgctggaagtcccagaaggacgaaccaattttgataatgacattgcactggtgcggctgaaagacccagtgaaaatgggacccaccgtctctcccatctgcctaccaggcacctcttccgactacaacctcatggatggggacctgggactgatctcaggctggggccgaacagagaagagagatcgtgctgttcgcctcaaggcggcaaggttacctgtagctcctttaagaaaatgcaaagaagtgaaagtggagaaacccacagcagatgcagaggcctatgttttcactcctaacatgatctgtgctggaggagagaagggcatggatagctgtaaaggggacagtggtggggcctttgctgtacaggatcccaatgacaagaccaaattctacgcagctggcctggtgtcctgggggccccagtgtgggacctatgggctctacacacgggtaaagaactatgttgactggataatgaagactatgcaggaaaatagcaccccccgtgaggactaatccagatacatcccaccagcctctccaagggtggtgaccaatgcattaccttctgttccttatgatattctcattatttcatcatgactgaaagaagacacgagcgaatgatttaaatagaacttgattgttgagacgccttgctagaggtagagtttgatcatagaattgtgctggtcatacatttgtggtctgactccttggggtcctttccccggagtacctattgtagataacactatgggtggggcactcctttcttgcactattccacagggataccttaattctttgtttcctctttacctgttcaaaattccatttacttgatcattctcagtatccactgtctatgtacaataaaggatgtttataagcaaagtcgacgcggccgcgaatttagtagtagtagtaggcgg

SEQ ID NO: 432253 - DNA, 2694 bp, Homo sapiens
atgcacactcgggtagggaatcttatgaacagaaccaggacagggaggctggccggaggttcctgcagagggagcgtcaaggccctgtgctgctgtccctgggggccagaggggttgcccagcatgcccactggcaggagagagggaactgacccacttgctcctaccagcttctgaagtaggctccaaagtccggaggtgcagaaagccaggaccaagagacaggcagctcaccagggtggacaaatcgccagagatgtggtgcattgtcctgttttcacttttggcatgggtttatgctgagcctaccatgtatggggagatcctgtcccctaactatcctcaggcatatcccagtgaggtagagaaatcttgggacatagaagttcctgaagggtatgggattcacctctacttcacccatctggacattgagctgtcagagaactgtgcgtatgactcagtgcagataatctcaggagacactgaagaagggaggctctgtggacagaggagcagtaacaatccccactctccaattgtggaagagttccaagtcccatacaacaaactccaggtgatctttaagtcagacttttccaatgaagagcgttttacggggtttgctgcatactatgttgccacagacataaatgaatgcacagattttgtagatgtcccttgtagccacttctgcaacaatttcattggtggttacttctgctcctgccccccggaatatttcctccatgatgacatgaagaattgcggagttaattgcagtggggatgtattcactgcactgattggggagattgcaagtcccaattatcccaaaccatatccagagaactcaaggtgtgaataccagatccggttggagaaagggttccaagtggtggtgaccttgcggagagaagattttgatgtggaagcagctgactcagcgggaaactgccttgacagtttagtttttgttgcaggagatcggcaatttggtccttactgtggtcatggattccctgggcctctaaatattgaaaccaagagtaatgctcttgatatcatcttccaaactgatctaacagggcaaaaaaagggctggaaacttcgctatcatggagatccaatgccctgccctaaggaagacactcccaattctgtttgggagcctgcgaaggcaaaatatgtctttagagatgtggtgcagataacctgtctggatgggtttgaagttgtggagggacgtgttggtgcaacatctttctattcgacttgtcaaagcaatggaaagtggagtaattccaaactgaaatgtcaacctgtggactgtggcattcctgaatccattgagaatggtaaagttgaagacccagagagcactttgtttggttctgtcatccgctacacttgtgaggagccatattactacatggaaaatggaggaggtggggagtatcactgtgctggtaacgggagctgggtgaatgaggtgctgggcccggagctgccgaaatgtgttccagtctgtggagtccccagagaaccctttgaagaaaaacagaggataattggaggatccgatgcagatattaaaaacttcccctggcaagtcttctttgacaacccatgggctggtggagcgctcattaatgagtactgggtgctgacggctgctcatgttgtggagggaaacagggagccaacaatgtatgttgggtccacctcagtgcagacctcacggctggcaaaatccaagatgctcactcctgagcatgtgtttattcatccgggatggaagctgctggaagtcccagaaggacgaaccaattttgataatgacattgcactggtgcggctgaaagacccagtgaaaatgggacccaccgtctctcccatctgcctaccaggcacctcttccgactacaacctcatggatggggacctgggactgatctcaggctggggccgaacagagaagagagatcgtgctgttcgcctcaaggcggcaaggttacctgtagctcctttaagaaaatgcaaagaagtgaaagtggagaaacccacagcagatgcagaggcctatgttttcactcctaacatgatctgtgctggaggagagaagggcatggatagctgtaaaggggacagtggtggggcctttgctgtacaggatcccaatgacaagaccaaattctacgcagctggcctggtgtcctgggggccccagtgtgggacctatgggctctacacacgggtaaagaactatgttgactggataatgaagactatgcaggaaaatagcaccccccgtgaggactaatccagatacatcccaccagcctctccaagggtggtgaccaatgcattaccttctgttccttatgatattctcattatttcatcatgactgaaagaagacacgagcgaatgatttaaatagaacttgattgttgagacgccttgctagaggtagagtttgatcatagaattgtgctggtcatacatttgtggtctgactccttggggtcctttccccggagtacctattgtagataacactatgggtggggcactcctttcttgcactattccacagggataccttaattctttgtttcctctttacctgttcaaaattccatttacttgatcattctcagttctcactcccgggatacctctagagtcagc

SEQ ID NO: 432254 - DNA, 2710 bp, Homo sapiens
atgcacactcgggtagggaatcttatgaacagaaccaggacagggaggctggccggaggttcctgcagagggagcgtcaaggccctgtgctgctgtccctgggggccagaggggttgcccagcatgcccactggcaggagagagggaactgacccacttgctcctaccagcttctgaagtaggctccaaagtccggaggtgcagaaagccaggaccaagagacaggcagctcaccagggtggacaaatcgccagagatgtggtgcattgtcctgttttcacttttggcatgggtttatgctgagcctaccatgtatggggagatcctgtcccctaactatcctcaggcatatcccagtgaggtagagaaatcttgggacatagaagttcctgaagggtatgggattcacctctacttcacccatctggacattgagctgtcagagaactgtgcgtatgactcagtgcagataatctcaggagacactgaagaagggaggctctgtggacagaggagcagtaacaatccccactctccaattgtggaagagttccaagtcccatacaacaaactccaggtgatctttaagtcagacttttccaatgaagagcgttttacggggtttgctgcatactatgttgccacagacataaatgaatgcacagattttgtagatgtcccttgtagccacttctgcaacaatttcattggtggttacttctgctcctgccccccggaatatttcctccatgatgacatgaagaattgcggagttaattgcagtggggatgtattcactgcactgattggggagattgcaagtcccaattatcccaaaccatatccagagaactcaaggtgtgaataccagatccggttggagaaagggttccaagtggtggtgaccttgcggagagaagattttgatgtggaagcagctgactcagcgggaaactgccttgacagtttagtttttgttgcaggagatcggcaatttggtccttactgtggtcatggattccctgggcctctaaatattgaaaccaagagtaatgctcttgatatcatcttccaaactgatctaacagggcaaaaaaagggctggaaacttcgctatcatggagatccaatgccctgccctaaggaagacactcccaattctgtttgggagcctgcgaaggcaaaatatgtctttagagatgtggtgcagataacctgtctggatgggtttgaagttgtggagggacgtgttggtgcaacatctttctattcgacttgtcaaagcaatggaaagtggagtaattccaaactgaaatgtcaacctgtggactgtggcattcctgaatccattgagaatggtaaagttgaagacccagagagcactttgtttggttctgtcatccgctacacttgtgaggagccatattactacatggaaaatggaggaggtggggagtatcactgtgctggtaacgggagctgggtgaatgaggtgctgggcccggagctgccgaaatgtgttccagtctgtggagtccccagagaaccctttgaagaaaaacagaggataattggaggatccgatgcagatattaaaaacttcccctggcaagtcttctttgacaacccatgggctggtggagcgctcattaatgagtactgggtgctgacggctgctcatgttgtggagggaaacagggagccaacaatgtatgttgggtccacctcagtgcagacctcacggctggcaaaatccaagatgctcactcctgagcatgtgtttattcatccgggatggaagctgctggaagtcccagaaggacgaaccaattttgataatgacattgcactggtgcggctgaaagacccagtgaaaatgggacccaccgtctctcccatctgcctaccaggcacctcttccgactacaacctcatggatggggacctgggactgatctcaggctggggccgaacagagaagagagatcgtgctgttcgcctcaaggcggcaaggttacctgtagctcctttaagaaaatgcaaagaagtgaaagtggagaaacccacagcagatgcagaggcctatgttttcactcctaacatgatctgtgctggaggagagaagggcatggatagctgtaaaggggacagtggtggggcctttgctgtacaggatcccaatgacaagaccaaattctacgcagctggcctggtgtcctgggggccccagtgtgggacctatgggctctacacacgggtaaagaactatgttgactggataatgaagactatgcaggaaaatagcaccccccgtgaggactaatccagatacatcccaccagcctctccaagggtggtgaccaatgcattaccttctgttccttatgatattctcattatttcatcatgactgaaagaagacacgagcgaatgatttaaatagaacttgattgttgagacgccttgctagaggtagagtttgatcatagaattgtgctggtcatacatttgtggtctgactccttggggtcctttccccggagtacctattgtagataacactatgggtggggcactcctttcttgcactattccacagggataccttaattctttgtttcctctttacctgttcaaaattccatttacttgatcattctcagttccgccaatagagcaaagacgacgtttaaaaacagaccccaaaaga

SEQ ID NO: 432255 - DNA, 2588 bp, Homo sapiens
atgcacactcgggtagggaatcttatgaacagaaccaggacagggaggctggccggaggttcctgcagagggagcgtcaaggccctgtgctgctgtccctgggggccagaggggttgcccagcatgcccactggcaggagagagggaactgacccacttgctcctaccagcttctgaaggtgacactgagccccaggtgacgccgcaccaccaaagaaggtgcttgtgtttgtcagacaaatacagccaggcctgccaccccttaggctccaaagtccggaggtgcagaaagccaggaccaagagacaggcagctcaccagggtggacaaatcgccagagatgtggtgcattgtcctgttttcacttttggcatgggtttatgctgagcctaccatgtatggggagatcctgtcccctaactatcctcaggcatatcccagtgaggtagagaaatcttgggacatagaagttcctgaagggtatgggattcacctctacttcacccatctggacattgagctgtcagagaactgtgcgtatgactcagtgcagataatctcaggagacactgaagaagggaggctctgtggacagaggagcagtaacaatccccactctccaattgtggaagagttccaagtcccatacaacaaactccaggtgatctttaagtcagacttttccaatgaagagcgttttacggggtttgctgcatactatgttgccacagacataaatgaatgcacagattttgtagatgtcccttgtagccacttctgcaacaatttcattggtggttacttctgctcctgccccccggaatatttcctccatgatgacatgaagaattgcggagttaattgcagtggggatgtattcactgcactgattggggagattgcaagtcccaattatcccaaaccatatccagagaactcaaggtgtgaataccagatccggttggagaaagggttccaagtggtggtgaccttgcggagagaagattttgatgtggaagcagctgactcagcgggaaactgccttgacagtttagtttttgttgcaggagatcggcaatttggtccttactgtggtcatggattccctgggcctctaaatattgaaaccaagagtaatgctcttgatatcatcttccaaactgatctaacagggcaaaaaaagggctggaaacttcgctatcatggagatccaatgccctgccctaaggaagacactcccaattctgtttgggagcctgcgaaggcaaaatatgtctttagagatgtggtgcagataacctgtctggatgggtttgaagttgtggagggacgtgttggtgcaacatctttctattcgacttgtcaaagcaatggaaagtggagtaattccaaactgaaatgtcaacctgtggactgtggcattcctgaatccattgagaatggtaaagttgaagacccagagagcactttgtttggttctgtcatccgctacacttgtgaggagccatattactacatggaaaatggaggaggtggggagtatcactgtgctggtaacgggagctgggtgaatgaggtgctgggcccggagctgccgaaatgtgttccagtctgtggagtccccagagaaccctttgaagaaaaacagaggataattggaggatccgatgcagatattaaaaacttcccctggcaagtcttctttgacaacccatgggctggtggagcgctcattaatgagtactgggtgctgacggctgctcatgttgtggagggaaacagggagccaacaatgtatgttgggtccacctcagtgcagacctcacggctggcaaaatccaagatgctcactcctgagcatgtgtttattcatccgggatggaagctgctggaagtcccagaaggacgaaccaattttgataatgacattgcactggtgcggctgaaagacccagtgaaaatgggacccaccgtctctcccatctgcctaccaggcacctcttccgactacaacctcatggatggggacctgggactgatctcaggctggggccgaacagagaagagagatcgtgctgttcgcctcaaggcggcaaggttacctgtagctcctttaagaaaatgcaaagaagtgaaagtggagaaacccacagcagatgcagaggcctatgttttcactcctaacatgatctgtgctggaggagagaagggcatggatagctgtaaaggggacagtggtggggcctttgctgtacaggatcccaatgacaagaccaaattctacgcagctggcctggtgtcctgggggccccagtgtgggacctatgggctctacacacgggtaaagaactatgttgactggataatgaagactatgcaggaaaatagcaccccccgtgaggactaatccagatacatcccaccagcctctccaagggtggtgaccaatgcattaccttctgttccttatgatattctcattatttcatcatgactgaaagaagacacgagcgaatgatttaaatagaacttgattgttgagaagcttggttaagtaaagttggcacaagagggggcggggggggacc

SEQ ID NO: 432256 - DNA, 2271 bp, Homo sapiens
atgcacactcgggtagggaatcttatgaacagaaccaggacagggaggctggccggaggttcctgcagagggagcgtcaaggccctgtgctgctgtccctgggggccagaggggttgcccagcatgcccactggcaggagagagggaactgacccacttgctcctaccagcttctgaaggtgacactgagccccaggtgacgccgcaccaccaaagaaggtgcttgtgtttgtcagacaaatacagccaggcctgccaccccttaggctccaaagtccggaggtgcagaaagccaggaccaagagacaggcagctcaccagggtggacaaatcgccagagatgtggtgcattgtcctgttttcacttttggcatgggtttatgctgagcctaccatgtatggggagatcctgtcccctaactatcctcaggcatatcccagtgaggtagagaaatcttgggacatagaagttcctgaagggtatgggattcacctctacttcacccatctggacattgagctgtcagagaactgtgcgtatgactcagtgcagataatctcaggagacactgaagaagggaggctctgtggacagaggagcagtaacaatccccactctccaattgtggaagagttccaagtcccatacaacaaactccaggtgatctttaagtcagacttttccaatgaagagcgttttacggggtttgctgcatactatgttgccacagacataaatgaatgcacagattttgtagatgtcccttgtagccacttctgcaacaatttcattggtggttacttctgctcctgccccccggaatatttcctccatgatgacatgaagaattgcggagttaattgcagtggggatgtattcactgcactgattggggagattgcaagtcccaattatcccaaaccatatccagagaactcaaggtgtgaataccagatccggttggagaaagggttccaagtggtggtgaccttgcggagagaagattttgatgtggaagcagctgactcagcgggaaactgccttgacagtttagtttttgttgcaggagatcggcaatttggtccttactgtggtcatggattccctgggcctctaaatattgaaaccaagagtaatgctcttgatatcatcttccaaactgatctaacagggcaaaaaaagggctggaaacttcgctatcatggagatccaatgccctgccctaaggaagacactcccaattctgtttgggagcctgcgaaggcaaaatatgtctttagagatgtggtgcagataacctgtctggatgggtttgaagttgtggagggacgtgttggtgcaacatctttctattcgacttgtcaaagcaatggaaagtggagtaattccaaactgaaatgtcaacctgtggactgtggcattcctgaatccattgagaatggtaaagttgaagacccagagagcactttgtttggttctgtcatccgctacacttgtgaggagccatattactacatggaaaatggaggaggtggggagtatcactgtgctggtaacgggagctgggtgaatgaggtgctgggcccggagctgccgaaatgtgttccagtctgtggagtccccagagaaccctttgaagaaaaacagaggataattggaggatccgatgcagatattaaaaacttcccctggcaagtcttctttgacaacccatgggctggtggagcgctcattaatgagtactgggtgctgacggctgctcatgttgtggagggaaacagggagccaacaatgtatgttgggtccacctcagtgcagacctcacggctggcaaaatccaagatgctcactcctgagcatgtgtttattcatccgggatggaagctgctggaagtcccagaaggacgaaccaattttgataatgacattgcactggtgcggctgaaagacccagtgaaaatgggacccaccgtctctcccatctgcctaccaggcacctcttccgactacaacctcatggatggggacctgggactgatctcaggctggggccgaacagagaagagagatcgtgctgttcgcctcaaggcggcaaggttacctgtagctcctttaagaaaatgcaaagaagtgaaagtggagaaacccacagcagatgcagaggcctatgttttcactcctaacatgatctgtgctggaggagagaagggcatggatagctggtgatggtatatgcagacggggctccactatctatttatcagacgtgc

SEQ ID NO: 432257 - DNA, 2143 bp, Homo sapiens
atgcacactcgggtagggaatcttatgaacagaaccaggacagggaggctggccggaggttcctgcagagggagcgtcaaggccctgtgctgctgtccctgggggccagaggggttgcccagcatgcccactggcaggagagagggaactgacccacttgctcctaccagcttctgaaggtgacactgagccccaggtgacgccgcaccaccaaagaaggtgcttgtgtttgtcagacaaatacagccaggcctgccaccccttaggctccaaagtccggaggtgcagaaagccaggaccaagagacaggcagctcaccagggtggacaaatcgccagagatgtggtgcattgtcctgttttcacttttggcatgggtttatgctgagcctaccatgtatggggagatcctgtcccctaactatcctcaggcatatcccagtgaggtagagaaatcttgggacatagaagttcctgaagggtatgggattcacctctacttcacccatctggacattgagctgtcagagaactgtgcgtatgactcagtgcagataatctcaggagacactgaagaagggaggctctgtggacagaggagcagtaacaatccccactctccaattgtggaagagttccaagtcccatacaacaaactccaggtgatctttaagtcagacttttccaatgaagagcgttttacggggtttgctgcatactatgttgccacagacataaatgaatgcacagattttgtagatgtcccttgtagccacttctgcaacaatttcattggtggttacttctgctcctgccccccggaatatttcctccatgatgacatgaagaattgcggagttaattgcagtggggatgtattcactgcactgattggggagattgcaagtcccaattatcccaaaccatatccagagaactcaaggtgtgaataccagatccggttggagaaagggttccaagtggtggtgaccttgcggagagaagattttgatgtggaagcagctgactcagcgggaaactgccttgacagtttagtttttgttgcaggagatcggcaatttggtccttactgtggtcatggattccctgggcctctaaatattgaaaccaagagtaatgctcttgatatcatcttccaaactgatctaacagggcaaaaaaagggctggaaacttcgctatcatggagatccaatgccctgccctaaggaagacactcccaattctgtttgggagcctgcgaaggcaaaatatgtctttagagatgtggtgcagataacctgtctggatgggtttgaagttgtggagggacgtgttggtgcaacatctttctattcgacttgtcaaagcaatggaaagtggagtaattccaaactgaaatgtcaacctgtggactgtggcattcctgaatccattgagaatggtaaagttgaagacccagagagcactttgtttggttctgtcatccgctacacttgtgaggagccatattactacatggaaaatggaggaggtggggagtatcactgtgctggtaacgggagctgggtgaatgaggtgctgggcccggagctgccgaaatgtgttccagtctgtggagtccccagagaaccctttgaagaaaaacagaggataattggaggatccgatgcagatattaaaaacttcccctggcaagtcttctttgacaacccatgggctggtggagcgctcattaatgagtactgggtgctgacggctgctcatgttgtggagggaaacagggagccaacaatgtatgttgggtccacctcagtgcagacctcacggctggcaaaatccaagatgctcactcctgagcatgtgtttattcatccgggatggaagctgctggaagtcccagaaggacgaaccaattttgataatgacattgcactggtgcggctgaaagacccagtgaaaatgggacccaccgtctctcccatctgcctaccaggcacctcttccgactacaacctcatggatggggacctgggactgatctcaggctggggccgaacagagaagagagatcgtgctgttcgcctcaaggcggcaaggttacctgtagctcctttaagaaataagcgatgaggcgtagttttt

SEQ ID NO: 432258 - DNA, 1960 bp, Homo sapiens
atgcacactcgggtagggaatcttatgaacagaaccaggacagggaggctggccggaggttcctgcagagggagcgtcaaggccctgtgctgctgtccctgggggccagaggggttgcccagcatgcccactggcaggagagagggaactgacccacttgctcctaccagcttctgaaggtgacactgagccccaggtgacgccgcaccaccaaagaaggtgcttgtgtttgtcagacaaatacagccaggcctgccaccccttaggctccaaagtccggaggtgcagaaagccaggaccaagagacaggcagctcaccagggtggacaaatcgccagagatgtggtgcattgtcctgttttcacttttggcatgggtttatgctgagcctaccatgtatggggagatcctgtcccctaactatcctcaggcatatcccagtgaggtagagaaatcttgggacatagaagttcctgaagggtatgggattcacctctacttcacccatctggacattgagctgtcagagaactgtgcgtatgactcagtgcagataatctcaggagacactgaagaagggaggctctgtggacagaggagcagtaacaatccccactctccaattgtggaagagttccaagtcccatacaacaaactccaggtgatctttaagtcagacttttccaatgaagagcgttttacggggtttgctgcatactatgttgccacagacataaatgaatgcacagattttgtagatgtcccttgtagccacttctgcaacaatttcattggtggttacttctgctcctgccccccggaatatttcctccatgatgacatgaagaattgcggagttaattgcagtggggatgtattcactgcactgattggggagattgcaagtcccaattatcccaaaccatatccagagaactcaaggtgtgaataccagatccggttggagaaagggttccaagtggtggtgaccttgcggagagaagattttgatgtggaagcagctgactcagcgggaaactgccttgacagtttagtttttgttgcaggagatcggcaatttggtccttactgtggtcatggattccctgggcctctaaatattgaaaccaagagtaatgctcttgatatcatcttccaaactgatctaacagggcaaaaaaagggctggaaacttcgctatcatggagatccaatgccctgccctaaggaagacactcccaattctgtttgggagcctgcgaaggcaaaatatgtctttagagatgtggtgcagataacctgtctggatgggtttgaagttgtggagggacgtgttggtgcaacatctttctattcgacttgtcaaagcaatggaaagtggagtaattccaaactgaaatgtcaacctgtggactgtggcattcctgaatccattgagaatggtaaagttgaagacccagagagcactttgtttggttctgtcatccgctacacttgtgaggagccatattactacatggaaaatggaggaggtggggagtatcactgtgctggtaacgggagctgggtgaatgaggtgctgggcccggagctgccgaaatgtgttccagtctgtggagtccccagagaaccctttgaagaaaaacagaggataattggaggatccgatgcagatattaaaaacttcccctggcaagtcttctttgacaacccatgggctggtggagcgctcattaatgagtactgggtgctgacggctgctcatgttgtggagtgtcacacggatcccaccaaggaccataggtacacatgccgactcatcagcccagagactggaacagtatgggcctcttcctccgtcggggtcgacagtaagtggtgttgaggtagcgctctgttagtagcatattaataccagctgataggacttggattagtactacctggttaggtctacctg

SEQ ID NO: 432259 - DNA, 960 bp, Homo sapiens
atgcacactcgggtagggaatcttatgaacagaaccaggacagggaggctggccggaggttcctgcagagggagcgtcaaggccctgtgctgctgtccctgggggccagaggggttgcccagcatgcccactggcaggagagagggaactgacccacttgctcctaccagcttctgaaggtgacactgagccccaggtgacgccgcaccaccaaagaaggtgcttgtgtttgtcagacaaatacagccaggcctgccaccccttaggctccaaagtccggaggtgcagaaagccaggaccaagagacaggcagctcaccagggtggacaaatcgccagagatgtggtgcattgtcctgttttcacttttggcatgggtttatgctgagcctaccatgtatggggagatcctgtcccctaactatcctcaggcatatcccagtgaggtagagaaatcttgggacatagaagttcctgaagggtatgggattcacctctacttcacccatctggacattgagctgtcagagaactgtgcgtatgactcagtgcagataatctcaggagacactgaagaagggaggctctgtggacagaggagcagtaacaatccccactctccaattgtggaagagttccaagtcccatacaacaaactccaggtgatctttaagtcagacttttccaatgaagagcgttttacggggtttgctgcatactatgttgccacagacataaatgaatgcacagattttgtagatgtcccttgtagccacttctgcaacaatttcattggtggttacttctgctcctgccccccggaatatttcctccatgatgacatgaagaattgcggagttaattgcagtggggatgtattcactgcactgattggggagattgcaagtcccaattatcccaaaccatatccagtgtggaggggatcctctaggacagccca

SEQ ID NO: 432260 - DNA, 231 bp, Homo sapiens
cggactataactgaacaggctctgattccatttctggttcctcttccctttgctcatcctttccccggagtacctattgtagataacactatgggtggggcactcctttcttgcactattccacagggataccttaattctttgtttcctctttacctgttcaaaattccatttacttgatcattctcagtatccactgtctatgtacaataaaggatgtttataagcaaa

SEQ ID NO: 432261 - DNA, 532 bp, Homo sapiens
gacattgagctgtcagagaactgtgcgtatgactcagtgcaggtatgttataagcacaaaaagaatagagatggaagactagggctaaggtagcggaataaggatgtgggagggagtgccacctgtactcacagtgaactggagtcaagtcctagtggcataaatgttctattctctctgtcccttcttttaactccataccaaaatattaccctttcctagattttttttttgtgactcttctcttagataatctcaggagacactgaagaagggaggctctgtggacagaggagcagtaacaatccccactctccaattgtggaagagttccaagtcccatacaacaaactccaggtgatctttaagtcagacttttccaatgaagagcgttttacggggtttgctgcatactatgttgccacaggtaaggctcacccttctgcatgtgccttattgacccagctaaaagattagaaatgagaaatccactgagcaacacattgaatgaggattctgttcgtaattctta

SEQ ID NO: 432262 - DNA, 692 bp, Homo sapiens
tgtgtagttttctcgcccctgtttcaacctcctcccacgttgagtccccagagtccattatatcactctgtattggcatctattcttagttactcataagctgagatgaagccacaagaaggaggaagataagactatagggtaaagttagttaattggataagagagatagatgcctgtaaagggtctactgggggctgttcataaccagaaaggctccatcctaagcaaagtgatggaaacctaatagggattgggtattcctactgatacgtattgcacgtgtaattgctctatccctccagttagggcagggatctcaggttagtttgaatgcaggactgtcagtttctgagagaaggaatcatagaatagtgcaggaattcctttgcttgaccctgtatttgattctccctttctctttttctctgttagttaattgcagtggggatgtattcactgcactgattggggagattgcaagtcccaattatcccaaaccatatccagagaactcaaggtgtgaataccagatccggttggagaaagggttccaagtggtggtgaccttgcggagagaagattttgatgtggaagcagctgactcagcgggaaactgccttgacagtttagttgtgcgtgatggttgattaataccccacccttaacttacacagagagatctctccctg

SEQ ID NO: 432263 - DNA, 2739 bp, Homo sapiens
atgcacactcgggtagggaatcttatgaacagaaccaggacagggaggctggccggaggttcctgcagagggagcgtcaaggccctgtgctgctgtccctgggggccagaggggttgcccagcatgcccactggcaggagagagggaactgacccacttgctcctaccagcttctgaaggtgacactgagccccaggtgacgccgcaccaccaaagaaggtgcttgtgtttgtcagacaaatacagccaggcctgccaccccttaggctccaaagtccggaggtgcagaaagccaggaccaagagacaggcagctcaccagggtggacaaatcgccagagatgtggtgcattgtcctgttttcacttttggcatgggtttatgctgagcctaccatgtatggggagatcctgtcccctaactatcctcaggcatatcccagtgaggtagagaaatcttgggacatagaagttcctgaagggtatgggattcacctctacttcacccatctggacattgagctgtcagagaactgtgcgtatgactcagtgcagataatctcaggagacactgaagaagggaggctctgtggacagaggagcagtaacaatccccactctccaattgtggaagagttccaagtcccatacaacaaactccaggtgatctttaagtcagacttttccaatgaagagcgttttacggggtttgctgcatactatgttgccacagacataaatgaatgcacagattttgtagatgtcccttgtagccacttctgcaacaatttcattggtggttacttctgctcctgccccccggaatatttcctccatgatgacatgaagaattgcggagttaattgcagtggggatgtattcactgcactgattggggagattgcaagtcccaattatcccaaaccatatccagagaactcaaggtgtgaataccagatccggttggagaaagggttccaagtggtggtgaccttgcggagagaagattttgatgtggaagcagctgactcagcgggaaactgccttgacagtttagtttttgttgcaggagatcggcaatttggtccttactgtggtcatggattccctgggcctctaaatattgaaaccaagagtaatgctcttgatatcatcttccaaactgatctaacagggcaaaaaaagggctggaaacttcgctatcatggagatccaatgccctgccctaaggaagacactcccaattctgtttgggagcctgcgaaggcaaaatatgtctttagagatgtggtgcagataacctgtctggatgggtttgaagttgtggagggacgtgttggtgcaacatctttctattcgacttgtcaaagcaatggaaagtggagtaattccaaactgaaatgtcaacctgtggactgtggcattcctgaatccattgagaatggtaaagttgaagacccagagagcactttgtttggttctgtcatccgctacacttgtgaggagccatattactacatggaaaatggaggaggtggggagtatcactgtgctggtaacgggagctgggtgaatgaggtgctgggcccggagctgccgaaatgtgttccagtctgtggagtccccagagaaccctttgaagaaaaacagaggataattggaggatccgatgcagatattaaaaacttcccctggcaagtcttctttgacaacccatgggctggtggagcgctcattaatgagtactgggtgctgacggctgctcatgttgtggagggaaacagggagccaacaatgtatgttgggtccacctcagtgcagacctcacggctggcaaaatccaagatgctcactcctgagcatgtgtttattcatccgggatggaagctgctggaagtcccagaaggacgaaccaattttgataatgacattgcactggtgcggctgaaagacccagtgaaaatgggacccaccgtctctcccatctgcctaccaggcacctcttccgactacaacctcatggatggggacctgggactgatctcaggctggggccgaacagagaagagagatcgtgctgttcgcctcaaggcggcaaggttacctgtagctcctttaagaaaatgcaaagaagtgaaagtggagaaacccacagcagatgcagaggcctatgttttcactcctaacatgatctgtgctggaggagagaagggcatggatagctgtaaaggggacagtggtggggcctttgctgtacaggatcccaatgacaagaccaaattctacgcagctggcctggtgtcctgggggccccagtgtgggacctatgggctctacacacgggtaaagaactatgttgactggataatgaagactatgcaggaccaagggtggtgaccaatgcattaccttctgttccttatgatattctcattatttcatcatgactgaaagaagacacgagcgaatgatttaaatagaacttgattgttgagacgccttgctagaggtagagtttgatcatagaattgtgctggtcatacatttgtggtctgactccttggggtcctttccccggagtacctattgtagataacactatgggtggggcactcctttcttgcactattccacagggataccttaattctttgtttcctctttacctgttcaaaattccatttacttgatcattctcagtatccactgtctatgtacaataaaggatgtttataagcaaa

SEQ ID NO: 432264 - DNA, 2579 bp, Homo sapiens
atgcacactcgggtagggaatcttatgaacagaaccaggacagggaggctggccggaggttcctgcagagggagcgtcaaggccctgtgctgctgtccctgggggccagaggggttgcccagcatgcccactggcaggagagagggaactgacccacttgctcctaccagcttctgaaggtgacactgagccccaggtgacgccgcaccaccaaagaaggtgcttgtgtttgtcagacaaatacagccaggcctgccaccccttaggctccaaagtccggaggtgcagaaagccaggaccaagagacaggcagctcaccagggtggacaaatcgccagagatgtggtgcattgtcctgttttcacttttggcatgggtttatgctgagcctaccatgtatggggagatcctgtcccctaactatcctcaggcatatcccagtgaggtagagaaatcttgggacatagaagttcctgaagggtatgggattcacctctacttcacccatctggacattgagctgtcagagaactgtgcgtatgactcagtgcagataatctcaggagacactgaagaagggaggctctgtggacagaggagcagtaacaatccccactctccaattgtggaagagttccaagtcccatacaacaaactccaggtgatctttaagtcagacttttccaatgaagagcgttttacggggtttgctgcatactatgttgccacagacataaatgaatgcacagattttgtagatgtcccttgtagccacttctgcaacaatttcattggtggttacttctgctcctgccccccggaatatttcctccatgatgacatgaagaattgcggagttaattgcagtggggatgtattcactgcactgattggggagattgcaagtcccaattatcccaaaccatatccagagaactcaaggtgtgaataccagatccggttggagaaagggttccaagtggtggtgaccttgcggagagaagattttgatgtggaagcagctgactcagcgggaaactgccttgacagtttagtttttgttgcaggagatcggcaatttggtccttactgtggtcatggattccctgggcctctaaatattgaaaccaagagtaatgctcttgatatcatcttccaaactgatctaacagggcaaaaaaagggctggaaacttcgctatcatggagatccaatgccctgccctaaggaagacactcccaattctgtttgggagcctgcgaaggcaaaatatgtctttagagatgtggtgcagataacctgtctggatgggtttgaagttgtggagggacgtgttggtgcaacatctttctattcgacttgtcaaagcaatggaaagtggagtaattccaaactgaaatgtcaacctgtggactgtggcattcctgaatccattgagaatggtaaagttgaagacccagagagcactttgtttggttctgtcatccgctacacttgtgaggagccatattactacatggaaaatggaggaggtggggagtatcactgtgctggtaacgggagctgggtgaatgaggtgctgggcccggagctgccgaaatgtgttccagtctgtggagtccccagagaaccctttgaagaaaaacagaggataattggaggatccgatgcagatattaaaaacttcccctggcaagtcttctttgacaacccatgggctggtggagcgctcattaatgagtactgggtgctgacggctgctcatgttgtggagggaaacagggagccaacaatgtatgttgggtccacctcagtgcagacctcacggctggcaaaatccaagatgctcactcctgagcatgtgtttattcatccgggatggaagctgctggaagtcccagaaggacgaaccaattttgataatgacattgcactggtgcggctgaaagacccagtgaaaatgggacccaccgtctctcccatctgcctaccaggcacctcttccgactacaacctcatggatggggacctgggactgatctcaggctggggccgaacagagaagagagatcgtgctgttcgcctcaaggcggcaaggttacctgtagctcctttaagaaaatgcaaagaagtgaaagtggagaaacccacagcagatgcagaggcctatgttttcactcctaacatgatctgtgctggaggagagaagggcatggatagctccaagggtggtgaccaatgcattaccttctgttccttatgatattctcattatttcatcatgactgaaagaagacacgagcgaatgatttaaatagaacttgattgttgagacgccttgctagaggtagagtttgatcatagaattgtgctggtcatacatttgtggtctgactccttggggtcctttccccggagtacctattgtagataacactatgggtggggcactcctttcttgcactattccacagggataccttaattctttgtttcctctttacctgttcaaaattccatttacttgatcattctcagtatccactgtctatgtacaataaaggatgtttataagcaaa

SEQ ID NO: 432265 - DNA, 2295 bp, Homo sapiens
atgcacactcgggtagggaatcttatgaacagaaccaggacagggaggctggccggaggttcctgcagagggagcgtcaaggccctgtgctgctgtccctgggggccagaggggttgcccagcatgcccactggcaggagagagggaactgacccacttgctcctaccagcttctgaaggtgacactgagccccaggtgacgccgcaccaccaaagaaggtgcttgtgtttgtcagacaaatacagccaggcctgccaccccttaggctccaaagtccggaggtgcagaaagccaggaccaagagacaggcagctcaccagggtggacaaatcgccagagatgtggtgcattgtcctgttttcacttttggcatgggtttatgctgagcctaccatgtatggggagatcctgtcccctaactatcctcaggcatatcccagtgaggtagagaaatcttgggacatagaagttcctgaagggtatgggattcacctctacttcacccatctggacattgagctgtcagagaactgtgcgtatgactcagtgcagataatctcaggagacactgaagaagggaggctctgtggacagaggagcagtaacaatccccactctccaattgtggaagagttccaagtcccatacaacaaactccaggtgatctttaagtcagacttttccaatgaagagcgttttacggggtttgctgcatactatgttgccacagacataaatgaatgcacagattttgtagatgtcccttgtagccacttctgcaacaatttcattggtggttacttctgctcctgccccccggaatatttcctccatgatgacatgaagaattgcggagttaattgcagtggggatgtattcactgcactgattggggagattgcaagtcccaattatcccaaaccatatccagagaactcaaggtgtgaataccagatccggttggagaaagggttccaagtggtggtgaccttgcggagagaagattttgatgtggaagcagctgactcagcgggaaactgccttgacagtttagtttttgttgcaggagatcggcaatttggtccttactgtggtcatggattccctgggcctctaaatattgaaaccaagagtaatgctcttgatatcatcttccaaactgatctaacagggcaaaaaaagggctggaaacttcgctatcatggagatccaatgccctgccctaaggaagacactcccaattctgtttgggagcctgcgaaggcaaaatatgtctttagagatgtggtgcagataacctgtctggatgggtttgaagttgtggagggacgtgttggtgcaacatctttctattcgacttgtcaaagcaatggaaagtggagtaattccaaactgaaatgtcaacctgtggactgtggcattcctgaatccattgagaatggtaaagttgaagacccagagagcactttgtttggttctgtcatccgctacacttgtgaggagccatattactacatggaaaatggaggaggtggggagtatcactgtgctggtaacgggagctgggtgaatgaggtgctgggcccggagctgccgaaatgtgttccagtctgtggagtccccagagaaccctttgaagaaaaacagaggataattggaggatccgatgcagatattaaaaacttcccctggcaagtcttctttgacaacccatgggctggtggagcgctcattaatgagtactgggtgctgacggctgctcatgttgtggagggaaacagggagccaacaatgtatgttgggtccacctcagtgcagacctcacggctggcaaaatccaagatgctcactcctgagcatgtgtttattcatccgggatggaagctgctggaagtcccagaaggacgaaccaattttgataatgacattgcactggtgcggctgaaagacccagtgaaaatgggacccaccgtctctcccatctgcctaccaggcacctcttccgactacaacctcatggatggggacctgggactgatctcaggctggggccgaacagagaagagagatcgtgctgttcgcctcaaggcggcaaggttacctgtagctcctttaagaatcctttccccggagtacctattgtagataacactatgggtggggcactcctttcttgcactattccacagggataccttaattctttgtttcctctttacctgttcaaaattccatttacttgatcattctcagtatccactgtctatgtacaataaaggatgtttataagcaaa

SEQ ID NO: 432266 - DNA, 1738 bp, Homo sapiens
atgcacactcgggtagggaatcttatgaacagaaccaggacagggaggctggccggaggttcctgcagagggagcgtcaaggccctgtgctgctgtccctgggggccagaggggttgcccagcatgcccactggcaggagagagggaactgacccacttgctcctaccagcttctgaaggtgacactgagccccaggtgacgccgcaccaccaaagaaggtgcttgtgtttgtcagacaaatacagccaggcctgccaccccttaggctccaaagtccggaggtgcagaaagccaggaccaagagacaggcagctcaccagggtggacaaatcgccagagatgtggtgcattgtcctgttttcacttttggcatgggtttatgctgagcctaccatgtatggggagatcctgtcccctaactatcctcaggcatatcccagtgaggtagagaaatcttgggacatagaagttcctgaagggtatgggattcacctctacttcacccatctggacattgagctgtcagagaactgtgcgtatgactcagtgcagataatctcaggagacactgaagaagggaggctctgtggacagaggagcagtaacaatccccactctccaattgtggaagagttccaagtcccatacaacaaactccaggtgatctttaagtcagacttttccaatgaagagcgttttacggggtttgctgcatactatgttgccacagacataaatgaatgcacagattttgtagatgtcccttgtagccacttctgcaacaatttcattggtggttacttctgctcctgccccccggaatatttcctccatgatgacatgaagaattgcggagttaattgcagtggggatgtattcactgcactgattggggagattgcaagtcccaattatcccaaaccatatccagagaactcaaggtgtgaataccagatccggttggagaaagggttccaagtggtggtgaccttgcggagagaagattttgatgtggaagcagctgactcagcgggaaactgccttgacagtttagtttttgttgcaggagatcggcaatttggtccttactgtggtcatggattccctgggcctctaaatattgaaaccaagagtaatgctcttgatatcatcttccaaactgatctaacagggcaaaaaaagggctggaaacttcgctatcatggagatccaatgccctgccctaaggaagacactcccaattctgtttgggagcctgcgaaggcaaaatatgtctttagagatgtggtgcagataacctgtctggatgggtttgaagttgtggagggacgtgttggtgcaacatctttctattcgacttgtcaaagcaatggaaagtggagtaattccaaactgaaatgtcaacctgtggactgtggcattcctgaatccattgagaatggtaaagttgaagacccagagagcactttgtttggttctgtcatccgctacacttgtgaggagccatattactacatggaaaatggaggaggtggggagtatcactgtgctggtaacgggagctgggtgaatgaggtgctgggcccggagctgccgaaatgtgttccagtctgtggagtccccagagaaccctttgaagaaaaacagaggataattggagggccgtccactccgaatcggagggtgaactcttcgcattctttctgacagctccggattctgggtcaactgtgccgc

SEQ ID NO: 432267 - DNA, 1060 bp, Homo sapiens
atgcacactcgggtagggaatcttatgaacagaaccaggacagggaggctggccggaggttcctgcagagggagcgtcaaggccctgtgctgctgtccctgggggccagaggggttgcccagcatgcccactggcaggagagagggaactgacccacttgctcctaccagcttctgaaggtgacactgagccccaggtgacgccgcaccaccaaagaaggtgcttgtgtttgtcagacaaatacagccaggcctgccaccccttaggctccaaagtccggaggtgcagaaagccaggaccaagagacaggcagctcaccagggtggacaaatcgccagagatgtggtgcattgtcctgttttcacttttggcatgggtttatgctgagcctaccatgtatggggagatcctgtcccctaactatcctcaggcatatcccagtgaggtagagaaatcttgggacatagaagttcctgaagggtatgggattcacctctacttcacccatctggacattgagctgtcagagaactgtgcgtatgactcagtgcagataatctcaggagacactgaagaagggaggctctgtggacagaggagcagtaacaatccccactctccaattgtggaagagttccaagtcccatacaacaaactccaggtgatctttaagtcagacttttccaatgaagagcgttttacggggtttgctgcatactatgttgccacagacataaatgaatgcacagtgacaaggtaatggtcctagacaacgggaagattatagagtgcggcagccctgaagaactgctacaaatccctggacccttttactttatggctaaggaagctggcattgagaatgtgaacagcacaaaattctagcagaaggccccatgggttagaaaaggactataagaataatttcttatttaattttattttttataaaatacagaatacatacaaaagtgtgtataaaatgtacgttttaaaaaaggataagtgaacacccatgaacctactacccaggttaagaaaataaatgtcaccaggtacc

SEQ ID NO: 432268 - DNA, 1542 bp, Homo sapiens
  misc_feature (1427)..(1427): n is a, c, g, or t
atgtggaattttattctttctatataaactttaaggtttgtttatagagttccttaaaaatttgattggaattgtataaattaatagggagaaagttgatatctttatgatatttgttccatccaagagcatggaatgtctgtattttaaattatcatctatattgtttattaggtcttacatattcatgattagttcctaggttctttataggattaggtttttgttgtttgtttttccttctgtgaaatgtctttatatatggtctagttagtattgctggtataaaagttagtattgctggtataaaagttaacagtgcctgagttgaaacactggccccgtgacttactagatgaatggctttgatcacgtaacttaatccacaggtaagatggggacaataaaagtaccaacttttagggttgttagaagaattttaaaatagttaacatttgtgcagttactagagtagtacatggcaaatagtgttatatgagtaattaaattaatgaatattcataggttaatttcagatcaggaacattgttgaactctaatagtttgtatggttttttaaattggatgatatcatctgtaagctaatagttttatctcttccaattcttaacgtatctttttccaaaaagagaaaaatgttgattagaactttcagtactgtgtcagacagtatcagtctcagtcaacatggttatctttagctaatttcactttttgctgttgttgttgttgtagagaagagtctcattctgtcacccagactggagtacagtggtgtgatcatagctcaccacacagcctccaactcctgggctcaagcagtccgcctgcctcagcctcccaagtagctagaactaaaggcacacaccaccacgcctggctaaatttttaaaatttttttgtagagacagggtcttgccatattgcccaggctggtcttgaactcctgatctcaagtgatcctccacccttggcctcccaaaatgctaggattacaagcatgagccactgtgtcctgcccctgacttcacttttaaaggaaatgtatctcatcttattcaggataatgtttgcttaaagattttggtagataacctttaccaagttgagaaagttacattctctttctagtttggtaaaaatgttttgtcttttaaataataaatacatggtggtcaggaactaacaaaagttatccacattcaataaaattctctctttttttcctttagttctggtaatttatacttttttttaatttgagctattcttactttcctgggataggccatatttgataataacattctttttaatgtactgttggattctgttaagtgatatttaggattttgcaagtgaagtgagcctatacttttcttgtttggttcatctctaagtttggnttgggtattcctgtcagtctcgtgttggttgggtattcctgtcatctcgtgttggttgatattcctgtcatctcgcgccggttggtatcctgtccgatcctctagatcaccccag

SEQ ID NO: 432269 - DNA, 752 bp, Homo sapiens
aagggggaggggccttgactcagcggaagtagcgtcggcgcgggagctgagcggagtggccttgccaccggaggggaagggctgctggcgttaggcctggctgggtcgtgcggctgagcgtgaggctagaaagaaaaagcgatcctccaagagtgagaacgggagatctgccgaggataacaacctcccttgtggccgaagggcgggggatccccacacgagggctccgcttcgagagacggcgacaaaggaaagttcgtagcgcgttccggaggcccggccacctctgagaagggagacgacgctgctgggtccgctgagcggggcgacccgaggttaatttgtaacccagccaaagaacctaggaggatggagggaagccgtttttccctctcctacacctcagtaacctactgccagctgaagaaatagaacattactaaagccacctgtacatctttctccttttgaattacctgccctccgaagaagtaatggattttctgaatttactgttaacttttaccatgcagctttctatatcttaatgacatattttaatatattaatgacatgaataaatccctgaatgaggatattgtactattttgcatgttttaaccgttaaatgaataattatatgtgcatctggcttttttcaatcaatattgctgtggttcatattgatatgttcataatagtaacttgcacttaattaacctttattatgtgccagacaccatgctaagcac

SEQ ID NO: 432270 - DNA, 656 bp, Homo sapiens
attctcctgccctgcctcccgaatagctgggactacaggcgtccaccaccactcctggctatttttttgtatttttggtggagacagggtttcaccgtgttggccaggatggtcttgatctcctgacctcgtgatccacctgcctcggcctcccaaagtgctgggattgaacccttctaattttaaagaaccttgttattagaaaatctcagcctaatacaatctgaagttaagagttttagcagcattgtttttctaagtagatttagctatagattttcttctggccaaacaaggaagagtatatgcccttgtaaatgagtcttgttttgtttatttaaatagtcagtcaaaacgtagaaatcagtatacgtaaaataaaatgcatgagactattaaatcttttcatatactctacaaataaaatgaaatctgtgtgtggtcctggttgactgggcatctaaagggaatcagaaaagagattgtgaaaagttatatatatatcctcttccttattttagttttgctttttcctattttccataattaagtgccgtttacaaagtggcatcaaaaaattgaagcaggccaggcatgagccaccgtgcccagccataggcaacatttttattaaaacagtccagataccttgagcc

SEQ ID NO: 432271 - DNA, 619 bp, Homo sapiens
taccaagacaacttttattcaccgtatatttcctcccctcacctttccacaactttgtggccaccatcccccagaaagccgcaagcccccatttcttgagtagcgtaggatgctgtataatattcaatcatctgaccatggtgggactcctctgcgtatgtaattaagtacgggttttttttcttgttaatgtctatgtcaggttaatttgtaacccagccaaagaacctaggaggatggagggaagccgtttttccctctcctacacctcagtaacctactgccagctgaagaaatagaacattactaaagccacctgtacatctttctccttttgaattacctgccctccgaagaagtaatggattttctgaatttactgttaacttttaccatgcagctttctatatcttaatgacatattttaatatattaatgacatgaataaatccctgaatgaggatattgtactattttgcatgttttaaccgttaaatgaataattatatgtgcatctggcttttttcaatcaatattgctgtggttcatattgatatgttcataatagtaacttgcacttaattaacctttattatgtgccagacaccatgctaagcac

SEQ ID NO: 432272 - DNA, 731 bp, Homo sapiens
aagggggaggggccttgactcagcggaagtagcgtcggcgcgggagctgagcggagtggccttgccaccggaggggaagggctgctggcgttaggcctggctgggtcgtgcggctgagcgtgaggctagaaagaaaaagcgatcctccaagagtgagaacgggagatctgccgaggataacaacctcccttgtggccgaagggcgggggatccccacacgagggctccgcttcgagagacggcgacaaaggaaagttcgtagcgcgttccggaggcccggccacctctgagaagggagacgacgctgctgggtccgctgagcggggcgacccgaggaagccacttggaggatgtgctttaccaaaatgagggagtaatctgagaaggcatgggatcctgaaactaaaagatgtcacaaaggaaaacgaggaaagtcccaggatgactactgtgtcaagtaagtaggacagaggttccaggaagtaggtatctaggaaaactgggaacaaagtatttgagtacaatggaaagtgtataaataagcaggaaatttgaaattttatttcttagaaagtatgttatttagtaatcagttttttaaaaatttgacattaaaagtataggcaaattggagtcttgtcagctataattagattggtccttacggcataatactccacaattgcagtagatgctgacttcaataagatgtgcgccacagaagatatttt

SEQ ID NO: 432273 - DNA, 528 bp, Homo sapiens
aagggggaggggccttgactcagcggaagtagcgtcggcgcgggagctgagcggagtggccttgccaccggaggggaagggctgctggcgttaggcctggctgggtcgtgcggctgagcgtgaggctagaaagaaaaagcgatcctccaagagtgagaacgggagatctgccgaggataacaacctcccttgtggccgaagggcgggggatccccacacgagggctccgcttcgagagacggcgacaaaggaaagttcgtagcgcgttccggaggcccggccacctctgagaagggagacgacgctgctgggtccgctgagcggggcgacccgaggttagtggagacggatgctgtcttttgaaggccttagtccctgccctggtgaagccgactgcgaggttccacagggcgtgcaggcagtccggggatcgttgcgaaggggggtgcgggctaacttagctgctgccgtttctagatgtgcagctgtgtaggccctgtttacaagtgtgcataaggacagtgtatt

SEQ ID NO: 432274 - DNA, 4502 bp, Homo sapiens
atgtggaattttattctttctatataaactttaaggtttgtttatagagttccttaaaaatttgattggaattgtataaattaatagggagaaagttgatatctttatgatatttgttccatccaagagcatggaatgtctgtattttaaattatcatctatattgtttattaggtcttacatattcatgattagttcctaggttctttataggattaggtttttgttgtttgtttttccttctgtgaaatgtctttatatatggtctagttagtattgctggtataaaagttagtattgctggtataaaagttaacagtgcctgagttgaaacactggccccgtgacttactagatgaatggctttgatcacgtaacttaatccacaggtaagatggggacaataaaagtaccaacttttagggttgttagaagaattttaaaatagttaacatttgtgcagttactagagtagtacatggcaaatagtgttatatgagtaattaaattaatgaatattcataggttaatttcagatcaggaacattgttgaactctaatagtttgtatggttttttaaattggatgatatcatctgtaagctaatagttttatctcttccaattcttaacgtatctttttccaaaaagagaaaaatgttgattagaactttcagtactgtgtcagacagtatcagtctcagtcaacatggttatctttagctaatttcactttttgctgttgttgttgttgtagagaagagtctcattctgtcacccagactggagtacagtggtgtgatcatagctcaccacacagcctccaactcctgggctcaagcagtccgcctgcctcagcctcccaagtagctagaactaaaggcacacaccaccacgcctggctaaatttttaaaatttttttgtagagacagggtcttgccatattgcccaggctggtcttgaactcctgatctcaagtgatcctccacccttggcctcccaaaatgctaggattacaagcatgagccactgtgtcctgcccctgacttcacttttaaaggaaatgtatctcatcttattcaggataatgtttgcttaaagattttggtagataacctttaccaagttgagaaagttacattctctttctagtttggtaaaaatgttttgtcttttaaataataaatacatggtggtcaggaactaacaaaagttatccacattcaataaaattctctctttttttcctttagttctggtaatttatacttttttttaatttgagctattcttactttcctgggataggccatatttgataataacattctttttaatgtactgttggattctgttaagtgatatttaggattttgcaagtgaagtgagcctatacttttcttgtttggttcatctctaagtttgggatttatttttattatctttataaaagtagctggtcagttttcatgcttttttcttttttgtggaacagcttatatagaattggtgataggatcacaacttctgaggtcccagcaagagtcctaacatctagcagctctaccaccaggacaggccccctaaaactaattccaacaagcacctctgaaggtaaaaaaaaaaaaaaaaaaaacttttatagctctctatttggagtttggggcataagggatcagcttttgcaaaagtaattttctaggctaaaactgcatacaaactggcccagttatgtaccaacaaagaattaaaatggccccagactttgctccccaatattgtgattgtaagagctattaccaacaggtaaattggcctaagtctgtgagatagagagggaagagtctgtaagacttcttgctcagcatttgttctgattttagatatcttgaagttaggtaggcaataatgttatccagtgctttcaggctttaatatcatgtctctagtcttctcattcttctcatcacaggttaaggctacctttccagataatccaacagctaaatcaccagtttccaagggcatttgcatcacctatggaaagcatcggatccttatacaccagatgttcttgacagctcatcccgtcattcccccctgcacaaaagttgctataccagcggacaagcaagacaactactgagcttcttttgattgtcaagtagatataatatcactgccagcaaaacagcacaaaaagtgtctcttcacagtatcactaccagttgggactatgctaagtaaatcagcttgcctagatgaggaccccttctattcttgggtagccaggatttgaaggagatactctgacctgtgccagtggtaagtgactaatacttttacacactgaactggtcctggaaactgagatgtcttctttgtaagtgaagaatatacaacataatcttgaagaacggcacagtggtatgggccacaagcatactttatgtgtgtaacggactgaaagacaaattaatcttggtgaaaggatttttcatctcttatttctatttgccagtgttagtcagtgttctgctggcttagattattacctttttctggttccttactgtgttttattctgatgggtcctagaaatccctctcctgaccacttgtcagaatcagaaagtgaggaagaagaaaatattagttacctaaatgagagttctggggaagagtgggattcctctgaagaagaggactctatggtgcccaacttatcgcctcttgagagtcttgcctggcaggttaagtgccttttaaaatattccacaacttggaaacctttaaatcctaattcctggttgtatcatgctaaactgttggatccaagcacaccagtccatatacttcgagagataggtctaagactctcccattgttcccattgtgtccccaaactggaaccaattcctgaatggccccctctggcctcttgtggagtcccaccttttcaaaagcctcttacaagtcccagccggctctctagagatcatgccactctaaatggagcactgcaatttgccaccaaacagctaagccgaacattgagtagagccactcccatacctgaatacctaaaacagatccctaattcatgtgtttctgggtgttgctgtggctggctgactaaaacagttaaggaaacaactcgtactgaacccatcaacactacttattcttacactgacttccaaaaggcagttaacaaactcctaactgcatcactgtaaagatctaccatttgctctgatatctctgatgttgctaattgagaaagtggtacaaagttagtcattacacagcccactaatgccttctcagtcaaactctcttatgccctggcaagccaatgaggataccctttgacaaaccctgtggataaaatgataatatcaaggtcaggcatggtggctcacacctgtaatcccagcactttgggaggctgaggcgggtggatctgctgaagtcagaagtttgagaccagccttgccaacacagtgaaaccctgtctctactaaaaataaaaaaattagccgggcgcagcagtgcacgcctgtaatccctgctactcgggaggctgaaacaggagaatcacttgaacccaggagacggaggttgcggtgagttgagattatgccactgtactccagcctgggtgacagagcgagactcagtctcaaaaaaaaaaaaggagaattagttaaggggaccatattacaaaagatagttgaatattcttcacactcacttctcaccctccccaccccaatttactctgcctttctgaatggctttaatgagatacctgattattaatgaagaaaagtagaccaccaccccttttgttatccagactttagaacagccattgttgaaagcaagaagttagctacccacaataatacctttctgagcatactcttctctaacatacatttctgtggaagtagttgaattaaattgagtaatgcactccagcctgggcaacagtgagacaccgtctcaaaaaaaaaaaaggttaggaatcacaaattgtgtaaatatatagcaactttaagaagagagaagaatgcttataacctagtgaatatttctgctgagccttagttgtcttgtctaaaggaaaaaagagggaattgtagaataaaagtatttgttagtggaaattattgacctgaaaccatatcatattgttagtgtaactgaatgtatcagaaattgttcctatgtaggtattctgtgaaactggtttctaaaatgttacaggaaactgtttcctttttttttgtttgtttgtttaagtggaggtgggaggaggtagggaagaggtctgaatattaaaatatgtttatgttcatgtgttcataatacgttcctttttctctctgtgtgtgtataaaagtgccttgctcatgaatgcatttttgctattcacttcgaaaggaagcctttccccagcttggcagctgaataaaccaatagctttgtacatgc

SEQ ID NO: 432275 - DNA, 4157 bp, Homo sapiens
atgtggaattttattctttctatataaactttaaggtttgtttatagagttccttaaaaatttgattggaattgtataaattaatagggagaaagttgatatctttatgatatttgttccatccaagagcatggaatgtctgtattttaaattatcatctatattgtttattaggtcttacatattcatgattagttcctaggttctttataggattaggtttttgttgtttgtttttccttctgtgaaatgtctttatatatggtctagttagtattgctggtataaaagttagtattgctggtataaaagttaacagtgcctgagttgaaacactggccccgtgacttactagatgaatggctttgatcacgtaacttaatccacaggtaagatggggacaataaaagtaccaacttttagggttgttagaagaattttaaaatagttaacatttgtgcagttactagagtagtacatggcaaatagtgttatatgagtaattaaattaatgaatattcataggttaatttcagatcaggaacattgttgaactctaatagtttgtatggttttttaaattggatgatatcatctgtaagctaatagttttatctcttccaattcttaacgtatctttttccaaaaagagaaaaatgttgattagaactttcagtactgtgtcagacagtatcagtctcagtcaacatggttatctttagctaatttcactttttgctgttgttgttgttgtagagaagagtctcattctgtcacccagactggagtacagtggtgtgatcatagctcaccacacagcctccaactcctgggctcaagcagtccgcctgcctcagcctcccaagtagctagaactaaaggcacacaccaccacgcctggctaaatttttaaaatttttttgtagagacagggtcttgccatattgcccaggctggtcttgaactcctgatctcaagtgatcctccacccttggcctcccaaaatgctaggattacaagcatgagccactgtgtcctgcccctgacttcacttttaaaggaaatgtatctcatcttattcaggataatgtttgcttaaagattttggtagataacctttaccaagttgagaaagttacattctctttctagtttggtaaaaatgttttgtcttttaaataataaatacatggtggtcaggaactaacaaaagttatccacattcaataaaattctctctttttttcctttagttctggtaatttatacttttttttaatttgagctattcttactttcctgggataggccatatttgataataacattctttttaatgtactgttggattctgttaagtgatatttaggattttgcaagtgaagtgagcctatacttttcttgtttggttcatctctaagtttgggatttatttttattatctttataaaagtagctggtcagttttcatgcttttttcttttttgtggaacagcttatatagaattggtgataggatcacaacttctgaggtcccagcaagagtcctaacatctagcagctctaccaccaggacaggccccctaaaactaattccaacaagcacctctgaagcttctcatcacaggttaaggctacctttccagataatccaacagctaaatcaccagtttccaagggcatttgcatcacctatggaaagcatcggatccttatacaccagatgttcttgacagctcatcccgtcattcccccctgcacaaaagttgctataccagcggacaagcaagacaactactgagcttcttttgattgtcaagtagatataatatcactgccagcaaaacagcacaaaaagtgtctcttcacagtatcactaccagttgggactatgctaagtaaatcagcttgcctagatgaggaccccttctattcttgggtagccaggatttgaaggagatactctgacctgtgccagtggtaagtgactaatacttttacacactgaactggtcctggaaactgagatgtcttctttgtaagtgaagaatatacaacataatcttgaagaacggcacagtggtatgggccacaagcatactttatgtgtgtaacggactgaaagacaaattaatcttggtgaaaggatttttcatctcttatttctatttgccagtgttagtcagtgttctgctggcttagattattacctttttctggttccttactgtgttttattctgatgggtcctagaaatccctctcctgaccacttgtcagaatcagaaagtgaggaagaagaaaatattagttacctaaatgagagttctggggaagagtgggattcctctgaagaagaggactctatggtgcccaacttatcgcctcttgagagtcttgcctggcaggttaagtgccttttaaaatattccacaacttggaaacctttaaatcctaattcctggttgtatcatgctaaactgttggatccaagcacaccagtccatatacttcgagagataggtctaagactctcccattgttcccattgtgtccccaaactggaaccaattcctgaatggccccctctggcctcttgtggagtcccaccttttcaaaagcctcttacaagtcccagccggctctctagagatcatgccactctaaatggagcactgcaatttgccaccaaacagctaagccgaacattgagtagagccactcccatacctgaatacctaaaacagatccctaattcatgtgtttctgggtgttgctgtggctggctgactaaaacagttaaggaaacaactcgtactgaacccatcaacactacttattcttacactgacttccaaaaggcagttaacaaactcctaactgcatcactgtaaagatctaccatttgctctgatatctctgatgttgctaattgagaaagtggtacaaagttagtcattacacagcccactaatgccttctcagtcaaactctcttatgccctggcaagccaatgaggataccctttgacaaaccctgtggataaaatgataatatcaaggtcaggcatggtggctcacacctgtaatcccagcactttgggaggctgaggcgggtggatctgctgaagtcagaagtttgagaccagccttgccaacacagtgaaaccctgtctctactaaaaataaaaaaattagccgggcgcagcagtgcacgcctgtaatccctgctactcgggaggctgaaacaggagaatcacttgaacccaggagacggaggttgcggtgagttgagattatgccactgtactccagcctgggtgacagagcgagactcagtctcaaaaaaaaaaaaggagaattagttaaggggaccatattacaaaagatagttgaatattcttcacactcacttctcaccctccccaccccaatttactctgcctttctgaatggctttaatgagatacctgattattaatgaagaaaagtagaccaccaccccttttgttatccagactttagaacagccattgttgaaagcaagaagttagctacccacaataatacctttctgagcatactcttctctaacatacatttctgtggaagtagttgaattaaattgagtaatgcactccagcctgggcaacagtgagacaccgtctcaaaaaaaaaaaaggttaggaatcacaaattgtgtaaatatatagcaactttaagaagagagaagaatgcttataacctagtgaatatttctgctgagccttagttgtcttgtctaaaggaaaaaagagggaattgtagaataaaagtatttgttagtggaaattattgacctgaaaccatatcatattgttagtgtaactgaatgtatcagaaattgttcctatgtaggtattctgtgaaactggtttctaaaatgttacaggaaactgtttcctttttttttgtttgtttgtttaagtggaggtgggaggaggtagggaagaggtctgaatattaaaatatgtttatgttcatgtgttcataatacgttcctttttctctctgtgtgtgtataaaagtgccttgctcatgaatgcatttttgctattcacttcgaaaggaagcctttccccagcttggcagctgaataaaccaatagctttgtacatgc

SEQ ID NO: 432276 - DNA, 2997 bp, Homo sapiens
aagggggaggggccttgactcagcggaagtagcgtcggcgcgggagctgagcggagtggccttgccaccggaggggaagggctgctggcgttaggcctggctgggtcgtgcggctgagcgtgaggctagaaagaaaaagcgatcctccaagagtgagaacgggagatctgccgaggataacaacctcccttgtggccgaagggcgggggatccccacacgagggctccgcttcgagagacggcgacaaaggaaagttcgtagcgcgttccggaggcccggccacctctgagaagggagacgacgctgctgggtccgctgagcggggcgacccgagcttatatagaattggtgataggatcacaacttctgaggtcccagcaagagtcctaacatctagcagctctaccaccaggacaggccccctaaaactaattccaacaagcacctctgaagcttctcatcacaggttaaggctacctttccagataatccaacagctaaatcaccagtttccaagggcatttgcatcacctatggaaagcatcggatccttatacaccagatgttcttgacagctcatcccgtcattcccccctgcacaaaagttgctataccagcggacaagcaagacaactactgagcttcttttgattgtcaagtagatataatatcactgccagcaaaacagcacaaaaagtgtctcttcacagtatcactaccagttgggactatgctaagtaaatcagcttgcctagatgaggaccccttctattcttgggtagccaggatttgaaggagatactctgacctgtgccagtggtaagtgactaatacttttacacactgaactggtcctggaaactgagatgtcttctttgtaagtgaagaatatacaacataatcttgaagaacggcacagtggtatgggccacaagcatactttatgtgtgtaacggactgaaagacaaattaatcttggtgaaaggatttttcatctcttatttctatttgccagtgttagtcagtgttctgctggcttagattattacctttttctggttccttactgtgttttattctgatgggtcctagaaatccctctcctgaccacttgtcagaatcagaaagtgaggaagaagaaaatattagttacctaaatgagagttctggggaagagtgggattcctctgaagaagaggactctatggtgcccaacttatcgcctcttgagagtcttgcctggcaggttaagtgccttttaaaatattccacaacttggaaacctttaaatcctaattcctggttgtatcatgctaaactgttggatccaagcacaccagtccatatacttcgagagataggtctaagactctcccattgttcccattgtgtccccaaactggaaccaattcctgaatggccccctctggcctcttgtggagtcccaccttttcaaaagcctcttacaagtcccagccggctctctagagatcatgccactctaaatggagcactgcaatttgccaccaaacagctaagccgaacattgagtagagccactcccatacctgaatacctaaaacagatccctaattcatgtgtttctgggtgttgctgtggctggctgactaaaacagttaaggaaacaactcgtactgaacccatcaacactacttattcttacactgacttccaaaaggcagttaacaaactcctaactgcatcactgtaaagatctaccatttgctctgatatctctgatgttgctaattgagaaagtggtacaaagttagtcattacacagcccactaatgccttctcagtcaaactctcttatgccctggcaagccaatgaggataccctttgacaaaccctgtggataaaatgataatatcaaggtcaggcatggtggctcacacctgtaatcccagcactttgggaggctgaggcgggtggatctgctgaagtcagaagtttgagaccagccttgccaacacagtgaaaccctgtctctactaaaaataaaaaaattagccgggcgcagcagtgcacgcctgtaatccctgctactcgggaggctgaaacaggagaatcacttgaacccaggagacggaggttgcggtgagttgagattatgccactgtactccagcctgggtgacagagcgagactcagtctcaaaaaaaaaaaaggagaattagttaaggggaccatattacaaaagatagttgaatattcttcacactcacttctcaccctccccaccccaatttactctgcctttctgaatggctttaatgagatacctgattattaatgaagaaaagtagaccaccaccccttttgttatccagactttagaacagccattgttgaaagcaagaagttagctacccacaataatacctttctgagcatactcttctctaacatacatttctgtggaagtagttgaattaaattgagtaatgcactccagcctgggcaacagtgagacaccgtctcaaaaaaaaaaaaggttaggaatcacaaattgtgtaaatatatagcaactttaagaagagagaagaatgcttataacctagtgaatatttctgctgagccttagttgtcttgtctaaaggaaaaaagagggaattgtagaataaaagtatttgttagtggaaattattgacctgaaaccatatcatattgttagtgtaactgaatgtatcagaaattgttcctatgtaggtattctgtgaaactggtttctaaaatgttacaggaaactgtttcctttttttttgtttgtttgtttaagtggaggtgggaggaggtagggaagaggtctgaatattaaaatatgtttatgttcatgtgttcataatacgttcctttttctctctgtgtgtgtataaaagtgccttgctcatgaatgcatttttgctattcacttcgaaaggaagcctttccccagcttggcagctgaataaaccaatagctttgtacatgc

SEQ ID NO: 432277 - DNA, 2878 bp, Homo sapiens
aagggggaggggccttgactcagcggaagtagcgtcggcgcgggagctgagcggagtggccttgccaccggaggggaagggctgctggcgttaggcctggctgggtcgtgcggctgagcgtgaggctagaaagaaaaagcgatcctccaagagtgagaacgggagatctgccgaggataacaacctcccttgtggccgaagggcgggggatccccacacgagggctccgcttcgagagacggcgacaaaggaaagttcgtagcgcgttccggaggcccggccacctctgagaagggagacgacgctgctgggtccgctgagcggggcgacccgagcttctcatcacaggttaaggctacctttccagataatccaacagctaaatcaccagtttccaagggcatttgcatcacctatggaaagcatcggatccttatacaccagatgttcttgacagctcatcccgtcattcccccctgcacaaaagttgctataccagcggacaagcaagacaactactgagcttcttttgattgtcaagtagatataatatcactgccagcaaaacagcacaaaaagtgtctcttcacagtatcactaccagttgggactatgctaagtaaatcagcttgcctagatgaggaccccttctattcttgggtagccaggatttgaaggagatactctgacctgtgccagtggtaagtgactaatacttttacacactgaactggtcctggaaactgagatgtcttctttgtaagtgaagaatatacaacataatcttgaagaacggcacagtggtatgggccacaagcatactttatgtgtgtaacggactgaaagacaaattaatcttggtgaaaggatttttcatctcttatttctatttgccagtgttagtcagtgttctgctggcttagattattacctttttctggttccttactgtgttttattctgatgggtcctagaaatccctctcctgaccacttgtcagaatcagaaagtgaggaagaagaaaatattagttacctaaatgagagttctggggaagagtgggattcctctgaagaagaggactctatggtgcccaacttatcgcctcttgagagtcttgcctggcaggttaagtgccttttaaaatattccacaacttggaaacctttaaatcctaattcctggttgtatcatgctaaactgttggatccaagcacaccagtccatatacttcgagagataggtctaagactctcccattgttcccattgtgtccccaaactggaaccaattcctgaatggccccctctggcctcttgtggagtcccaccttttcaaaagcctcttacaagtcccagccggctctctagagatcatgccactctaaatggagcactgcaatttgccaccaaacagctaagccgaacattgagtagagccactcccatacctgaatacctaaaacagatccctaattcatgtgtttctgggtgttgctgtggctggctgactaaaacagttaaggaaacaactcgtactgaacccatcaacactacttattcttacactgacttccaaaaggcagttaacaaactcctaactgcatcactgtaaagatctaccatttgctctgatatctctgatgttgctaattgagaaagtggtacaaagttagtcattacacagcccactaatgccttctcagtcaaactctcttatgccctggcaagccaatgaggataccctttgacaaaccctgtggataaaatgataatatcaaggtcaggcatggtggctcacacctgtaatcccagcactttgggaggctgaggcgggtggatctgctgaagtcagaagtttgagaccagccttgccaacacagtgaaaccctgtctctactaaaaataaaaaaattagccgggcgcagcagtgcacgcctgtaatccctgctactcgggaggctgaaacaggagaatcacttgaacccaggagacggaggttgcggtgagttgagattatgccactgtactccagcctgggtgacagagcgagactcagtctcaaaaaaaaaaaaggagaattagttaaggggaccatattacaaaagatagttgaatattcttcacactcacttctcaccctccccaccccaatttactctgcctttctgaatggctttaatgagatacctgattattaatgaagaaaagtagaccaccaccccttttgttatccagactttagaacagccattgttgaaagcaagaagttagctacccacaataatacctttctgagcatactcttctctaacatacatttctgtggaagtagttgaattaaattgagtaatgcactccagcctgggcaacagtgagacaccgtctcaaaaaaaaaaaaggttaggaatcacaaattgtgtaaatatatagcaactttaagaagagagaagaatgcttataacctagtgaatatttctgctgagccttagttgtcttgtctaaaggaaaaaagagggaattgtagaataaaagtatttgttagtggaaattattgacctgaaaccatatcatattgttagtgtaactgaatgtatcagaaattgttcctatgtaggtattctgtgaaactggtttctaaaatgttacaggaaactgtttcctttttttttgtttgtttgtttaagtggaggtgggaggaggtagggaagaggtctgaatattaaaatatgtttatgttcatgtgttcataatacgttcctttttctctctgtgtgtgtataaaagtgccttgctcatgaatgcatttttgctattcacttcgaaaggaagcctttccccagcttggcagctgaataaaccaatagctttgtacatgc

SEQ ID NO: 432278 - DNA, 4887 bp, Homo sapiens
atgtggaattttattctttctatataaactttaaggtttgtttatagagttccttaaaaatttgattggaattgtataaattaatagggagaaagttgatatctttatgatatttgttccatccaagagcatggaatgtctgtattttaaattatcatctatattgtttattaggtcttacatattcatgattagttcctaggttctttataggattaggtttttgttgtttgtttttccttctgtgaaatgtctttatatatggtctagttagtattgctggtataaaagttagtattgctggtataaaagttaacagtgcctgagttgaaacactggccccgtgacttactagatgaatggctttgatcacgtaacttaatccacaggtaagatggggacaataaaagtaccaacttttagggttgttagaagaattttaaaatagttaacatttgtgcagttactagagtagtacatggcaaatagtgttatatgagtaattaaattaatgaatattcataggttaatttcagatcaggaacattgttgaactctaatagtttgtatggttttttaaattggatgatatcatctgtaagctaatagttttatctcttccaattcttaacgtatctttttccaaaaagagaaaaatgttgattagaactttcagtactgtgtcagacagtatcagtctcagtcaacatggttatctttagctaatttcactttttgctgttgttgttgttgtagagaagagtctcattctgtcacccagactggagtacagtggtgtgatcatagctcaccacacagcctccaactcctgggctcaagcagtccgcctgcctcagcctcccaagtagctagaactaaaggcacacaccaccacgcctggctaaatttttaaaatttttttgtagagacagggtcttgccatattgcccaggctggtcttgaactcctgatctcaagtgatcctccacccttggcctcccaaaatgctaggattacaagcatgagccactgtgtcctgcccctgacttcacttttaaaggaaatgtatctcatcttattcaggataatgtttgcttaaagattttggtagataacctttaccaagttgagaaagttacattctctttctagtttggtaaaaatgttttgtcttttaaataataaatacatggtggtcaggaactaacaaaagttatccacattcaataaaattctctctttttttcctttagttctggtaatttatacttttttttaatttgagctattcttactttcctgggataggccatatttgataataacattctttttaatgtactgttggattctgttaagtgatatttaggattttgcaagtgaagtgagcctatacttttcttgtttggttcatctctaagtttgggatttatttttattatctttataaaagtagctggtcagttttcatgcttttttcttttttgtggaacagcttatatagaattggtgataggatcacaacttctgaggtcccagcaagagtcctaacatctagcagctctaccaccaggacaggccccctaaaactaattccaacaagcacctctgaaggtaaaaaaaaaaaaaaaaaaaacttttatagctctctatttggagtttggggcataagggatcagcttttgcaaaagtaattttctaggctaaaactgcatacaaactggcccagttatgtaccaacaaagaattaaaatggccccagactttgctccccaatattgtgattgtaagagctattaccaacaggtaaattggcctaagtctgtgagatagagagggaagagtctgtaagacttcttgctcagcatttgttctgattttagatatcttgaagttaggtaggcaataatgttatccagtgctttcaggctttaatatcatgtctctagtcttctcattcttctcatcacaggttaaggctacctttccagataatccaacagctaaatcaccagtttccaagggcatttgcatcacctatggaaagcatcggatccttatacaccagatgttcttgacagctcatcccgtcattcccccctgcacaaaagttgctataccagcggacaagcaagacaactactgagcttcttttgattgtcaagtagatataatatcactgccagcaaaacagcacaaaaagtgtctcttcacagtatcactaccagttgggactatgctaagtaaatcagcttgcctagatgaggaccccttctattcttgggtagccaggatttgaaggagatactctgacctgtgccagtggtaagtgactaatacttttacacactgaactggtcctggaaactgagatgtcttctttgtaagtgaagaatatacaacataatcttgaagaacggcacagtggtatgggccacaagcatactttatgtgtgtaacggactgaaagacaaattaatcttggtgaaaggatttttcatctcttatttctatttgccagtgttagtcagtgttctgctggcttagattattacctttttctggttccttactgtgttttattctgatgggtcctagaaatccctctcctgaccacttgtcagaatcagaaagtgaggaagaagaaaatattagttacctaaatgagagttctggggaagagtgggattcctctgaagaagaggactctatggtgcccaacttatcgcctcttgagagtcttgcctggcaggttaagtgccttttaaaatattccacaacttggaaacctttaaatcctaattcctggttgtatcatgctaaactgttggatccaagcacaccagtccatatacttcgagagataggtctaagactctcccattgttcccattgtgtccccaaactggaaccaattcctgaatggccccctctggcctcttgtggagtcccaccttttcaaaagcctcttacaagtcccagccggctctctagagatcatgccactctaaatggagcactgcaatttgccaccaaacagctaagccgaacattgagtagagccactcccatacctgaatacctaaaacagatccctaattcatgtgtttctgggtgttgctgtggctggctgactaaaacagttaaggaaacaactcgtactgaacccatcaacactacttattcttacactgacttccaaaaggcagttaacaaactcctaactgcatcactgtaaagatctaccatttgctctgatatctctgatgttgctaattgagaaagtggtacaaagttagtcattacacagcccactaatgccttctcagtcaaactctcttatgccctggcaagccaatgaggataccctttgacaaaccctgtggataaaatgataatatcaaggtcaggcatggtggctcacacctgtaatcccagcactttgggaggctgaggcgggtggatctgctgaagtcagaagtttgagaccagccttgccaacacagtgaaaccctgtctctactaaaaataaaaaaattagccgggcgcagcagtgcacgcctgtaatccctgctactcgggaggctgaaacaggagaatcacttgaacccaggagacggaggttgcggtgagttgagattatgccactgtactccagcctgggtgacagagcgagactcagtctcaaaaaaaaaaaaggagaattagttaaggggaccatattacaaaagatagttgaatattcttcacactcacttctcaccctccccaccccaatttactctgcctttctgaatggctttaatgagatacctgattattaatgaagaaaagtagaccaccaccccttttgttatccagactttagaacagccattgttgaaagcaagaagttagctacccacaataatacctttctgagcatactcttctctaacatacatttctgtggaagtagttgaattaaattgagtaatgcactccagcctgggcaacagtgagacaccgtctcaaaaaaaaaaaaggttaggaatcacaaattgtgtaaatatatagcaactttaagaagagagaagaatgcttataacctagtgaatatttctgctgagccttagttgtcttgtctaaaggaaaaaagagggaattgtagaataaaagtatttgttagtggaaattattgacctgaaaccatatcatattgttagtgtaactgaatgtatcagaaattgttcctatgtaggtattctgtgaaactggtttctaaaatgttacaggaaactgtttcctttttttttgtttgtttgtttaagtggaggtgggaggaggtagggaagaggtctgaatattaaaatatgtttatgttcatgtgttcataatacgttcctttttctctctgtgtgtgtataaaagtgccttgctcatgaatgcatttttgctattcacttcgaaaggaagcctttccccagcttggcagctgaataaaccaatagctttgtacatgcaaaaaaaaaaaaaaaaaaaaaaaaaaagaggggcgcgctaaaatttctcccccggggggcccagtttagctgtccccaggttttcttggtcacaaggtggcgcccctaatagggagtcgtataataagctaaggcactggggccgccgtttaacaccgtcgtgactggggaaacttcgctacctggggactcttggtggaggggacccttacttctggcgggtggtggacctctatctcgcgccaaattacctagagagatttaaaggctcctagcgtaacttactaacctcttcaagcgtgtctactgtgtcaacctaacctggaatatggctggcgggctgagagtttcggtaacgattatgctcttggacattttttcgtgc

SEQ ID NO: 432279 - DNA, 4614 bp, Homo sapiens
atgtggaattttattctttctatataaactttaaggtttgtttatagagttccttaaaaatttgattggaattgtataaattaatagggagaaagttgatatctttatgatatttgttccatccaagagcatggaatgtctgtattttaaattatcatctatattgtttattaggtcttacatattcatgattagttcctaggttctttataggattaggtttttgttgtttgtttttccttctgtgaaatgtctttatatatggtctagttagtattgctggtataaaagttagtattgctggtataaaagttaacagtgcctgagttgaaacactggccccgtgacttactagatgaatggctttgatcacgtaacttaatccacaggtaagatggggacaataaaagtaccaacttttagggttgttagaagaattttaaaatagttaacatttgtgcagttactagagtagtacatggcaaatagtgttatatgagtaattaaattaatgaatattcataggttaatttcagatcaggaacattgttgaactctaatagtttgtatggttttttaaattggatgatatcatctgtaagctaatagttttatctcttccaattcttaacgtatctttttccaaaaagagaaaaatgttgattagaactttcagtactgtgtcagacagtatcagtctcagtcaacatggttatctttagctaatttcactttttgctgttgttgttgttgtagagaagagtctcattctgtcacccagactggagtacagtggtgtgatcatagctcaccacacagcctccaactcctgggctcaagcagtccgcctgcctcagcctcccaagtagctagaactaaaggcacacaccaccacgcctggctaaatttttaaaatttttttgtagagacagggtcttgccatattgcccaggctggtcttgaactcctgatctcaagtgatcctccacccttggcctcccaaaatgctaggattacaagcatgagccactgtgtcctgcccctgacttcacttttaaaggaaatgtatctcatcttattcaggataatgtttgcttaaagattttggtagataacctttaccaagttgagaaagttacattctctttctagtttggtaaaaatgttttgtcttttaaataataaatacatggtggtcaggaactaacaaaagttatccacattcaataaaattctctctttttttcctttagttctggtaatttatacttttttttaatttgagctattcttactttcctgggataggccatatttgataataacattctttttaatgtactgttggattctgttaagtgatatttaggattttgcaagtgaagtgagcctatacttttcttgtttggttcatctctaagtttgggatttatttttattatctttataaaagtagctggtcagttttcatgcttttttcttttttgtggaacagcttatatagaattggtgataggatcacaacttctgaggtcccagcaagagtcctaacatctagcagctctaccaccaggacaggccccctaaaactaattccaacaagcacctctgaaggtaaaaaaaaaaaaaaaaaaaacttttatagctctctatttggagtttggggcataagggatcagcttttgcaaaagtaattttctaggctaaaactgcatacaaactggcccagttatgtaccaacaaagaattaaaatggccccagactttgctccccaatattgtgattgtaagagctattaccaacaggtaaattggcctaagtctgtgagatagagagggaagagtctgtaagacttcttgctcagcatttgttctgattttagatatcttgaagttaggtaggcaataatgttatccagtgctttcaggctttaatatcatgtctctagtcttctcattcttctcatcacaggttaaggctacctttccagataatccaacagctaaatcaccagtttccaagggcatttgcatcacctatggaaagcatcggatccttatacaccagatgttcttgacagctcatcccgtcattcccccctgcacaaaagttgctataccagcggacaagcaagacaactactgagcttcttttgattgtcaagtagatataatatcactgccagcaaaacagcacaaaaagtgtctcttcacagtatcactaccagttgggactatgctaagtaaatcagcttgcctagatgaggaccccttctattcttgggtagccaggatttgaaggagatactctgacctgtgccagtggtaagtgactaatacttttacacactgaactggtcctggaaactgagatgtcttctttgtaagtgaagaatatacaacataatcttgaagaacggcacagtggtatgggccacaagcatactttatgtgtgtaacggactgaaagacaaattaatcttggtgaaaggatttttcatctcttatttctatttgccagtgttagtcagtgttctgctggcttagattattacctttttctggttccttactgtgttttattctgatgggtcctagaaatccctctcctgaccacttgtcagaatcagaaagtgaggaagaagaaaatattagttacctaaatgagagttctggggaagagtgggattcctctgaagaagaggactctatggtgcccaacttatcgcctcttgagagtcttgcctggcaggttaagtgccttttaaaatattccacaacttggaaacctttaaatcctaattcctggttgtatcatgctaaactgttggatccaagcacaccagtccatatacttcgagagataggtctaagactctcccattgttcccattgtgtccccaaactggaaccaattcctgaatggccccctctggcctcttgtggagtcccaccttttcaaaagcctcttacaagtcccagccggctctctagagatcatgccactctaaatggagcactgcaatttgccaccaaacagctaagccgaacattgagtagagccactcccatacctgaatacctaaaacagatccctaattcatgtgtttctgggtgttgctgtggctggctgactaaaacagttaaggaaacaactcgtactgaacccatcaacactacttattcttacactgacttccaaaaggcagttaacaaactcctaactgcatcactgtaaagatctaccatttgctctgatatctctgatgttgctaattgagaaagtggtacaaagttagtcattacacagcccactaatgccttctcagtcaaactctcttatgccctggcaagccaatgaggataccctttgacaaaccctgtggataaaatgataatatcaaggtcaggcatggtggctcacacctgtaatcccagcactttgggaggctgaggcgggtggatctgctgaagtcagaagtttgagaccagccttgccaacacagtgaaaccctgtctctactaaaaataaaaaaattagccgggcgcagcagtgcacgcctgtaatccctgctactcgggaggctgaaacaggagaatcacttgaacccaggagacggaggttgcggtgagttgagattatgccactgtactccagcctgggtgacagagcgagactcagtctcaaaaaaaaaaaaggagaattagttaaggggaccatattacaaaagatagttgaatattcttcacactcacttctcaccctccccaccccaatttactctgcctttctgaatggctttaatgagatacctgattattaatgaagaaaagtagaccaccaccccttttgttatccagactttagaacagccattgttgaaagcaagaagttagctacccacaataatacctttctgagcatactcttctctaacatacatttctgtggaagtagttgaattaaattgagtaactacacaaaggaaaatggcagggctatgaatttctttcccagcttttatatagatgtgcctacatatgacactctttagggttccttttattttttcttttttttttttttttgaggtagttgaattaaactgggtaactacacaaaggaaaatggcagggatatgaatttctttcccagcttttatatagatgtgcctgcatatgacactctttagagttcctttcactttttcttttttttggaagggggcggggaggcaggaggagtgcagttttaagcctagcctatactactacaaacttattatggtacttaaaattacagcatgaacgttctatatcggagtctcccaccaggctgtctctgactaaatcagcctataagatcatcccttgggattaaacaaacacctgttctgtagggaatgtgtttcctgaatcttggtactcagacttttgtcaagagtaaataacatttcaaaagatgaatggaaaaatgattaagagagcatttctgctttcagcattaactgctaatggattaaaattttaatctgtatagcatttcctggagtaaaagctcaagtactttccacatccattgcaaacttttcaggaacccttctaatttttttt

SEQ ID NO: 432280 - DNA, 4452 bp, Homo sapiens
atgtggaattttattctttctatataaactttaaggtttgtttatagagttccttaaaaatttgattggaattgtataaattaatagggagaaagttgatatctttatgatatttgttccatccaagagcatggaatgtctgtattttaaattatcatctatattgtttattaggtcttacatattcatgattagttcctaggttctttataggattaggtttttgttgtttgtttttccttctgtgaaatgtctttatatatggtctagttagtattgctggtataaaagttagtattgctggtataaaagttaacagtgcctgagttgaaacactggccccgtgacttactagatgaatggctttgatcacgtaacttaatccacaggtaagatggggacaataaaagtaccaacttttagggttgttagaagaattttaaaatagttaacatttgtgcagttactagagtagtacatggcaaatagtgttatatgagtaattaaattaatgaatattcataggttaatttcagatcaggaacattgttgaactctaatagtttgtatggttttttaaattggatgatatcatctgtaagctaatagttttatctcttccaattcttaacgtatctttttccaaaaagagaaaaatgttgattagaactttcagtactgtgtcagacagtatcagtctcagtcaacatggttatctttagctaatttcactttttgctgttgttgttgttgtagagaagagtctcattctgtcacccagactggagtacagtggtgtgatcatagctcaccacacagcctccaactcctgggctcaagcagtccgcctgcctcagcctcccaagtagctagaactaaaggcacacaccaccacgcctggctaaatttttaaaatttttttgtagagacagggtcttgccatattgcccaggctggtcttgaactcctgatctcaagtgatcctccacccttggcctcccaaaatgctaggattacaagcatgagccactgtgtcctgcccctgacttcacttttaaaggaaatgtatctcatcttattcaggataatgtttgcttaaagattttggtagataacctttaccaagttgagaaagttacattctctttctagtttggtaaaaatgttttgtcttttaaataataaatacatggtggtcaggaactaacaaaagttatccacattcaataaaattctctctttttttcctttagttctggtaatttatacttttttttaatttgagctattcttactttcctgggataggccatatttgataataacattctttttaatgtactgttggattctgttaagtgatatttaggattttgcaagtgaagtgagcctatacttttcttgtttggttcatctctaagtttgggatttatttttattatctttataaaagtagctggtcagttttcatgcttttttcttttttgtggaacagcttatatagaattggtgataggatcacaacttctgaggtcccagcaagagtcctaacatctagcagctctaccaccaggacaggccccctaaaactaattccaacaagcacctctgaaggtaaaaaaaaaaaaaaaaaaaacttttatagctctctatttggagtttggggcataagggatcagcttttgcaaaagtaattttctaggctaaaactgcatacaaactggcccagttatgtaccaacaaagaattaaaatggccccagactttgctccccaatattgtgattgtaagagctattaccaacaggtaaattggcctaagtctgtgagatagagagggaagagtctgtaagacttcttgctcagcatttgttctgattttagatatcttgaagttaggtaggcaataatgttatccagtgctttcaggctttaatatcatgtctctagtcttctcattcttctcatcacaggttaaggctacctttccagataatccaacagctaaatcaccagtttccaagggcatttgcatcacctatggaaagcatcggatccttatacaccagatgttcttgacagctcatcccgtcattcccccctgcacaaaagttgctataccagcggacaagcaagacaactactgagcttcttttgattgtcaagtagatataatatcactgccagcaaaacagcacaaaaagtgtctcttcacagtatcactaccagttgggactatgctaagtaaatcagcttgcctagatgaggaccccttctattcttgggtagccaggatttgaaggagatactctgacctgtgccagtggtaagtgactaatacttttacacactgaactggtcctggaaactgagatgtcttctttgtaagtgaagaatatacaacataatcttgaagaacggcacagtggtatgggccacaagcatactttatgtgtgtaacggactgaaagacaaattaatcttggtgaaaggatttttcatctcttatttctatttgccagtgttagtcagtgttctgctggcttagattattacctttttctggttccttactgtgttttattctgatgggtcctagaaatccctctcctgaccacttgtcagaatcagaaagtgaggaagaagaaaatattagttacctaaatgagagttctggggaagagtgggattcctctgaagaagaggactctatggtgcccaacttatcgcctcttgagagtcttgcctggcaggttaagtgccttttaaaatattccacaacttggaaacctttaaatcctaattcctggttgtatcatgctaaactgttggatccaagcacaccagtccatatacttcgagagataggtctaagactctcccattgttcccattgtgtccccaaactggaaccaattcctgaatggccccctctggcctcttgtggagtcccaccttttcaaaagcctcttacaagtcccagccggctctctagagatcatgccactctaaatggagcactgcaatttgccaccaaacagctaagccgaacattgagtagagccactcccatacctgaatacctaaaacagatccctaattcatgtgtttctgggtgttgctgtggctggctgactaaaacagttaaggaaacaactcgtactgaacccatcaacactacttattcttacactgacttccaaaaggcagttaacaaactcctaactgcatcactgtaaagatctaccatttgctctgatatctctgatgttgctaattgagaaagtggtacaaagttagtcattacacagcccactaatgccttctcagtcaaactctcttatgccctggcaagccaatgaggataccctttgacaaaccctgtggataaaatgataatatcaaggtcaggcatggtggctcacacctgtaatcccagcactttgggaggctgaggcgggtggatctgctgaagtcagaagtttgagaccagccttgccaacacagtgaaaccctgtctctactaaaaataaaaaaattagccgggcgcagcagtgcacgcctgtaatccctgctactcgggaggctgaaacaggagaatcacttgaacccaggagacggaggttgcggtgagttgagattatgccactgtactccagcctgggtgacagagcgagactcagtctcaaaaaaaaaaaaggagaattagttaaggggaccatattacaaaagatagttgaatattcttcacactcacttctcaccctccccaccccaatttactctgcctttctgaatggctttaatgagatacctgattattaatgaagaaaagtagaccaccaccccttttgttatccagactttagaacagccattgttgaaagcaagaagttagctacccacaataatacctttctgagcatactcttctctaacatacatttctgtggaagtagttgaattaaattgagtaatgcactccagcctgggcaacagtgagacaccgtctcaaaaaaaaaaaaggttaggaatcacaaattgtgtaaatatatagcaactttaagaagagagaagaatgcttataacctagtgaatatttctgctgagccttagttgtcttgtctaaaggaaaaaagagggaattgtagaataaaagtatttgttagtggaaattattgacctgaaaccatatcatattgttagtgtaactgaatgtatcagaaattgttcctatgtaggtagaaagtgggctagtgatgttttggttttatggcggaatcctgtgaatacggttgctgatcatagggggattgctatacccaggtttattgatagttgtgtggtgggtgtgaatgagtgtggtagtaggcctaggatgctttgttgagcctatgaatataacttacggcagatatatagtattagtgatcagggctcttcctattttccg

SEQ ID NO: 432281 - DNA, 1357 bp, Homo sapiens
attctcctgccctgcctcccgaatagctgggactacaggcgtccaccaccactcctggctatttttttgtatttttggtggagacagggtttcaccgtgttggccaggatggtcttgatctcctgacctcgtgatccacctgcctcggcctcccaaagtgctgggattgaacccttctaattttaaagaaccttgttattagaaaatctcagcctaatacaatctgaagttaagagttttagcagcattgtttttctaagtagatttagctatagattttcttctggccaaacaaggaagagtatatgcccttgtaaatgagtcttgttttgtttatttaaatagtcagtcaaaacgtagaaatcagtatacgtaaaataaaatgcatgagactattaaatcttttcatatactctacaaataaaatgaaatctgtgtgtggtcctggttgactgggcatctaaagggaatcagaaaagagattgtgaaaagttatatatatatcctcttccttattttagttttgctttttcctattttccataattaagtgccgtttacaaagtggcatcaaaaaattgaagcaggccaggcatggtggctcatgcctgtaatcccagcagtttgggaggctgagggcaggtggatcacttgagatcaggagttcgtgaccagcctggccaacatggtgaaagcccatctctactagaaatataaaaattagccgggcgtggtggcatgtgcctgtagtcgcagctacttgggaggctaagacaggagaattgcttgaacctgggaggtggaggttgcagtgagctgagatcgcgccactgcactccagcctgggcaacagtgagacaccgtctcaaaaaaaaaaaaggttaggaatcacaaattgtgtaaatatatagcaactttaagaagagagaagaatgcttataacctagtgaatatttctgctgagccttagttgtcttgtctaaaggaaaaaagagggaattgtagaataaaagtatttgttagtggaaattattgacctgaaaccatatcatattgttagtgtaactgaatgtatcagaaattgttcctatgtaggtattctgtgaaactggtttctaaaatgttacaggaaactgtttcctttttttttgtttgtttgtttaagtggaggtgggaggaggtagggaagaggtctgaatattaaaatatgtttatgttcatgtgttcataatacgttcctttttctctctgtgtgtgtataaaagtgccttgctcatgaatgcatttttgctattcacttcgaaaggaagcctttccccagcttggcagctgaataaaccaatagctttgtacatgc

SEQ ID NO: 432282 - DNA, 2860 bp, Homo sapiens
atgtggaattttattctttctatataaactttaaggtttgtttatagagttccttaaaaatttgattggaattgtataaattaatagggagaaagttgatatctttatgatatttgttccatccaagagcatggaatgtctgtattttaaattatcatctatattgtttattaggtcttacatattcatgattagttcctaggttctttataggattaggtttttgttgtttgtttttccttctgtgaaatgtctttatatatggtctagttagtattgctggtataaaagttagtattgctggtataaaagttaacagtgcctgagttgaaacactggccccgtgacttactagatgaatggctttgatcacgtaacttaatccacaggtaagatggggacaataaaagtaccaacttttagggttgttagaagaattttaaaatagttaacatttgtgcagttactagagtagtacatggcaaatagtgttatatgagtaattaaattaatgaatattcataggttaatttcagatcaggaacattgttgaactctaatagtttgtatggttttttaaattggatgatatcatctgtaagctaatagttttatctcttccaattcttaacgtatctttttccaaaaagagaaaaatgttgattagaactttcagtactgtgtcagacagtatcagtctcagtcaacatggttatctttagctaatttcactttttgctgttgttgttgttgtagagaagagtctcattctgtcacccagactggagtacagtggtgtgatcatagctcaccacacagcctccaactcctgggctcaagcagtccgcctgcctcagcctcccaagtagctagaactaaaggcacacaccaccacgcctggctaaatttttaaaatttttttgtagagacagggtcttgccatattgcccaggctggtcttgaactcctgatctcaagtgatcctccacccttggcctcccaaaatgctaggattacaagcatgagccactgtgtcctgcccctgacttcacttttaaaggaaatgtatctcatcttattcaggataatgtttgcttaaagattttggtagataacctttaccaagttgagaaagttacattctctttctagtttggtaaaaatgttttgtcttttaaataataaatacatggtggtcaggaactaacaaaagttatccacattcaataaaattctctctttttttcctttagttctggtaatttatacttttttttaatttgagctattcttactttcctgggataggccatatttgataataacattctttttaatgtactgttggattctgttaagtgatatttaggattttgcaagtgaagtgagcctatacttttcttgtttggttcatctctaagtttgggatttatttttattatctttataaaagtagctggtcagttttcatgcttttttcttttttgtggaacagcttatatagaattggtgataggatcacaacttctgaggtcccagcaagagtcctaacatctagcagctctaccaccaggacaggccccctaaaactaattccaacaagcacctctgaaggtaaaaaaaaaaaaaaaaaaaacttttatagctctctatttggagtttggggcataagggatcagcttttgcaaaagtaattttctaggctaaaactgcatacaaactggcccagttatgtaccaacaaagaattaaaatggccccagactttgctccccaatattgtgattgtaagagctattaccaacaggtaaattggcctaagtctgtgagatagagagggaagagtctgtaagacttcttgctcagcatttgttctgattttagatatcttgaagttaggtaggcaataatgttatccagtgctttcaggctttaatatcatgtctctagtcttctcattcttctcatcacaggttaaggctacctttccagataatccaacagctaaatcaccagtttccaagggcatttgcatcacctatggaaagcatcggatccttatacaccagatgttcttgacagctcatcccgtcattcccccctgcacaaaagttgctataccagcggacaagcaagacaactactgagcttcttttgattgtcaagtagatataatatcactgccagcaaaacagcacaaaaagtgtctcttcacagtatcactaccagttgggactatgctaagtaaatcagcttgcctagatgaggaccccttctattcttgggtagccaggatttgaaggagatactctgacctgtgccagtggcaggcagctatctctctagcagatgactgaagccttattgtctggagaaattaaaccaaacagacttagaactgaggacagggggaggatggtaatggtagtgatgtgctatatggaagacaaaatgattaacagaatgaagccacttggaggatgtgctttaccaaaatgagggagtaatctgagaaggcatgggatcctgaaactaaaagatgtcacaaaggaaaacgaggaaagtcccaggatgactactgtgtcaagtaagtaggacagaggttccaggaagtaggtatctaggaaaactgggaacaaagtatttgagtacaatggaaagtgtataaataagcaggaaatttgaaattttatttcttagaaagtatgttatttagtaatcagttttttaaaaatttgacattaaaagtataggcaaattggagtcttgtcagctataattagattggtccttacggcataatactccacaattgcagtagatgctgacttcaataagatgtgcgccacagaagatatttt

SEQ ID NO: 432283 - DNA, 1227 bp, Homo sapiens
ggggcttatacccagccctgctcacctgaccgaaaaagacaagcagtaaaaaaacagcttgaccctcgattatttgttacagtgaaactgagagtccacaaggcctgctccttcatatacagctttcagtcacttggaatcactgtacacagatagccaaggatcactagatatttgaggaaaccttcaacatgaaagatgaacataaagaagctgtgatattctcagaaaggaatatactgcttccatcaaataggatcaggatgctattttttcagtagatgtattagaaaataacttgaagaaattttaaaaagtagaacaaagagatgaaaagcaggcaagaacaaaaaagaaacttaaacctgaataagatgcaacatctaataaatgagttccaaaatgagagaacagagaaagaaggtgaagagagaaaaaaattaaaataacatttcccggaaataataagactttagtcttctaaattaaaagggtccactaagtgccctgtgaaatgaattaaaaaataccaaagcacattgttaggatatttcagaatgctagagttatggaaggacctaaaagcttcccaataaatgtagcggagaaagttacataaaaaggatacgttttcaaaatggcatttagatttcttggtagcaacactggatgcggaaagactatgaaagcaaggtctttaaatttaaaaagaaatgatttccaacgcagaattttgtactcaaataatccaatcaagagtggggctaaaataaagataccttaagacttgcatggtctcagaattttatctcaccatctaccttttcttaggaagccacttggaggatgtgctttaccaaaatgagggagtaatctgagaaggcatgggatcctgaaactaaaagatgtcacaaaggaaaacgaggaaagtcccaggatgactactgtgtcaagtaagtaggacagaggttccaggaagtaggtatctaggaaaactgggaacaaagtatttgagtacaatggaaagtgtataaataagcaggaaatttgaaattttatttcttagaaagtatgttatttagtaatcagttttttaaaaatttgacattaaaagtataggcaaattggagtcttgtcagctataattagattggtccttacggcataatactccacaattgcagtagatgctgacttcaataagatgtgcgccacagaagatatttt

SEQ ID NO: 432284 - DNA, 1165 bp, Homo sapiens
atttgcaaacacaaattttttaaatgctgtctcaacagcaggtagtttgggtttgtggtttgttgtcgttgtgagatggagactcaccctgtcgccaggctggaacgcagtggtgcgatctcggctcactgcaatctccacctcctgtgttcaagcaatttccctgccttggcctcctgagtagctgggactacaggtgcgcaccaccatgcccagctaattttttgtattttagtagagatggtttcaccatgttggccaggatggtctcaatctcctgacctcatgatccacccacctgagcctcccaaagtgctggaattacaggcgtgagccaccgcacctggccatctgtgtgtgttttaagcagttactttctcactcttctttaccatgaagggaaagtatatcactctttaaaaacaaaaaatactcgataggtagcacagttatgatacccattcttcatcacagaaaaggttcacaaatttggaacacctatctttgccttccagaacccccaaaagacttgaggatttaaaggcacaaggtaccctggaaggtgggagtaataaagaaagttgaaacaaggggattatttgaacatttatttttgctcttcttttgtaggcaggcagctatctctctagcagatgactgaagccttattgtctggagaaattaaaccaaacagacttagaactgaggacagggggaggatggtaatggtagtgatgtgctatatggaagacaaaatgattaacagaatgaagccacttggaggatgtgctttaccaaaatgagggagtaatctgagaaggcatgggatcctgaaactaaaagatgtcacaaaggaaaacgaggaaagtcccaggatgactactgtgtcaagtaagtaggacagaggttccaggaagtaggtatctaggaaaactgggaacaaagtatttgagtacaatggaaagtgtataaataagcaggaaatttgaaattttatttcttagaaagtatgttatttagtaatcagttttttaaaaatttgacattaaaagtataggcaaattggagtcttgtcagctataattagattggtccttacggcataatactccacaattgcagtagatgctgacttcaataagatgtgcgccacagaagatatttt

SEQ ID NO: 432285 - DNA, 1231 bp, Homo sapiens
  misc_feature (31)..(31): n is a, c, g, or t
  misc_feature (40)..(40): n is a, c, g, or t
  misc_feature (58)..(58): n is a, c, g, or t
  misc_feature (67)..(67): n is a, c, g, or t
  misc_feature (74)..(74): n is a, c, g, or t
  misc_feature (76)..(76): n is a, c, g, or t
  misc_feature (103)..(103): n is a, c, g, or t
  misc_feature (112)..(112): n is a, c, g, or t
  misc_feature (145)..(145): n is a, c, g, or t
  misc_feature (163)..(163): n is a, c, g, or t
  misc_feature (181)..(181): n is a, c, g, or t
  misc_feature (295)..(295): n is a, c, g, or t
agatccggacgctggccttgatggggcctcntggtcttcntgggcaaattggcccacntggagctcnagggatncnaggccagaagggggagattggactgcnaggccctcnaggacacgatgggaaaggacctcgcggtaaacnaggagacatgggccctcntggtccccaaggcccccnaggaaaggatggacctccaggagtgaagggagaaaacgggcacccagggagcccaggagagaagggggaaaaaggggagacaggacaagcaggctcaccggttcctgggctgcnagggccagaggggcctcccggacctccggggctccaaggtgttcctggaccaaagggggaagcaggactagacggagcaaaaggagagaaaggcttccagggagaaaaaggagaccgtggtcccctgggactacccggagcttcaggtttggacggcaggcctgggccaccgggtactccaggaccaattggagttccaggcccagcgggaccaaagggcgagaggggcagcaaaggagaccctgggatgacaggaccaacgggagcagctgggcttcctggtttacatggaccacccggggacaagggaaaccggggggagagggggaagaaaggctctagagggcctaaaggggataagggagaccaaggagcgcctggattagatgccccctgcccattgggcgaagatggcttaccagtccaaggctgctggaacaagtgatgcctctaaccttggattggcctgtgtgtgtgtttgtacatagaatatttatttttatacagttttcactttttgaaaatgccagaagtatgatgcatcttacagattattaaaaaagaaagaaaaacctgcatattttgtacagaaaatatcaacctcttcccttttgtttacaagatgttttgtataagcctatgtctctaatacattttttgtttggtcgtaatgtctgcatgatatttgtgcacatttattaagtatcgaagcttaataaattattgtgtcctggtgccaaagggggccagccagaactgaggtgctggctagctcatgtgtgaattcacataaatgtagaggtccatgatatttgctaagctaggtgtgtctaagagtattttaaacccttatggattttcattattaaaggaaatgaaacatgatgcggccgaaaatttcattaaaactctattaaagacaatgccgacaaatgc

SEQ ID NO: 432286 - DNA, 894 bp, Homo sapiens
agaggggcctcccggacctccggggctccaaggtgttcctggaccaaagggggaagcaggactagacggagcaaaaggagagaaaggcttccagggagaaaaaggagaccgtggtcccctgggactacccggtactccaggaccaattggagttccaggcccagcgggaccaaagggcgagaggggcagcaaaggagaccctgggatgacaggaccaacgggagcagctgggcttcctggtttacatggaccacccggggacaagggaaaccggggggagagggggaagaaaggctctagagggcctaaaggggataagggagaccaaggagcgcctggattagatgccccctgcccattgggcgaagatggcttaccagtccaaggctgctggaacaagtgatgcctctaaccttggattggcctgtgtgtgtgtttgtacatagaatatttatttttatacagttttcactttttgaaaatgccagaagtatgatgcatcttacagattattaaaaaagaaagaaaaacctgcatattttgtacagaaaatatcaacctcttcccttttgtttacaagatgttttgtataagcctatgtctctaatacattttttgtttggtcgtaatgtctgcatgatatttgtgcacatttattaagtatcgaagcttaataaattattgtgtcctggtgccaaagggggccagccagaactgaggtgctggctagctcatgtgtgaattcacataaatgtagaggtccatgatatttgctaagctaggtgtgtctaagagtattttaaacccttatggattttcattattaaaggaaatgaaacatgatgcggccgaaaatttcattaaaactctattaaagacaatgccgacaaatgc

SEQ ID NO: 432287 - DNA, 888 bp, Homo sapiens
gccttgtgctgagtggcttacccgtgagcagccggcactccatagggccacagcagagactgtttcttcgtggcacggaaggacatctctgcttgctggtcccatgggctaggacagcccctattgaccttgcactatagctgcatgtgacctttaaccaatggtaaaatagccggatttgtttccacctccttctgaggttctgacctgtagtagagaaaagaaatagacaagcgtgggtgggccacatcctgatcagctgccaaaatgcgtgtggcccttgttacccctgtcctgcccacttggtggaccattgcaggaagtctgagccctctgccttcctttctccttgcagggcgaagatggcttaccagtccaaggctgctggaacaagtgatgcctctaaccttggattggcctgtgtgtgtgtttgtacatagaatatttatttttatacagttttcactttttgaaaatgccagaagtatgatgcatcttacagattattaaaaaagaaagaaaaacctgcatattttgtacagaaaatatcaacctcttcccttttgtttacaagatgttttgtataagcctatgtctctaatacattttttgtttggtcgtaatgtctgcatgatatttgtgcacatttattaagtatcgaagcttaataaattattgtgtcctggtgccaaagggggccagccagaactgaggtgctggctagctcatgtgtgaattcacataaatgtagaggtccatgatatttgctaagctaggtgtgtctaagagtattttaaacccttatggattttcattattaaaggaaatgaaacatgatgcggccgaaaatttcattaaaactctattaaagacaatgccgacaaatgc

SEQ ID NO: 432288 - DNA, 336 bp, Homo sapiens
gaaggctcccctgggcttcctggcctcctggggcagaagggagagaaaggcgatgctggcaactccattggaggaggcagaggggaacctggccctccagggctccctgggcccccagggccaaagggagaagcaggtgtcgatggccagccagaactgaggtgctggctagctcatgtgtgaattcacataaatgtagaggtccatgatatttgctaagctaggtgtgtctaagagtattttaaacccttatggattttcattattaaaggaaatgaaacatgatgcggccgaaaatttcattaaaactctattaaagacaatgccgacaaatgc

SEQ ID NO: 432289 - DNA, 313 bp, Homo sapiens
ggggataagggagaccaaggagcgcctggattagatgccccctgcccattggtatgtttttgtttatcacttgcattgttctggtttttgttcttgaggtttgtaagttggaaacaaagaaggcaaataaactaagatgagaaccaaatgtctacacggatgctaccaaaatctctctgttcatttgactggtgaaattctgcccgctgttggatttgctttgtaaccacagctgcaagtaattctggctaaatcccttgcctttgaatccttttcctttgaagatacagagcaatcgatgtgtggaagtgag

SEQ ID NO: 432290 - DNA, 3690 bp, Homo sapiens
tgaggcggttgctcccctgccgggtgtgttagaagcaagttagaggaagaaggtcttggggactacgggcgccaccgagaacccatacgaggcaaagaactagggggacgcggggcaggtgctgtgggagttggctggacctgtgggatcgacgtctgcgccgtccaggagccgcccaggggagagagcggagactcgggaggaggatgtgcgctccgacccgggcaaggcttcccatccctcccttcctcttctctccttccctccacctgggctcggagtcaggatctgaccgcgggctctgcccaggaagaccgagttccttgagagcgacacctaagcgccggggaagacagggatagaagagacgacagccctttgataagagggtttttagactaacttccagctgtgacgagtgcatggggcctgcgccctgagaggttgcctttccttttcctctcccagcctgggggtttgtggtgatgttaagttctgttaggaccaaggtggatctcagtaaggaggtagagtagatttgtgaacagctgtcggaggtagaatctttgcagacccagagtgggtgggtgtagacactctgccatgggtggtagctttatttgtaatcctcccagtgaaagctttgggaaatccagccctcccaaactcttgcctttcttgtaagactttctaagcgcatggctttgtcgtaagacttctcgtggccatgtgtctcaccctaccgttcgtctcaccaatgaaccagagctgggataccagcaaaaaggacccaaaagactgtttcaccacaattgaagaggtcgtggaccatcccccaaaatgaatcccaacactggaagaccaagagggttgacgtttgctatcttgaaagctgcagcccccgtagagaagatcctagagcagaaggagcacaggctgggctgccatagcatggacccccaaaaagccactgtcatgaagaaatatcctgtgaagaaaatctttgcagggcacctgaactcccaaagccactgaggagaaggtaagggagtactttggtgagtttggggaggtgaatttctccccaggatatggtttatgctccccaccagccaccagtggatgcttttttctgttttccttggctggtggagttgtcagtggagctgctctcacctcctttcttgcctttggagggccgccttttctgagttccctttagggcctgagccaggggaaggcattggccctgagctttgcctgtgtttccagatggaggccattgaactttcagtggatccaaagtctaacaaaagacaatgtcttgttttcgtcaccccccaaagaagaggaacctgtgagaaatattctggagaaatttaacaccatcagtggaagcaaggtgaggagtctctacctccatgtgcctcccctcctgcctctggagaggtagccctttggttaatggcaacccaatagggtaaccaaccatcccattttagcattgagagcattgtgtcctgggagacccttccctggaatgtaaataatcctggttttagcaacaaagtgtggaaggttggaggaaatgcacaaaacccgtaagttttagagggtctgaaagcaacattgtctatcaaatggatacggcacagattattcatctttacttgttgtcacccatttgaccactgatattggcaaccataatttgtagttcagaatggtcatccatccatcgttgcatcattcaaagtgatgtggcttaagtgtatataatgattattaatagttcatcttcgactttgcctgtggattaattggtgtgctttgtaacaagatagtgctagtttaattttttaacattgtgaatattgtgaccatgttttctaagaggtcagataatgagaatggttataataccaatgcaaccatgaccccatcactgaagaagaaggctaaacgactatgtaattttgatgatggatggaaggacacatactactgaactaggaaggtaaataaccaaaacagagcatactacataatatacagaaaaaaatttgagattggacatggtggagaaggggatgtgcaagcacatatggagggcaaatctcacaagtaagatgggacaggtgaatgcttctaaaccaatcaaaaatacctttgtttccccaaaagacaccaatgctcagtcaaaaatagcagctgctgaattagcatgggcataccaggcaaataagcctgcattgtcatagcgttcccttgattgctctatgaaactgagtaaagtttcatttcctgattcaagaattgcagctaaaatatcctctggacaaagaagaagggaaattttttgataacagatgtgttggctccttacagtataaagccaatttctgtcatatctcaccaacaatcctggtttctacagtacatcaattttaagtaatatgccaaatcatggcagcaaaaatatgttccctctagctgttaggtactttgacttgaaaacaggagtttcaaatcatcttcttcatttctgtgaggattttaatgaaactgctgaaatcataaaatattgttgatattttgtctaaatacaaactagacttagctcatctatctgtgtattcgtcagacagtatagatgtaaaattttggcaaattgcattcagtctacaaacttcttaccaaagaaaatgaaaagatcttatccattcaatgccttgtacatcttatatacaacactgctaaaaagggatgtgagttgcttaaatgtgacattgagactttcataatgaaagcttttggttacttttcaatttcctcaaaaagtgcaaaagcacttatggagatttttgacttcacagaaatggaaggtaacctctttagacgtgtgcctgcaagatggctgtcattgtagtgagccatagaaacgatgctaaaatgttggcctgccataagatcatattttcaaaggacaagaataatgtcctttgacattgtttgaaatctgaaaggagaaaaaaatcaagaatctgaagtgggccttaaaaaaatcagtaagtcccttgtgactctgatttttatgaatctgtctctcaaaagccagggtgcccccagaagaactgagacaaactgagtttctgaacatttgaaaatgaggagcaggctcaggatccacagggtgtaaccatcccgtgaggccctgcctgagcagccagccagtcagtgaggctcttcaccttacttccatttctctgattccacctatgtacaacttacgaaaacttgcattattatagactgggagttcttaaattggaatctgtgaatctaaaggggccagaggatagaaatcaggaaatctgaaaacttcgatggaaaaaagaagtttttatttatttccatcaggaaaataggcaacaaaccacagcagtattagtacctgtgtctctgtcatcactaggaatcacagatatccacgttacagatatcttaaaatatttatgtacagcaccactctgaaattatggtaataattagatccaccccctaggtcttgtaatctttaatatgttaataaagaagcacatctattatgtgacagatttaaatgtttaagaatttgatttcaatgaaattgcatttcaataaaattggcttcctttgcaaaaaaaaaaa

SEQ ID NO: 432291 - DNA, 843 bp, Homo sapiens
ggttgctcccctgccgggtgtgttagaagcaagttagaggaagaaggtcttggggactacgggcgccaccgagaacccatacgaggcagccgccgacggcgggtcgccggggcggggccagaacggcgccaaggccaaccagaacggcggcaagaactagggggacgcggggcaggtgctgtgggagttggctggacctgtgggatcgacgtctgcgccgtccaggagccgcccaggggagagagcggagactcgggaggaggatgtgcgctccgacccgggcaaggcttcccatccctcccttcctcttctctccttccctccacctgggctcggagtcaggatctgaccgcgggctctgcccaggaagaccgagttccttgagagcgacacctaagcgccggggaagacagggatagaagagacgacagccctttgataagagggtttttagactaacttccagctgtgacgagtgcatggggcctgcgccctgagaggttgcctttccttttcctctcccagcctgggggtttgtggtgatgttaagttctgttaggaccaaggtggatctcagtaaggaggtagagtagatttgtgaacagctgtcggaggtagaatctttgcagacccagagtgggtgggtgtagacactctgccatgggtggtagctttatttgtaatcctcccagtgaaagctttgggaaatccagccctcccaaactcttgcctttcttgtaagactttctaagcgcatggctttgtcgtaagacttctcgtggccatgtgtctcaccctaccgttcgtctcaccaatgaaccagagctgggataccagcaaaaa

SEQ ID NO: 432292 - DNA, 2825 bp, Homo sapiens
gaacagggcgggagattcggtgtgccgcacgcaggcttcccatcccccagctggcctccggtgctccttacctccccggtggtcgggcgcgaattactggaaattggcttttcccgttggggccgaaggtaccttccctgcggcggcgactcagcggggtgtcgttcggccggcgtgacgcagccggatcggcgccagacggaaacctagcggtgactgtatctgaattttgcagctgcagaatgtgtagtaccttaaaaggttggcaacaatgagtaaaccagaattaaaggaagacaagatgctggaggttcactttgtgggagatgatgatgttcttaatcacattctagatagagaaggaggagctaaattgaagaaggagcgagcgcagcttttggtcaaccccaaaaaaataataaagaagccagaatatgatttggaggaagatgaccaggaggtcttaaaagatcagaactatgtggaaattatgggaagagatgttcaagaatcattgaaaaatggctctgctacaggtggtggaaataaagtttattcttttcagaatagaaaacactctgaaaagatggctaaattagcttcagaactagcaaaaacaccacaaaaaagtgtttcattcagtttgaagaatgatcctgagattacgataaacgttcctcaaagtagcaagggccattctgcttcagacaaggttcaaccgaagaacaatgacaaaagtgaatttctgtcaacagcacctcgtagtctaagaaaaagattaatagttccaaggtctcattctgacagtgaaagcgaatattctgcttccaactcagaggatgatgaaggggttgcacaggaacatgaagaggacactaatgcagtcatattcagccaaaagattcaagctcagaatagagtagtttcagctcctgttggcaaagaaacaccttctaagagaatgaaaagagataaaacaagtgacttagtagaagaatattttgaagctcacagcagttcaaaagttttaacctctgatagaacactgcagaagctaaagagagctaaactggatcagcaaactttgcgtaacttattgagcaaggtttccccttccttttctgccgaacttaaacaactaaatcaacagtatgaaaaattatttcataaatggatgctgcaattacaccttgggttcaacattgtgctttatggtttgggttctaagagagatttactagaaaggtttcgaaccactatgctgcaagattccattcacgttgtcatcaatggcttctttcctggaatcagtgtgaaatcagtcctgaattctataacagaagaagtcctcgatcatatgggtactttccgcagtatactggatcagctagactggatagtaaacaaatttaaagaagattcttctttagaactcttccttctcatccacaatttggatagccagatgttgagaggagagaagagccagcaaatcattggtcagttgtcatctttgcataacatttaccttatagcatccattgaccacctcaatgctcctctcatgtgggatcatgcaaagcagagtctttttaactggctctggtatgaaactactacatacagtccttatactgaagaaacctcctatgagaactctcttctggtaaagcagtctggatccctgccacttagctcccttactcatgtcttacgaagccttacccctaatgcaaggggaattttcaggctactaataaaataccagctggacaaccaggataacccttcttacattggcctttcttttcaagatttttaccagcagtgtcgggaggcattcctcgtcaatagtgatctgacactccgggcccagttaactgaatttagggaccacaagcttataagaacaaagaagggaactgatggagtagagtatttattaattcctgttgataatggaacattgactgatttcttggaaaaggaagaagaggaggcttgaagctttcctttattcttgaatctcccatggaagggttgtaccccagctgccactcctctagttgaaagtgttgtgtttacatctgacattaaattatttttccagcatacaagatttaaatttgggaagggggggatgtcctcaattagaactttttgatcagcctggctggtaccgtctagtactatgcagcggtcctcaagttggagaaaatgtgcctttcattcattacctctctggagacttcttgctggaatgaacagtgtgctcagggactatttggaactggatgtttttgaattattttatacttagagatattctgaattttttgagggccttttaacactccccgagctgattgtttgcaagtgtgtttgttccagagtgtggaagtataaagacatgggcatcacgtaaattggttttgtttgctattctgtgtgtcagaaccaacgagtgtaatggagagggcaggtcatctcttattgtttctaaaacaacttaaaaggtgtagattgggaagaggtgagtgatccagctttctccttttggattgaggctatgtacttggtgggggcaggggagggaatatattataatactattcagttgggataatgggaaaaacagagtatatagggtatctacccagcctagaaagcacaggaacaatacgtcatatatttggaacagttattgtctgtgccatgaccttcatgataccagtgagaagccaggctagagaaataaaatcctgaattacattttagtaattgttttcaagacaacaaaaaataaaacatttcattattcttgt

SEQ ID NO: 432293 - DNA, 400 bp, Homo sapiens
tctagcctctttcactcagatcagtcattaatttccatgttattatttaatgctttttctatttctaaacagaacaatgacaaaagtgaatttctgtcaacagcacctcgtagtctaagaaaaagattaataggtacgtatttgtttttacatgactttttataaaaagtagcatctaaacaagaggcaataatagttaagtatataggttctagacttagactgcttggtgttttgaatctttggcttttagttgcaacacttagcaccatgtctttcacattgtagtcagtgtatattgaagtcagctaaaaggtctttccaatgaaataacatgccttttaattgttttgagacagtttggaaattaattctattgatttatttggaaattttataa

SEQ ID NO: 432294 - DNA, 3384 bp, Homo sapiens
gaacagggcgggagattcggtgtgccgcacgcaggcttcccatcccccagctggcctccggtgctccttacctccccggtggtcgggcgcgaattactggaaattggcttttcccgttggggccgaaggtaccttccctgcggcggcgactcagcggggtgtcgttcggccggcgtgacgcagccggatcggcgccagacggaaacctagcggtgactgtatctgaattttgcagctgcagaatgtgtagtaccttaaaaggttggcaacaatgagtaaaccagaattaaaggaagacaagatgctggaggttcactttgtgggagatgatgatgttcttaatcacattctagatagagaaggaggagctaaattgaagaaggagcgagcgcagcttttggtcaaccccaaaaaaataataaagaagccagaatatgatttggaggaagatgaccaggaggtcttaaaagatcagaactatgtggaaattatgggaagagatgttcaagaatcattgaaaaatggctctgctacaggtggtggaaataaagtttattcttttcagaatagaaaacactctgaaaagatggctaaattagcttcagaactagcaaaaacaccacaaaaaagtgtttcattcagtttgaagaatgatcctgagattacgataaacgttcctcaaagtagcaagggccattctgcttcagacaaggttcaaccgaagaacaatgacaaaagtgaatttctgtcaacagcacctcgtagtctaagaaaaagattaatagttccaaggtctcattctgacagtgaaagcgaatattctgcttccaactcagaggatgatgaaggggttgcacaggaacatgaagaggacactaatgcagtcatattcagccaaaagattcaagctcagaatagagtagtttcagctcctgttggcaaagaaacaccttctaagagaatgaaaagagataaaacaagtgacttagtagaagaatattttgaagctcacagcagttcaaaagttttaacctctgatagaacactgcagaagctaaagagagctaaactggatcagcaaactttgcgtaacttattgagcaaggtttccccttccttttctgccgaacttaaacaactaaatcaacagtatgaaaaattatttcataaatggatgctgcaattacaccttgggttcaacattgtgctttatggtttgggttctaagagagatttactagaaaggtttcgaaccactatgctgcaagattccattcacgttgtcatcaatggcttctttcctggaatcagtgtgaaatcagtcctgaattctataacagaagaagtcctcgatcatatgggtactttccgcagtatactggatcagctagactggatagtaaacaaatttaaagaagattcttctttagaactcttccttctcatccacaatttggatagccagatgttgagaggagagaagagccagcaaatcattggtcagttgtcatctttgcataacatttaccttatagcatccattgaccacctcaatgctcctctcatgtgggatcatgcaaagcagagtctttttaactggctctggtatgaaactactacatacagtccttatactgaagaaacctcctatgagaactctcttctggtaaagcagtctggatccctgccacttagctcccttactcatgtcttacgaagccttacccctaatgcaaggggaattttcaggctactaataaaataccagctggacaaccaggataacccttcttacattggcctttcttttcaagatttttaccagcagtgtcgggaggcattcctcgtcaatagtgatctgacactccgggcccagttaactgaatttagggaccacaagcttataagaacaaagaagggaactgatggagtagagtatttattaattcctgttgataatggaacattgactgatttcttggaaaaggaagaagaggaggcttgaagctttcctttattcttgaatctcccatggaagggttgtaccccagctgccactcctctagttgaaagtgttgtgtttacatctgacattaaattatttttccagcatacaagatttaaatttgggaagggggggatgtcctcaattagaactttttgatcagcctggctggtaccgtctagtactatgcagcggtcctcaagttggagaaaatgtgcctttcattcattacctctctggagacttcttgctggaatgaacagtgtgctcagggactatttggaactggatgtttttgaattattttatacttagagatattctgaattttttgagggccttttaacactccccgagctgattgtttgcaagtgtgtttgttccagagtgtggaagtataaagacatgggcatcacgtaaattggttttgtttgctattctgtgtgtcagaaccaacgagtgtaatggagagggcaggtcatctcttattgtttctaaaacaacttaaaaggtgtagattgggaagaggtgagtgatccagctttctccttttggattgaggctatgtacttggtgggggcaggggagggaatatattataatactattcagttgggataatgggaaaaacagagtatatagggtatctacccagcctagaaagcacaggaacaatacgtcatatatttggaacagttattgtctgtgccatgaccttcatgataccagtgagaagccaggctagagaaataaaatcctgaattacattttagtaattgttttcaagacaacaaaaaataaaacatttcattattcttgtatattgacatatttttcttttcttgaacaacatgcaggtgagtagcatattaatggctggctgtaaattaattttgattcctctgtcaagtagacctaaaactcactgtaagatatttcagttttttccttaaagtgatgatttcaaacctcctgaatatttgcgcgagacttttttcttaggaaagaaaaaaggctcaccttggctactgttgtcagcttacagtcatcacataccccctgaaatatttgacacttggaaatgaagttcttcctgaaaatatcactgcaataaaatacgtactacgtcaaaaaaaaaaaaaaaaacaaaaaaaaaaacttttttgggaccgctccccgccccatagaaaaaaggcttttccaaacacacaccgtgtgggggcgccgcgggcccagatgggtcactgtgaaccggggccacaccgtggtccccaagagaaacctgggcgcagagaaccacagtcgcctcgggattcctcccccatataaaaaagccgccgggggggaacacgcgcgcgtctcgtggacacacgtccagg

SEQ ID NO: 432295 - DNA, 3526 bp, Homo sapiens
gaacagggcgggagattcggtgtgccgcacgcaggcttcccatcccccagctggcctccggtgctccttacctccccggtggtcgggcgcgaattactggaaattggcttttcccgttggggccgaaggtaccttccctgcggcggcgactcagcggggtgtcgttcggccggcgtgacgcagccggatcggcgccagacggaaacctagcggtgactgtatctgaattttgcagctgcagaatgtgtagtaccttaaaaggttggcaacaatgagtaaaccagaattaaaggaagacaagatgctggaggttcactttgtgggagatgatgatgttcttaatcacattctagatagagaaggaggagctaaattgaagaaggagcgagcgcagcttttggtcaaccccaaaaaaataataaagaagccagaatatgatttggaggaagatgaccaggaggtcttaaaagatcagaactatgtggaaattatgggaagagatgttcaagaatcattgaaaaatggctctgctacaggtggtggaaataaagtttattcttttcagaatagaaaacactctgaaaagatggctaaattagcttcagaactagcaaaaacaccacaaaaaagtgtttcattcagtttgaagaatgatcctgagattacgataaacgttcctcaaagtagcaagggccattctgcttcagacaaggttcaaccgaagaacaatgacaaaagtgaatttctgtcaacagcacctcgtagtctaagaaaaagattaatagttccaaggtctcattctgacagtgaaagcgaatattctgcttccaactcagaggatgatgaaggggttgcacaggaacatgaagaggacactaatgcagtcatattcagccaaaagattcaagctcagaatagagtagtttcagctcctgttggcaaagaaacaccttctaagagaatgaaaagagataaaacaagtgacttagtagaagaatattttgaagctcacagcagttcaaaagttttaacctctgatagaacactgcagaagctaaagagagctaaactggatcagcaaactttgcgtaacttattgagcaaggtttccccttccttttctgccgaacttaaacaactaaatcaacagtatgaaaaattatttcataaatggatgctgcaattacaccttgggttcaacattgtgctttatggtttgggttctaagagagatttactagaaaggtttcgaaccactatgctgcaagattccattcacgttgtcatcaatggcttctttcctggaatcagtgtgaaatcagtcctgaattctataacagaagaagtcctcgatcatatgggtactttccgcagtatactggatcagctagactggatagtaaacaaatttaaagaagattcttctttagaactcttccttctcatccacaatttggatagccagatgttgagaggagagaagagccagcaaatcattggtcagttgtcatctttgcataacatttaccttatagcatccattgaccacctcaatgctcctctcatgtgggatcatgcaaagcagagtctttttaactggctctggtatgaaactactacatacagtccttatactgaagaaacctcctatgagaactctcttctggtaaagcagtctggatccctgccacttagctcccttactcatgtcttacgaagccttacccctaatgcaaggggaattttcaggctactaataaaataccagctggacaaccaggataacccttcttacattggcctttcttttcaagatttttaccagcagtgtcgggaggcattcctcgtcaatagtgatctgacactccgggcccagttaactgaatttagggaccacaagcttataagaacaaagaagggaactgatggagtagagtatttattaattcctgttgataatggaacattgactgatttcttggaaaaggaagaagaggaggcttgaagctttcctttattcttgaatctcccatggaagggttgtaccccagctgccactcctctagttgaaagtgttgtgtttacatctgacattaaattatttttccagcatacaagatttaaatttgggaagggggggatgtcctcaattagaactttttgatcagcctggctggtaccgtctagtactatgcagcggtcctcaagttggagaaaatgtgcctttcattcattacctctctggagacttcttgctggaatgaacagtgtgctcagggactatttggaactggatgtttttgaattattttatacttagagatattctgaattttttgagggccttttaacactccccgagctgattgtttgcaagtgtgtttgttccagagtgtggaagtataaagacatgggcatcacgtaaattggttttgtttgctattctgtgtgtcagaaccaacgagtgtaatggagagggcaggtcatctcttattgtttctaaaacaacttaaaaggtgtagattgggaagaggtgagtgatccagctttctccttttggattgaggctatgtacttggtgggggcaggggagggaatatattataatactattcagttgggataatgggaaaaacagagtatatagggtatctacccagcctagaaagcacaggaacaatacgtcatatatttggaacagttattgtctgtgccatgaccttcatgataccagtgagaagccaggctagagaaataaaatcctgaattacattttagtaattgttttcaagacaacaaaaaataaaacatttcattattcttgtatattgacatatttttcttttcttgaacaacatgcaggtgagtagcatattaatggctggctgtaaattaattttgattcctctgtcaagtagacctaaaactcactgtaagatatttcagttttttccttaaagtgatgatttcaaacctcctgaatatttgcgcgagacttttttcttaggaaagaaaaaaggctcaccttggctactgttgtcagcttacagtcatcacataccccctgaaatatttgacacttggaaatgaagttcttcctgaaaatatcactgcaataaaatacgtactacgtcagcatttctcactcatttcttatcttgtaaacctctttcatgaaaatatttccaaaaatccttggaatttttaaataatttttcttgtggcatataattaagtaattttggccaggcataatggcttatgcctgtaatcacaacactttgggaggccaaggcaggaggatctctggagcccaggagtttaagaacagcctgggcaacatggtgagaccttgtctctacaaaaaatttaaaaaatcatccgggcatggtggcccatgcctatagtcctagctgctgtggaggctgaggcaggaggatcgcttgagcccaggggttcaagattacagtgagctatgattgtgccactgcacttcagtctgggtgcagagcaagaccttgtcttt

SEQ ID NO: 432296 - DNA, 3360 bp, Homo sapiens
gaacagggcgggagattcggtgtgccgcacgcaggcttcccatcccccagctggcctccggtgctccttacctccccggtggtcgggcgcgaattactggaaattggcttttcccgttggggccgaaggtaccttccctgcggcggcgactcagcggggtgtcgttcggccggcgtgacgcagccggatcggcgccagacggaaacctagcggtgactgtatctgaattttgcagctgcagaatgtgtagtaccttaaaaggttggcaacaatgagtaaaccagaattaaaggaagacaagatgctggaggttcactttgtgggagatgatgatgttcttaatcacattctagatagagaaggaggagctaaattgaagaaggagcgagcgcagcttttggtcaaccccaaaaaaataataaagaagccagaatatgatttggaggaagatgaccaggaggtcttaaaagatcagaactatgtggaaattatgggaagagatgttcaagaatcattgaaaaatggctctgctacaggtggtggaaataaagtttattcttttcagaatagaaaacactctgaaaagatggctaaattagcttcagaactagcaaaaacaccacaaaaaagtgtttcattcagtttgaagaatgatcctgagattacgataaacgttcctcaaagtagcaagggccattctgcttcagacaaggttcaaccgaagaacaatgacaaaagtgaatttctgtcaacagcacctcgtagtctaagaaaaagattaatagttccaaggtctcattctgacagtgaaagcgaatattctgcttccaactcagaggatgatgaaggggttgcacaggaacatgaagaggacactaatgcagtcatattcagccaaaagattcaagctcagaatagagtagtttcagctcctgttggcaaagaaacaccttctaagagaatgaaaagagataaaacaagtgacttagtagaagaatattttgaagctcacagcagttcaaaagttttaacctctgatagaacactgcagaagctaaagagagctaaactggatcagcaaactttgcgtaacttattgagcaaggtttccccttccttttctgccgaacttaaacaactaaatcaacagtatgaaaaattatttcataaatggatgctgcaattacaccttgggttcaacattgtgctttatggtttgggttctaagagagatttactagaaaggtttcgaaccactatgctgcaagattccattcacgttgtcatcaatggcttctttcctggaatcagtgtgaaatcagtcctgaattctataacagaagaagtcctcgatcatatgggtactttccgcagtatactggatcagctagactggatagtaaacaaatttaaagaagattcttctttagaactcttccttctcatccacaatttggatagccagatgttgagaggagagaagagccagcaaatcattggtcagttgtcatctttgcataacatttaccttatagcatccattgaccacctcaatgctcctctcatgtgggatcatgcaaagcagagtctttttaactggctctggtatgaaactactacatacagtccttatactgaagaaacctcctatgagaactctcttctggtaaagcagtctggatccctgccacttagctcccttactcatgtcttacgaagccttacccctaatgcaaggggaattttcaggctactaataaaataccagctggacaaccaggataacccttcttacattggcctttcttttcaagatttttaccagcagtgtcgggaggcattcctcgtcaatagtgatctgacactccgggcccagttaactgaatttagggaccacaagcttataagaacaaagaagggaactgatggagtagagtatttattaattcctgttgataatggaacattgactgatttcttggaaaaggaagaagaggaggcttgaagctttcctttattcttgaatctcccatggaagggttgtaccccagctgccactcctctagttgaaagtgttgtgtttacatctgacattaaattatttttccagcatacaagatttaaatttgggaagggggggatgtcctcaattagaactttttgatcagcctggctggtaccgtctagtactatgcagcggtcctcaagttggagaaaatgtgcctttcattcattacctctctggagacttcttgctggaatgaacagtgtgctcagggactatttggaactggatgtttttgaattattttatacttagagatattctgaattttttgagggccttttaacactccccgagctgattgtttgcaagtgtgtttgttccagagtgtggaagtataaagacatgggcatcacgtaaattggttttgtttgctattctgtgtgtcagaaccaacgagtgtaatggagagggcaggtcatctcttattgtttctaaaacaacttaaaaggtgtagattgggaagaggtgagtgatccagctttctccttttggattgaggctatgtacttggtgggggcaggggagggaatatattataatactattcagttgggataatgggaaaaacagagtatatagggtatctacccagcctagaaagcacaggaacaatacgtcatatatttggaacagttattgtctgtgccatgaccttcatgataccagtgagaagccaggctagagaaataaaatcctgaattacattttagtaattgttttcaagacaacaaaaaataaaacatttcattattcttgtatattgacatatttttcttttcttgaacaacatgcaggtgagtagcatattaatggctggctgtaaattaattttgattcctctgtcaagtagacctaaaactcactgtaagatatttcagttttttccttaaagtgatgatttcaaacctcctgaatatttgcgcgagacttttttcttaggaaagaaaaaaggctcaccttggctactgttgtcagcttacagtcatcacataccccctgaaatatttgacacttggaaatgaagttcttcctgaaaatatcactgcaataaaatacgtactacgtcagcatttctcactcatttcttatcttgtaaacctctttcatgaaaatatttccaaaaatccttggaatttttaaataatttttcttgtggcatataattaagtaattttggccaggcataatggcttatgcctgtaatcacaacactttgggagacaataaagccggtattttacgaggcccgtggaatcaaaaactgcaattagtaataaaatatgatgatatct

SEQ ID NO: 432297 - DNA, 3901 bp, Homo sapiens
gaacagggcgggagattcggtgtgccgcacgcaggcttcccatcccccagctggcctccggtgctccttacctccccggtggtcgggcgcgaattactggaaattggcttttcccgttggggccgaaggtaccttccctgcggcggcgactcagcggggtgtcgttcggccggcgtgacgcagccggatcggcgccagacggaaacctagcggtgactgtatctgaattttgcagctgcagaatgtgtagtaccttaaaaggttggcaacaatgagtaaaccagaattaaaggaagacaagatgctggaggttcactttgtgggagatgatgatgttcttaatcacattctagatagagaaggaggagctaaattgaagaaggagcgagcgcagcttttggtcaaccccaaaaaaataataaagaagccagaatatgatttggaggaagatgaccaggaggtcttaaaagatcagaactatgtggaaattatgggaagagatgttcaagaatcattgaaaaatggctctgctacaggtggtggaaataaagtttattcttttcagaatagaaaacactctgaaaagatggctaaattagcttcagaactagcaaaaacaccacaaaaaagtgtttcattcagtttgaagaatgatcctgagattacgataaacgttcctcaaagtagcaagggccattctgcttcagacaaggttcaaccgaagaacaatgacaaaagtgaatttctgtcaacagcacctcgtagtctaagaaaaagattaatagttccaaggtctcattctgacagtgaaagcgaatattctgcttccaactcagaggatgatgaaggggttgcacaggaacatgaagaggacactaatgcagtcatattcagccaaaagattcaagctcagaatagagtagtttcagctcctgttggcaaagaaacaccttctaagagaatgaaaagagataaaacaagtgacttagtagaagaatattttgaagctcacagcagttcaaaagttttaacctctgatagaacactgcagaagctaaagagagctaaactggatcagcaaactttgcgtaacttattgagcaaggtttccccttccttttctgccgaacttaaacaactaaatcaacagtatgaaaaattatttcataaatggatgctgcaattacaccttgggttcaacattgtgctttatggtttgggttctaagagagatttactagaaaggtttcgaaccactatgctgcaagattccattcacgttgtcatcaatggcttctttcctggaatcagtgtgaaatcagtcctgaattctataacagaagaagtcctcgatcatatgggtactttccgcagtatactggatcagctagactggatagtaaacaaatttaaagaagattcttctttagaactcttccttctcatccacaatttggatagccagatgttgagaggagagaagagccagcaaatcattggtcagttgtcatctttgcataacatttaccttatagcatccattgaccacctcaatgctcctctcatgtgggatcatgcaaagcagagtctttttaactggctctggtatgaaactactacatacagtccttatactgaagaaacctcctatgagaactctcttctggtaaagcagtctggatccctgccacttagctcccttactcatgtcttacgaagccttacccctaatgcaaggggaattttcaggctactaataaaataccagctggacaaccaggataacccttcttacattggtatccaatatttatgacattcaattgtgtaatttttgttttaccctgtacatttcctgtctctggaatttaatgacagcagtgcagtttttcacagcagtgagtaagtggtcactcatgatgggtatgtctgccacatagcaaattttcaagcagctctacagatccactgctgagcaaggtgtttgccaacacaaattgaaagacaaacccagcttacttttaaaattttctgtgctaactatggatgtgtatctgccaagtacatatttttcatattctaggcatcttaggagattttcttcccctttggcaaaaatgatttcaacaaacattttaataattgttctgctctcatgacttacttgttccttctttaaaagtcctatcaatacttgttcactgctctgggataacatgcaaatagcacttttattctgttcttttgtatgggtgtttgtatattgggtcatgtcttaagtgctgacttatgttcatatccttttgaacttgccaggcctttcttttcaagatttttaccagcagtgtcgggaggcattcctcgtcaatagtgatctgacactccgggcccagttaactgaatttagggaccacaagcttataagaacaaagaagggaactgatggagtagagtatttattaattcctgttgataatggaacattgactgatttcttggaaaaggaagaagaggaggcttgaagctttcctttattcttgaatctcccatggaagggttgtaccccagctgccactcctctagttgaaagtgttgtgtttacatctgacattaaattatttttccagcatacaagatttaaatttgggaagggggggatgtcctcaattagaactttttgatcagcctggctggtaccgtctagtactatgcagcggtcctcaagttggagaaaatgtgcctttcattcattacctctctggagacttcttgctggaatgaacagtgtgctcagggactatttggaactggatgtttttgaattattttatacttagagatattctgaattttttgagggccttttaacactccccgagctgattgtttgcaagtgtgtttgttccagagtgtggaagtataaagacatgggcatcacgtaaattggttttgtttgctattctgtgtgtcagaaccaacgagtgtaatggagagggcaggtcatctcttattgtttctaaaacaacttaaaaggtgtagattgggaagaggtgagtgatccagctttctccttttggattgaggctatgtacttggtgggggcaggggagggaatatattataatactattcagttgggataatgggaaaaacagagtatatagggtatctacccagcctagaaagcacaggaacaatacgtcatatatttggaacagttattgtctgtgccatgaccttcatgataccagtgagaagccaggctagagaaataaaatcctgaattacattttagtaattgttttcaagacaacaaaaaataaaacatttcattattcttgtatattgacatatttttcttttcttgaacaacatgcaggtgagtagcatattaatggctggctgtaaattaattttgattcctctgtcaagtagacctaaaactcactgtaagatatttcagttttttccttaaagtgatgatttcaaacctcctgaatatttgcgcgagacttttttcttaggaaagaaaaaaggctcaccttggctactgttgtcagcttacagtcatcacataccccctgaaatatttgacacttggaaatgaagttcttcctgaaaatatcactgcaataaaatacgtactacgtcaaaaaaaaaaaaaaaaacaaaaaaaaaaacttttttgggaccgctccccgccccatagaaaaaaggcttttccaaacacacaccgtgtgggggcgccgcgggcccagatgggtcactgtgaaccggggccacaccgtggtccccaagagaaacctgggcgcagagaaccacagtcgcctcgggattcctcccccatataaaaaagccgccgggggggaacacgcgcgcgtctcgtggacacacgtccagg

SEQ ID NO: 432298 - DNA, 3848 bp, Homo sapiens
gaacagggcgggagattcggtgtgccgcacgcaggcttcccatcccccagctggcctccggtgctccttacctccccggtggtcgggcgcgaattactggaaattggcttttcccgttggggccgaaggtaccttccctgcggcggcgactcagcggggtgtcgttcggccggcgtgacgcagccggatcggcgccagacggaaacctagcggtgactgtatctgaattttgcagctgcagaatgtgtagtaccttaaaaggttggcaacaatgagtaaaccagaattaaaggaagacaagatgctggaggttcactttgtgggagatgatgatgttcttaatcacattctagatagagaaggaggagctaaattgaagaaggagcgagcgcagcttttggtcaaccccaaaaaaataataaagaagccagaatatgatttggaggaagatgaccaggaggtcttaaaagatcagaactatgtggaaattatgggaagagatgttcaagaatcattgaaaaatggctctgctacaggtggtggaaataaagtttattcttttcagaatagaaaacactctgaaaagatggctaaattagcttcagaactagcaaaaacaccacaaaaaagtgtttcattcagtttgaagaatgatcctgagattacgataaacgttcctcaaagtagcaagggccattctgcttcagacaaggttcaaccgaagaacaatgacaaaagtgaatttctgtcaacagcacctcgtagtctaagaaaaagattaatagttccaaggtctcattctgacagtgaaagcgaatattctgcttccaactcagaggatgatgaaggggttgcacaggaacatgaagaggacactaatgcagtcatattcagccaaaagattcaagctcagaatagagtagtttcagctcctgttggcaaagaaacaccttctaagagaatgaaaagagataaaacaagtgacttagtagaagaatattttgaagctcacagcagttcaaaagttttaacctctgatagaacactgcagaagctaaagagagctaaactggatcagcaaactttgcgtaacttattgagcaaggtttccccttccttttctgccgaacttaaacaactaaatcaacagtatgaaaaattatttcataaatggatgctgcaattacaccttgggttcaacattgtgctttatggtttgggttctaagagagatttactagaaaggtttcgaaccactatgctgcaagattccattcacgttgtcatcaatggcttctttcctggaatcagtgtgaaatcagtcctgaattctataacagaagaagtcctcgatcatatgggtactttccgcagtatactggatcagctagactggatagtaaacaaatttaaagaagattcttctttagaactcttccttctcatccacaatttggatagccagatgttgagaggagagaagagccagcaaatcattggtcagttgtcatctttgcataacatttaccttatagcatccattgaccacctcaatgctcctctcatgtgggatcatgcaaagcagagtctttttaactggctctggtatgaaactactacatacagtccttatactgaagaaacctcctatgagaactctcttctggtaaagcagtctggatccctgccacttagctcccttactcatgtcttacgaagccttacccctaatgcaaggggaattttcaggctactaataaaataccagctggacaaccaggataacccttcttacattggtatccaatatttatgacattcaattgtgtaatttttgttttaccctgtacatttcctgtctctggaatttaatgacagcagtgcagtttttcacagcagtgagtaagtggtcactcatgatgggtatgtctgccacatagcaaattttcaagcagctctacagatccactgctgagcaaggtgtttgccaacacaaattgaaagacaaacccagcttacttttaaaattttctgtgctaactatggatgtgtatctgccaagtacatatttttcatattctaggcatcttaggagattttcttcccctttggcaaaaatgatttcaacaaacattttaataattgttctgctctcatgacttacttgttccttctttaaaagtcctatcaatacttgttcactgctctgggataacatgcaaatagcacttttattctgttcttttgtatgggtgtttgtatattgggtcatgtcttaagtgctgacttatgttcatatccttttgaacttgccaggcctttcttttcaagatttttaccagcagtgtcgggaggcattcctcgtcaatagtgatctgacactccgggcccagttaactgaatttagggaccacaagcttataagaacaaagaagggaactgatggagtagagtatttattaattcctgttgataatggaacattgactgatttcttggaaaaggaagaagaggaggcttgaagctttcctttattcttgaatctcccatggaagggttgtaccccagctgccactcctctagttgaaagtgttgtgtttacatctgacattaaattatttttccagcatacaagatttaaatttgggaagggggggatgtcctcaattagaactttttgatcagcctggctggtaccgtctagtactatgcagcggtcctcaagttggaggtgtgctcagggactatttggaactggatgtttttgaattattttatacttagagatattctgaattttttgagggccttttaacactccccgagctgattgtttgcaagtgtgtttgttccagagtgtggaagtataaagacatgggcatcacgtaaattggttttgtttgctattctgtgtgtcagaaccaacgagtgtaatggagagggcaggtcatctcttattgtttctaaaacaacttaaaaggtgtagattgggaagaggtgagtgatccagctttctccttttggattgaggctatgtacttggtgggggcaggggagggaatatattataatactattcagttgggataatgggaaaaacagagtatatagggtatctacccagcctagaaagcacaggaacaatacgtcatatatttggaacagttattgtctgtgccatgaccttcatgataccagtgagaagccaggctagagaaataaaatcctgaattacattttagtaattgttttcaagacaacaaaaaataaaacatttcattattcttgtatattgacatatttttcttttcttgaacaacatgcaggtgagtagcatattaatggctggctgtaaattaattttgattcctctgtcaagtagacctaaaactcactgtaagatatttcagttttttccttaaagtgatgatttcaaacctcctgaatatttgcgcgagacttttttcttaggaaagaaaaaaggctcaccttggctactgttgtcagcttacagtcatcacataccccctgaaatatttgacacttggaaatgaagttcttcctgaaaatatcactgcaataaaatacgtactacgtcaaaaaaaaaaaaaaaaacaaaaaaaaaaacttttttgggaccgctccccgccccatagaaaaaaggcttttccaaacacacaccgtgtgggggcgccgcgggcccagatgggtcactgtgaaccggggccacaccgtggtccccaagagaaacctgggcgcagagaaccacagtcgcctcgggattcctcccccatataaaaaagccgccgggggggaacacgcgcgcgtctcgtggacacacgtccagg

SEQ ID NO: 432299 - DNA, 2879 bp, Homo sapiens
aacaatttctatcacagttcctgtgtgtcaggaattattagtggctttatatacatttcaatgtaatcttcctaatggtttattaaactatgtactattaatttgataaataaactggtgctgagagaatttgttaattagctctggtgaaatcatgagcaggtaatgacaaaaccagaattcagactcttactacagagcccccactctttgctttaccccacaatgcctctcttgtcaaaccatgaaattgtccaaattgctatttttccccccacagttccaaggtctcattctgacagtgaaagcgaatattctgcttccaactcagaggatgatgaaggggttgcacaggaacatgaagaggacactaatgcagtcatattcagccaaaagattcaagctcagaatagagtagtttcagctcctgttggcaaagaaacaccttctaagagaatgaaaagagataaaacaagtgacttagtagaagaatattttgaagctcacagcagttcaaaagttttaacctctgatagaacactgcagaagctaaagagagctaaactggatcagcaaactttgcgtaacttattgagcaaggtttccccttccttttctgccgaacttaaacaactaaatcaacagtatgaaaaattatttcataaatggatgctgcaattacaccttgggttcaacattgtgctttatggtttgggttctaagagagatttactagaaaggtttcgaaccactatgctgcaagattccattcacgttgtcatcaatggcttctttcctggaatcagtgtgaaatcagtcctgaattctataacagaagaagtcctcgatcatatgggtactttccgcagtatactggatcagctagactggatagtaaacaaatttaaagaagattcttctttagaactcttccttctcatccacaatttggatagccagatgttgagaggagagaagagccagcaaatcattggtcagttgtcatctttgcataacatttaccttatagcatccattgaccacctcaatgctcctctcatgtgggatcatgcaaagcagagtctttttaactggctctggtatgaaactactacatacagtccttatactgaagaaacctcctatgagaactctcttctggtaaagcagtctggatccctgccacttagctcccttactcatgtcttacgaagccttacccctaatgcaaggggaattttcaggctactaataaaataccagctggacaaccaggataacccttcttacattggcctttcttttcaagatttttaccagcagtgtcgggaggcattcctcgtcaatagtgatctgacactccgggcccagttaactgaatttagggaccacaagcttataagaacaaagaagggaactgatggagtagagtatttattaattcctgttgataatggaacattgactgatttcttggaaaaggaagaagaggaggcttgaagctttcctttattcttgaatctcccatggaagggttgtaccccagctgccactcctctagttgaaagtgttgtgtttacatctgacattaaattatttttccagcatacaagatttaaatttgggaagggggggatgtcctcaattagaactttttgatcagcctggctggtaccgtctagtactatgcagcggtcctcaagttggagaaaatgtgcctttcattcattacctctctggagacttcttgctggaatgaacagtgtgctcagggactatttggaactggatgtttttgaattattttatacttagagatattctgaattttttgagggccttttaacactccccgagctgattgtttgcaagtgtgtttgttccagagtgtggaagtataaagacatgggcatcacgtaaattggttttgtttgctattctgtgtgtcagaaccaacgagtgtaatggagagggcaggtcatctcttattgtttctaaaacaacttaaaaggtgtagattgggaagaggtgagtgatccagctttctccttttggattgaggctatgtacttggtgggggcaggggagggaatatattataatactattcagttgggataatgggaaaaacagagtatatagggtatctacccagcctagaaagcacaggaacaatacgtcatatatttggaacagttattgtctgtgccatgaccttcatgataccagtgagaagccaggctagagaaataaaatcctgaattacattttagtaattgttttcaagacaacaaaaaataaaacatttcattattcttgtatattgacatatttttcttttcttgaacaacatgcaggtgagtagcatattaatggctggctgtaaattaattttgattcctctgtcaagtagacctaaaactcactgtaagatatttcagttttttccttaaagtgatgatttcaaacctcctgaatatttgcgcgagacttttttcttaggaaagaaaaaaggctcaccttggctactgttgtcagcttacagtcatcacataccccctgaaatatttgacacttggaaatgaagttcttcctgaaaatatcactgcaataaaatacgtactacgtcaaaaaaaaaaaaaaaaacaaaaaaaaaaacttttttgggaccgctccccgccccatagaaaaaaggcttttccaaacacacaccgtgtgggggcgccgcgggcccagatgggtcactgtgaaccggggccacaccgtggtccccaagagaaacctgggcgcagagaaccacagtcgcctcgggattcctcccccatataaaaaagccgccgggggggaacacgcgcgcgtctcgtggacacacgtccagg

SEQ ID NO: 432300 - DNA, 2844 bp, Homo sapiens
ggaacgttatcgggaatctcaggatcattcttcaactgaaatgaaacacttttttttggtgtttttgctagttctgaagctaatttagccatcttttcagagtgttttctattctgaaaagaataaactttatttccaccacctgtagcagagccattctgcttcagacaaggttcaaccgaagaacaatgacaaaagtgaatttctgtcaacagcacctcgtagtctaagaaaaagattaatagttccaaggtctcattctgacagtgaaagcgaatattctgcttccaactcagaggatgatgaaggggttgcacaggaacatgaagaggacactaatgcagtcatattcagccaaaagattcaagctcagaatagagtagtttcagctcctgttggcaaagaaacaccttctaagagaatgaaaagagataaaacaagtgacttagtagaagaatattttgaagctcacagcagttcaaaagttttaacctctgatagaacactgcagaagctaaagagagctaaactggatcagcaaactttgcgtaacttattgagcaaggtttccccttccttttctgccgaacttaaacaactaaatcaacagtatgaaaaattatttcataaatggatgctgcaattacaccttgggttcaacattgtgctttatggtttgggttctaagagagatttactagaaaggtttcgaaccactatgctgcaagattccattcacgttgtcatcaatggcttctttcctggaatcagtgtgaaatcagtcctgaattctataacagaagaagtcctcgatcatatgggtactttccgcagtatactggatcagctagactggatagtaaacaaatttaaagaagattcttctttagaactcttccttctcatccacaatttggatagccagatgttgagaggagagaagagccagcaaatcattggtcagttgtcatctttgcataacatttaccttatagcatccattgaccacctcaatgctcctctcatgtgggatcatgcaaagcagagtctttttaactggctctggtatgaaactactacatacagtccttatactgaagaaacctcctatgagaactctcttctggtaaagcagtctggatccctgccacttagctcccttactcatgtcttacgaagccttacccctaatgcaaggggaattttcaggctactaataaaataccagctggacaaccaggataacccttcttacattggcctttcttttcaagatttttaccagcagtgtcgggaggcattcctcgtcaatagtgatctgacactccgggcccagttaactgaatttagggaccacaagcttataagaacaaagaagggaactgatggagtagagtatttattaattcctgttgataatggaacattgactgatttcttggaaaaggaagaagaggaggcttgaagctttcctttattcttgaatctcccatggaagggttgtaccccagctgccactcctctagttgaaagtgttgtgtttacatctgacattaaattatttttccagcatacaagatttaaatttgggaagggggggatgtcctcaattagaactttttgatcagcctggctggtaccgtctagtactatgcagcggtcctcaagttggagaaaatgtgcctttcattcattacctctctggagacttcttgctggaatgaacagtgtgctcagggactatttggaactggatgtttttgaattattttatacttagagatattctgaattttttgagggccttttaacactccccgagctgattgtttgcaagtgtgtttgttccagagtgtggaagtataaagacatgggcatcacgtaaattggttttgtttgctattctgtgtgtcagaaccaacgagtgtaatggagagggcaggtcatctcttattgtttctaaaacaacttaaaaggtgtagattgggaagaggtgagtgatccagctttctccttttggattgaggctatgtacttggtgggggcaggggagggaatatattataatactattcagttgggataatgggaaaaacagagtatatagggtatctacccagcctagaaagcacaggaacaatacgtcatatatttggaacagttattgtctgtgccatgaccttcatgataccagtgagaagccaggctagagaaataaaatcctgaattacattttagtaattgttttcaagacaacaaaaaataaaacatttcattattcttgtatattgacatatttttcttttcttgaacaacatgcaggtgagtagcatattaatggctggctgtaaattaattttgattcctctgtcaagtagacctaaaactcactgtaagatatttcagttttttccttaaagtgatgatttcaaacctcctgaatatttgcgcgagacttttttcttaggaaagaaaaaaggctcaccttggctactgttgtcagcttacagtcatcacataccccctgaaatatttgacacttggaaatgaagttcttcctgaaaatatcactgcaataaaatacgtactacgtcaaaaaaaaaaaaaaaaacaaaaaaaaaaacttttttgggaccgctccccgccccatagaaaaaaggcttttccaaacacacaccgtgtgggggcgccgcgggcccagatgggtcactgtgaaccggggccacaccgtggtccccaagagaaacctgggcgcagagaaccacagtcgcctcgggattcctcccccatataaaaaagccgccgggggggaacacgcgcgcgtctcgtggacacacgtccagg

SEQ ID NO: 432301 - DNA, 3074 bp, Homo sapiens
ctggatgtcagggttgcagtgagctgagatcaccccactgcactctagcctggacaacagagccagaacttgtcttaaaaaacaaaacaaaacaaaaagctgctttctgtagggcctgacttcagtgctaatcatgtctattttatgagtaaatgacatatcttctcaaataaattacatacccctaagcaatcattattttatcctatactactttattttttaatacctaggcattgtgtatggtagaggaaataatcactgaaatatcactaaaaataataattgcagctggacatggtggttcacgtctgtgatcctagcactttgggaggccaagttgagtccaggagttcaagaccaacctgggcaacttagtgagaccccgtctctaccaaaaaaacaattagccaggcatggtggtgtgcgcctagttccaggtaatcgagaggctgaggtgggaggattgcttgagtccaggagttggaggctgcagtgagctatgattgtaccactgcactctagcctaggcaacagagtgagaccctctaaaaataataataataataattggatttcttttctttttagattcttctttagaactcttccttctcatccacaatttggatagccagatgttgagaggagagaagagccagcaaatcattggtcagttgtcatctttgcataacatttaccttatagcatccattgaccacctcaatgctcctctcatgtgggatcatgcaaagcagagtctttttaactggctctggtatgaaactactacatacagtccttatactgaagaaacctcctatgagaactctcttctggtaaagcagtctggatccctgccacttagctcccttactcatgtcttacgaagccttacccctaatgcaaggggaattttcaggctactaataaaataccagctggacaaccaggataacccttcttacattggtatccaatatttatgacattcaattgtgtaatttttgttttaccctgtacatttcctgtctctggaatttaatgacagcagtgcagtttttcacagcagtgagtaagtggtcactcatgatgggtatgtctgccacatagcaaattttcaagcagctctacagatccactgctgagcaaggtgtttgccaacacaaattgaaagacaaacccagcttacttttaaaattttctgtgctaactatggatgtgtatctgccaagtacatatttttcatattctaggcatcttaggagattttcttcccctttggcaaaaatgatttcaacaaacattttaataattgttctgctctcatgacttacttgttccttctttaaaagtcctatcaatacttgttcactgctctgggataacatgcaaatagcacttttattctgttcttttgtatgggtgtttgtatattgggtcatgtcttaagtgctgacttatgttcatatccttttgaacttgccaggcctttcttttcaagatttttaccagcagtgtcgggaggcattcctcgtcaatagtgatctgacactccgggcccagttaactgaatttagggaccacaagcttataagaacaaagaagggaactgatggagtagagtatttattaattcctgttgataatggaacattgactgatttcttggaaaaggaagaagaggaggcttgaagctttcctttattcttgaatctcccatggaagggttgtaccccagctgccactcctctagttgaaagtgttgtgtttacatctgacattaaattatttttccagcatacaagatttaaatttgggaagggggggatgtcctcaattagaactttttgatcagcctggctggtaccgtctagtactatgcagcggtcctcaagttggagaaaatgtgcctttcattcattacctctctggagacttcttgctggaatgaacagtgtgctcagggactatttggaactggatgtttttgaattattttatacttagagatattctgaattttttgagggccttttaacactccccgagctgattgtttgcaagtgtgtttgttccagagtgtggaagtataaagacatgggcatcacgtaaattggttttgtttgctattctgtgtgtcagaaccaacgagtgtaatggagagggcaggtcatctcttattgtttctaaaacaacttaaaaggtgtagattgggaagaggtgagtgatccagctttctccttttggattgaggctatgtacttggtgggggcaggggagggaatatattataatactattcagttgggataatgggaaaaacagagtatatagggtatctacccagcctagaaagcacaggaacaatacgtcatatatttggaacagttattgtctgtgccatgaccttcatgataccagtgagaagccaggctagagaaataaaatcctgaattacattttagtaattgttttcaagacaacaaaaaataaaacatttcattattcttgtatattgacatatttttcttttcttgaacaacatgcaggtgagtagcatattaatggctggctgtaaattaattttgattcctctgtcaagtagacctaaaactcactgtaagatatttcagttttttccttaaagtgatgatttcaaacctcctgaatatttgcgcgagacttttttcttaggaaagaaaaaaggctcaccttggctactgttgtcagcttacagtcatcacataccccctgaaatatttgacacttggaaatgaagttcttcctgaaaatatcactgcaataaaatacgtactacgtcaaaaaaaaaaaaaaaaacaaaaaaaaaaacttttttgggaccgctccccgccccatagaaaaaaggcttttccaaacacacaccgtgtgggggcgccgcgggcccagatgggtcactgtgaaccggggccacaccgtggtccccaagagaaacctgggcgcagagaaccacagtcgcctcgggattcctcccccatataaaaaagccgccgggggggaacacgcgcgcgtctcgtggacacacgtccagg

SEQ ID NO: 432302 - DNA, 1478 bp, Homo sapiens
aatataccacgagatccgcctacctacgagctccacggctctatttaaccccaagagccattgactgatttcttggaaaaggaagaagaggaggcttgaagctttcctttattcttgaatctcccatggaagggttgtaccccagctgccactcctctagttgaaagtgttgtgtttacatctgacattaaattatttttccagcatacaagatttaaatttgggaagggggggatgtcctcaattagaactttttgatcagcctggctggtaccgtctagtactatgcagcggtcctcaagttggagaaaatgtgcctttcattcattacctctctggagacttcttgctggaatgaacagtgtgctcagggactatttggaactggatgtttttgaattattttatacttagagatattctgaattttttgagggccttttaacactccccgagctgattgtttgcaagtgtgtttgttccagagtgtggaagtataaagacatgggcatcacgtaaattggttttgtttgctattctgtgtgtcagaaccaacgagtgtaatggagagggcaggtcatctcttattgtttctaaaacaacttaaaaggtgtagattgggaagaggtgagtgatccagctttctccttttggattgaggctatgtacttggtgggggcaggggagggaatatattataatactattcagttgggataatgggaaaaacagagtatatagggtatctacccagcctagaaagcacaggaacaatacgtcatatatttggaacagttattgtctgtgccatgaccttcatgataccagtgagaagccaggctagagaaataaaatcctgaattacattttagtaattgttttcaagacaacaaaaaataaaacatttcattattcttgtatattgacatatttttcttttcttgaacaacatgcaggtgagtagcatattaatggctggctgtaaattaattttgattcctctgtcaagtagacctaaaactcactgtaagatatttcagttttttccttaaagtgatgatttcaaacctcctgaatatttgcgcgagacttttttcttaggaaagaaaaaaggctcaccttggctactgttgtcagcttacagtcatcacataccccctgaaatatttgacacttggaaatgaagttcttcctgaaaatatcactgcaataaaatacgtactacgtcaaaaaaaaaaaaaaaaacaaaaaaaaaaacttttttgggaccgctccccgccccatagaaaaaaggcttttccaaacacacaccgtgtgggggcgccgcgggcccagatgggtcactgtgaaccggggccacaccgtggtccccaagagaaacctgggcgcagagaaccacagtcgcctcgggattcctcccccatataaaaaagccgccgggggggaacacgcgcgcgtctcgtggacacacgtccagg

SEQ ID NO: 432303 - DNA, 1412 bp, Homo sapiens
tgacaagcacgtcttttcaacaaaaaaaaaaaacaataaaactattatcgccgaattcgcacgaggggttgtaccccagctgccactcctctagttgaaagtgttgtgtttacatctgacattaaattatttttccagcatacaagatttaaatttgggaagggggggatgtcctcaattagaactttttgatcagcctggctggtaccgtctagtactatgcagcggtcctcaagttggagaaaatgtgcctttcattcattacctctctggagacttcttgctggaatgaacagtgtgctcagggactatttggaactggatgtttttgaattattttatacttagagatattctgaattttttgagggccttttaacactccccgagctgattgtttgcaagtgtgtttgttccagagtgtggaagtataaagacatgggcatcacgtaaattggttttgtttgctattctgtgtgtcagaaccaacgagtgtaatggagagggcaggtcatctcttattgtttctaaaacaacttaaaaggtgtagattgggaagaggtgagtgatccagctttctccttttggattgaggctatgtacttggtgggggcaggggagggaatatattataatactattcagttgggataatgggaaaaacagagtatatagggtatctacccagcctagaaagcacaggaacaatacgtcatatatttggaacagttattgtctgtgccatgaccttcatgataccagtgagaagccaggctagagaaataaaatcctgaattacattttagtaattgttttcaagacaacaaaaaataaaacatttcattattcttgtatattgacatatttttcttttcttgaacaacatgcaggtgagtagcatattaatggctggctgtaaattaattttgattcctctgtcaagtagacctaaaactcactgtaagatatttcagttttttccttaaagtgatgatttcaaacctcctgaatatttgcgcgagacttttttcttaggaaagaaaaaaggctcaccttggctactgttgtcagcttacagtcatcacataccccctgaaatatttgacacttggaaatgaagttcttcctgaaaatatcactgcaataaaatacgtactacgtcaaaaaaaaaaaaaaaaacaaaaaaaaaaacttttttgggaccgctccccgccccatagaaaaaaggcttttccaaacacacaccgtgtgggggcgccgcgggcccagatgggtcactgtgaaccggggccacaccgtggtccccaagagaaacctgggcgcagagaaccacagtcgcctcgggattcctcccccatataaaaaagccgccgggggggaacacgcgcgcgtctcgtggacacacgtccagg

SEQ ID NO: 432304 - DNA, 1713 bp, Homo sapiens
gaacagggcgggagattcggtgtgccgcacgcaggcttcccatcccccagctggcctccggtgctccttacctccccggtggtcgggcgcgaattactggaaattggcttttcccgttggggccgaaggtaccttccctgcggcggcgactcagcggggtgtcgttcggccggcgtgacgcagccggatcggcgccagacggaaacctagcggtgactgtatctgaattttgcagctgcagaatgtgtagtaccttaaaaggttggcaacaatgagtaaaccagaattaaaggaagacaagatgctggaggttcactttgtgggagatgatgatgttcttaatcacattctagatagagaaggaggagctaaattgaagaaggagcgagcgcagcttttggtcaaccccaaaaaaataataaagaagccagaatatgatttggaggaagatgaccaggaggtcttaaaagatcagaactatgtggaaattatgggaagagatgttcaagaatcattgaaaaatggctctgctacaggtggtggaaataaagtttattcttttcagaatagaaaacactctgaaaagatggctaaattagcttcagaactagcaaaaacaccacaaaaaagtgtttcattcagtttgaagaatgatcctgagattacgataaacgttcctcaaagtagcaagggccattctgcttcagacaaggttcaaccgaagaacaatgacaaaagtgaatttctgtcaacagcacctcgtagtctaagaaaaagattaatagttccaaggtctcattctgacagtgaaagcgaatattctgcttccaactcagaggatgatgaaggggttgcacaggaacatgaagaggacactaatgcagtcatattcagccaaaagattcaagctcagaatagagtagtttcagctcctgttggcaaagaaacaccttctaagagaatgaaaagagataaaacaagtgacttagtagaagaatattttgaagctcacagcagttcaaaagttttaacctctgatagaacactgcagaagctaaagagagctaaactggatcaggtatgttacaaggaatgttacttctaaattttttttactctgtcctgaaaaatatgctacgtaagcaacagatttgaaaagtatacacaagtagaattattgtcctgatcaaatgaaacacaagttaatgtgattattacttcttttattatataaatagtaaataggccgggcacacctggctcatacctgtaatctcagcaccttgggaggccaagggaggaggattatgtgaacacaggagtttgagaccagcctgggcaatatagggagacctcgttgttactaaaaatttaaataaataaataaataatttactggattagacagactgtaattatgcatttttcccctcttactcgtttattatttcttcaggatctatgataatcatcagggtcatagttccttgatatccatttaccatttatctctgttattcatttaacctatatgtattcactaaatctcacactggtcataaaacagcaactgcaacctgactttctctcagttaaaaactttgcacaaagtagaggatattctgcttgaggatattatggaaaacctgcccagtgtggtaaggtaacaagattactatgtaccatggttccagtagctcattttacaaaaaa

SEQ ID NO: 432305 - DNA, 209 bp, Homo sapiens
tagaaaggtttcgaaccactatgctgcaagattccattcacgttgtcatcaatggcttctttcctggaatcagtgtgaaatcagtaagtttcaaaaatgttaaagggaaaaacattatatcctctgccaattcaagcccccacataaatgaggatggagtattaaagaatttttgttttagccttcacggtagtaggattgtatagtgc

SEQ ID NO: 432306 - DNA, 280 bp, Homo sapiens
agatttttaccagcagtgtcgggaggcattcctcgtcaatagtgatctgacactccgggcccagttaactgaatttagggaccacaagcttataagaacaaagaaggtaagactccactattgtagcattgtatgccaggaatagtccgtatcatttacttaaggacacatatatgtttgacttagacctgattttgaaactgatgttccctgttgagtcacagagattcatttaggggatgtgccatttgagtttgtagaaagagccatggtagaagta

SEQ ID NO: 432307 - DNA, 660 bp, Homo sapiens
gatatgagacagatatttgaagctactaaggactgactactctgttcactttcagagtgacttagtagaagaatattttgaagctcacagcagttcaaaagttttaacctctgatagaacactgcagaagctaaagagagctaaactggatcaggtatgttacaaggaatgttacttctaaattttttttactctgtcctgaaaaatatgctacgtaagcaacagatttgaaaagtatacacaagtagaattattgtcctgatcaaatgaaacacaagttaatgtgattattacttcttttattatataaatagtaaataggccgggcacacctggctcatacctgtaatctcagcaccttgggaggccaagggaggaggattatgtgaacacaggagtttgagaccagcctgggcaatatagggagacctcgttgttactaaaaatttaaataaataaataaataatttactggattagacagactgtaattatgcatttttcccctcttactcgtttattatttcttcaggatctatgataatcatcagggtcatagttccttgatatccatttaccatttatctctgttattcatttaacctatatgtattcactaaatctcacactggtcataaaacagcaactgcaacctgactt

SEQ ID NO: 432308 - DNA, 392 bp, Homo sapiens
ttttttatacttaaaaagactttaaaaatattagataaagacatgtattcattatgtgaatgtttaatttggtggttgatatgaattcttcatcacttttgagtaacttactgtttttgtttaggttggcaacaatgagtaaaccagaattaaaggaagacaagatgctggaggttcactttgtgggagatgatgatgttcttaatcacattctagatagagaaggaggtattaagtgattgtacaatttgaagagatgcttattataatgtttatggattatttcacttttaaaacttttaacattttcttttgaaaatatagcgcaaaggattgatctggttagtaaaactaaataaaaactgctttaatttttagtttaaaatttcaaa

SEQ ID NO: 432309 - DNA, 1696 bp, Homo sapiens
gtccggcgcctggagaaggaagacgcgcgtccccggccgcggcgccgaagccggctgggggaccgcctggtcccgggccagagctgggaggcggtgttccgtgagccgcctggtctggggtgcggggggcgggaagcggccccttcgtgtgcgcttgggcgaggccgggcggcgcttctgtcctcctactcggacccgcaggtttctggtcctcataccgtgtggttgagtgaaatcaaaacttccacgatagcaatgctgattggacaaagaatgtgttgtggacacaaaaccaaactctggaggacagaggattcattccaagggtctgcttgtattcaatgactggtctacgtgggggtgtgaagtccccttactccacctgtgaagagtcttcccagtttcagaccaccctcccagcctcctgttattggctaaggccattttgtgactacactgcaggtagagatggattcctggaaatacctcctcaaggccagtgtagagccctcaatcacccactgcccccagcttctccttctcccatctcctgcaccaagcaggtctccaggtgttccagctgctgatgacgtaaagtgtggagttggtccaggaaggtcatgttccatgcagcagaggagcgctttgtgtgagaagttgaagacctgctgtaacacatcatagaggaaagacatagcctgggccttctgcaactggctgacttccaccttctcctgggggaatctgaagtcacttctgtcctttagacacaagaagggagagattctcctcatttggcccaaaagcaccaaggtgttcctgcctagcaggccatggttctgaggcaggttatatcctagagatccagaagagccacagctgcacacctctagggctgccagtagagggaagaggagggccattgagaaatcaggatgcttttggcctggttgagctgaggtcttcatagaaccttggatcctaggttctatgaagacattctatctatgcatggctttaatggagcacaaatagttttcatttttctgagcatttctctaaatttttaattccatttattgttttcatttacatgtcttctatatcagcatccacaaccttttggccaccagtttggtggaagataatttttccacgaaaaatggggtcagggagggaatgctttcagaggcattagattctcattaggagaccacaacctagatccttcgcatctgcacttcacaatagggttcctgctcttttgagaatccaatgccactgctgatctgacaggaggcagagctcaggcgttaatgcttgttggttggcctgcttgcctcctgctgtgcggccctgttcctaccaggccaggaccagtaccccggtccatggatgggggttgaaaaaccttgttctatatgacctaaaaggaggtcatcactctacactcttgatttttgcaatggatgttcaatattcccagtaaacttaagatatatcaatccaaatgaatattgatcaatcagatgagaaacatctttgtgctactgttagaagtatatacttttagcccagatcctagcctccagttttaccctccattttgcataggaaatcaggatccctgggccctatgggtttctgtattcagttaggaaattacctatctctggaaattaaactttttaggact

SEQ ID NO: 432310 - DNA, 2143 bp, Homo sapiens
gtccggcgcctggagaaggaagacgcgcgtccccggccgcggcgccgaagccggctgggggaccgcctggtcccgggccagagctgggaggcggtgttccgtgagccgcctggtctggggtgcggggggcgggaagcggccccttcgtgtgcgcttgggcgaggccgggcggcgcttctgtcctcctactcggacccgcaggtttctggtcctcataccgtgtggttgagtgaaatcaaaacttccacgatagcaatgctgattggacaaagaatgtgttgtggacacaaaaccaaactctggaggacagaggattcattccaagggtctgcttgtattcaatgactggtctacgtgggggtgtgaagtccccttactccacctgtgaagagtcttcccagtttcagaccaccctcccagcctcctgttattggctaaggccattttgtgactacactgcaggtagagatggattcctggaaatacctcctcaaggccagtgtagagccctcaatcacccactgcccccagcttctccttctcccatctcctgcaccaagcaggtctccaggtgttccagctgctgatgacgtaaagtgtggagttggtccaggaaggtcatgttccatgcagcagaggagcgctttgtgtgagaagttgaagacctgctgtaacacatcatagaggaaagacatagcctgggccttctgcaactggctgacttccaccttctcctgggggaatctgaagtcacttctgtcctttagacacaagaagggagagattctcctcatttggcccaaaagcaccaaggtgttcctgcctagcaggccatggttctgaggcaggttatatcctagagatccagaagagccacagctgcacacctctagggctgccagtagagggaagaggagggccattgagaaatcaggatgcttttggcctggttgagctgaggtcttcatagaaccttggatcctaggttctatgaagacattctatctatgcatggctttaatggagcacaaatagttttcatttttctgagcatttctctaaatttttaattccatttattgttttcatttacatgtcttctatatcagcatccacaaccttttggccaccagtttggtggaagataatttttccacgaaaaatggggtcagggagggaatgctttcagaggcattagattctcattaggagaccacaacctagatccttcgcatctgcacttcacaatagggttcctgctcttttgagaatccaatgccactgctgatctgacaggaggcagagctcaggcgttaatgcttgttggttggcctgcttgcctcctgctgtgcggccctgttcctaccaggccaggaccagtaccccggtccatggatgggggttgaaaaaccttgttctatatgacctaaaaggaggtcatcactctacactcttgatttttgcaatggatgttcaatattcccagtaaacttaagatatatcaatccaaatgaatattgatcaatcagatgagaaacatctttgtgctactgttagaagtatatacttttagcccagatcctagcctccagttttaccctccattttgcataggaaatcaggatccctgggccctatgggtttctgtattcagttaggaaattacctatctctggaaattaaactttttaggactatctttgtttgatatttgattcacagaagacgttgatggttattagtgaaagaacttctctggtgcttccctccttctagaatatattcattcaggttcatgtggttatgcttccctgggggctcaagcttagatcaatgaacattgccttttttgcattattttcttactggagaaatatagcactcctcaggctgcgccaatacccctaaaagaaattctgttggtttgtttttttttcttttttaagatgcatatgggtgtggaaattttaatcttaaaataatgttatttcctcagcagtgatgattcacaaggtatttatcacatcaagtcactccctaaatgcaggctcaccacatcctgatgactttagaactccttttccagggaggttcttgcttctttgttgccaaaacaataaatcctttgtgacctttgtccttg

SEQ ID NO: 432311 - DNA, 2162 bp, Homo sapiens
tgggaagagcttccagctgcaagtcagcctgagcgcgcaccagcgcagctgtggggcgcccgacgggtcgggcccgggcacaggcggtggcggcagcggcagtggcggcggcggtggcggcagcggtgggggcagcgcacgggatggcagcgcccttcggtgtggggagtgcggccgttgcttcacgcgccccgcgcacctcatccgccatcgcatgctgcacaccggcgagcggcccttcccctgcaccgagtgtgagaagcgcttcaccgaacgctccaagctcatcgaccactaccgaacgcacacgggcgtgcggcccttcacctgcaccgtctgcggcaaaagcttcatccgcaaggaccacctccgcaagcaccagcgcaaccatgcagcgggcgccaagaccccggcccgaggccagccactcccgacgccgcccgcacctcctgatcccttcaagagccccgcctccaaaggacctttggcctccacagaccttgtgaccgactggacttgtggcctcagcgtcctgggacccaccgatggcggggacatgtgagcgcctccagccccatagcccctgccggccgcacgtgtaaaaagccccgtgtgcaggcagcagggcggcgtggaagcttcaggcagacgcgggacggggagaaccaaatgtccaagttgctgaactgatgatcactggagaaagagaaactatccaccaggacagctgccacctctaaaccaagtagaattctctgtgaaatgggagcgccgtagaattttaagtaatttaattgcaaacctgttttgttttttgttttttgtttttttttaattcttgaggaaaaagctggaaaatagtaatagggctatttaaattttgtaggtacttttggttttcagggcgtgcatttctgtcactatctcactgagtctgatagtgtgttggaaggttggccagttggggacccctggcccactgactcctggggatggggtcctgtgtgtgcccctgctctgcccagttgggctgagtgggcctagcgcaccaagcccctgggcagtgagggccattgggtcccttggagcacacctcagtgcagcaggaaggacccctccgggagtagcggttgcatttcccagcttgcctctcctgaaaaggccccccaaaagtgctggccccaacttttctctattttgggccatctgtggtacccgtcccaagggcacttggtggtgtcccctagtgtgtgactccctggcctcataaggacgagttgtctgaaatcccagcgttaggtctggggagatggagaagctgaaactggggagctgcaccacaaacgtctagctctcagcagagctgggagcaaagcctggccgcccaccccaacctggggctgcctcccactccgtgagatgcttctgtctcctgttcactttgtgtggtagtttcttattttcaaaatgcatctcatttgatcattactgtgaccttgggaagcagcaggacagggatttctttttagaggtgcaaactgctcagaggggacacacctcagcctctcactgtgggtacacgtggcgtgccatgagtggggaagagcaacaggcgagatgcctcattctactggaacatcactgtgggtgaacagagatttccaggttttccctcttaaaatatttgtcccacaccgacaagagtccagtcaccaggcctcaaaggaacttctgcttgtagcagccgcctcccctgtgccccagcctccttaatgtgtgcactctcagagggcacagctcgcgaggctgggtttgggggccaagtggcttgttcattccagcatctaacatcataaaggtgggcccagatttcttgattcgaccacagtgctgttcctaccacacaaatatccattcctgttttgttgaagcagccactggtcctcttgtttcccctgcagacggagggacctggcagtgcccattcattcagccccctcatgcatacttttattaggcgatagactagttaagaaaattgtttctatgtactgtatattttgtacctgtttacacttctaatattgatataactgatattttgaaaaataagagaaaacatcctgttaaaataaaacctaaccagcaccaaaaaaaaaagt

SEQ ID NO: 432312 - DNA, 1040 bp, Homo sapiens
caataaaatatttaagagtttatttgagcagtgatccagaagtggctagggagctccccagagagaacatgaggaggaggctttttaggacaaatagataaaagcaaagataatatttcattggttacagttatacagttacacagttatacagttgccttatttggtctatcccatgaggaagtcctagttactaattacgtttttgttggctgcttctgattggttgagcttaagttctgtgtttctttaacataggcatttacaagaaataccacaaataaagtttcagacatgcttgcaaatcaagcaaggttaaggtcacttaggaggcccaactggctctgtctgctcaaggattcttctggcctcgtctccattttacatgaactgttgcataaataaacacagagtacctgaaacaacggaggtgatcattctgcctaccgagtgttggccaggccaagcttggagtgttgctcttattcttagggagtttatttttaagtaatctcatctgtaaatgggattacaatccacaaactgaccttgtatatgattccattccttctcccagcccagccccacactccaaggttttccctttgcttataaggggtagtcacccttttttatttcgaccttccaaacattctgggagttttcctcctttaggccaactacagcgcagaggagcgctttctcctgctgggtttctccgactggccttccctgcagccggtcctcttcgcccttgtcctcctgtgctacctcctgaccttgacgggcaactcggcgctggtgctgctggcggtgcgcgacccgcgcctgcacacgcccatgtactacttcctctgccacctggccttggtagacgcgggcttcactactagcgtggtgccgccgctgctggccaacctgcgcggaccagcgctctggctgccgcgcagccactgcacggcccagctgtgcgcatcgctggctctgggttccgccgaatgcgtcctcctggcggtgatggctctggaccgcgcggccgc

SEQ ID NO: 432313 - DNA, 1672 bp, Homo sapiens
gcagtctcagccgacactgcgcgcgcctccaggcaccggcgttagcgggtcgccgacccgcaatccccgccgcggctgcttgcctaccggagtgtgcgccggcacctgccgccggagacatgttgcaaaaaccgaggaaccggggccgctctggcggccaggccgagagggacagagactggagccatagcggaaaccccggggcttcgcgggccggggaagacgcccgggttctcagagacggctttgccgaggaggccccgagcacgtcccgcgggccgggcggctcgcaggggtcgcagggcccctcgcctcagggcgcccgccgggcccaggccgcccccgccgtggggcccaggagccagaagcagctggagctgaaagtgtccgagctggtgcagttcttgctgattaaagaccagaagaagattccgatcaagcgggccgacatactgaagcacgtcatcggggactacaaggacatcttccccgacctcttcaaacgggccgccgagcgcctccagtacgtcttcgggtataagctggtggaacttgaacccaagagcaacacttacatcctcatcaacaccctggagcctgtggaggaggatgccgagatgaggggtgaccaaggcacgcccactacgggcctcctgatgatcgtcttagggctcatctttatgaagggcaacaccatcaaggaaactgaagcctgggactttctgcggcgcttaggggtctaccccaccaagaagcatttaattttcggagatccaaagaaactcattactgaggactttgtgcgacagcgtttacctggaataccggcggataccccacaccgaccccgtcgactacgaattccagtggggcccgcgaaccaacctggaaaccagcaagatgaaagttcttaagtttgtggccaaggtccataatcaagaccccaaggactggccagcgcagtactgtgaggctttggcagatgaggagaacagggccagacctcagcctagtggcccagctccatcctcttgaaaggtggattcagagggacccccgggacaagggtctgagacccaaaggcacagtttagaggattgggggaagggagaacgaacccagggagcatattgctgtaaacgcttcaatgtgtgtagctttaggatgtgtttgcaaagttttgtttttttaatgttgtgttattttgctccagattttcatctataaacaaaggagcatttgttttgattttactctttttggtataaaaaattttgctagcttagtaaaacgaattggaaaacttgactatgatctggaacagataatgcaagaaggaacacataagtaagttgctttggtgccaagaaaataaaaaagctattatcaggtctcctaactaccccagtttgtaaggaaaaataaaagtttttataaaattaaaaaaaataattgcctatatccttattatgttaacctattttatttttctatatttcgtacatatataagtattattcatggttccaagcaatgagtgtaatgtattttctcccaatagtaattgtttatattcataattattcagctctgctgctaaacacgtagttccacttcgtttttttcttcttgctactgtagttattacaataaatactgtatttttgaagca

SEQ ID NO: 432314 - DNA, 1947 bp, Homo sapiens
  misc_feature (1702)..(1702): n is a, c, g, or t
gcagtctcagccgacactgcgcgcgcctccaggcaccggcgttagcgggtcgccgacccgcaatccccgccgcggctgcttgcctaccggagtgtgcgccggcacctgccgccggagacatgttgcaaaaaccgaggaaccggggccgctctggcggccaggccgagagggacagagactggagccatagcggaaaccccggggcttcgcgggccggggaagacgcccgggttctcagagacggctttgccgaggaggccccgagcacgtcccgcgggccgggcggctcgcaggggtcgcagggcccctcgcctcagggcgcccgccgggcccaggccgcccccgccgtggggcccaggagccagaagcagctggagctgaaagtgtccgagctggtgcagttcttgctgattaaagaccagaagaagattccgatcaagcgggccgacatactgaagcacgtcatcggggactacaaggacatcttccccgacctcttcaaacgggccgccgagcgcctccagtacgtcttcgggtataagctggtggaacttgaacccaagagcaacacttacatcctcatcaacaccctggagcctgtggaggaggatgccgagatgaggggtgaccaaggcacgcccactacgggcctcctgatgatcgtcttagggctcatctttatgaagggcaacaccatcaaggaaactgaagcctgggactttctgcggcgcttaggggtctaccccaccaagaagcatttaattttcggagatccaaagaaactcattactgaggactttgtgcgacagcgtttacctggaataccggcggataccccacaccgaccccgtcgactacgaattccagtggggcccgcgaaccaacctggaaaccagcaagatgaaagttcttaagtttgtggccaaggtccataatcaagaccccaaggactggccagcgcagtactgtgaggctttggcagatgaggagaacagggccagacctcagcctagtggcccagctccatcctcttgaaaggtggattcagagggacccccgggacaagggtctgagacccaaaggcacagtttagaggattgggggaagggagaacgaacccagggagcatattgctgtaaacgcttcaatgtgtgtagctttaggatgtgtttgcaaagttttgtttttttaatgttgtgttattttgctccagattttcatctataaacaaaggagcatttgttttgattttactctttttggtataaaaaattttgctagcttagtaaaacgaattggaaaacttgactatgatctggaacagataatgcaagaaggaacacataagtaagttgctttggtgccaagaaaataaaaaagctattatcaggtctcctaactaccccagtttgtaaggaaaaataaaagtttttataaaattaaaaaaaataattgcctatatccttattatgttaacctattttatttttctatatttcgtacatatataagtattattcatggttccaagcaatgagtgtaatgtattttctcccaatagtaattgtttatattcataattattcagctctgctgctaaacacgtagttccacttcgtttttttcttcttgctactgtagttattacaataaatactgtatttttgaagcaaaaaaaaaaaaaaaaaaaaaaaaaaaaaanaaaacacaaaaaccacaaccaacaacacacaaaaccacaaaaacagagaccaaaaaaaccaaagagaaagagaggcgccgaaaaaacccgagggggcaaagaacacacccgaagagaagcacaaaagacgaaaacaaccacgcgccgcaacacgagcgggaaaccaccgccacggacacacggggcaacaaacaaacagaaacgcgcgcaaagagacggaaacacacgcacacacgctaaaacag

SEQ ID NO: 432315 - DNA, 2022 bp, Homo sapiens
  misc_feature (1702)..(1702): n is a, c, g, or t
gcagtctcagccgacactgcgcgcgcctccaggcaccggcgttagcgggtcgccgacccgcaatccccgccgcggctgcttgcctaccggagtgtgcgccggcacctgccgccggagacatgttgcaaaaaccgaggaaccggggccgctctggcggccaggccgagagggacagagactggagccatagcggaaaccccggggcttcgcgggccggggaagacgcccgggttctcagagacggctttgccgaggaggccccgagcacgtcccgcgggccgggcggctcgcaggggtcgcagggcccctcgcctcagggcgcccgccgggcccaggccgcccccgccgtggggcccaggagccagaagcagctggagctgaaagtgtccgagctggtgcagttcttgctgattaaagaccagaagaagattccgatcaagcgggccgacatactgaagcacgtcatcggggactacaaggacatcttccccgacctcttcaaacgggccgccgagcgcctccagtacgtcttcgggtataagctggtggaacttgaacccaagagcaacacttacatcctcatcaacaccctggagcctgtggaggaggatgccgagatgaggggtgaccaaggcacgcccactacgggcctcctgatgatcgtcttagggctcatctttatgaagggcaacaccatcaaggaaactgaagcctgggactttctgcggcgcttaggggtctaccccaccaagaagcatttaattttcggagatccaaagaaactcattactgaggactttgtgcgacagcgtttacctggaataccggcggataccccacaccgaccccgtcgactacgaattccagtggggcccgcgaaccaacctggaaaccagcaagatgaaagttcttaagtttgtggccaaggtccataatcaagaccccaaggactggccagcgcagtactgtgaggctttggcagatgaggagaacagggccagacctcagcctagtggcccagctccatcctcttgaaaggtggattcagagggacccccgggacaagggtctgagacccaaaggcacagtttagaggattgggggaagggagaacgaacccagggagcatattgctgtaaacgcttcaatgtgtgtagctttaggatgtgtttgcaaagttttgtttttttaatgttgtgttattttgctccagattttcatctataaacaaaggagcatttgttttgattttactctttttggtataaaaaattttgctagcttagtaaaacgaattggaaaacttgactatgatctggaacagataatgcaagaaggaacacataagtaagttgctttggtgccaagaaaataaaaaagctattatcaggtctcctaactaccccagtttgtaaggaaaaataaaagtttttataaaattaaaaaaaataattgcctatatccttattatgttaacctattttatttttctatatttcgtacatatataagtattattcatggttccaagcaatgagtgtaatgtattttctcccaatagtaattgtttatattcataattattcagctctgctgctaaacacgtagttccacttcgtttttttcttcttgctactgtagttattacaataaatactgtatttttgaagcaaaaaaaaaaaaaaaaaaaaaaaaaaaaaanaaaaaagggggggggggcaaaaatttcccccggggggccccatttagggttccccgttttttgtggcacaggcgggggcccctattaggagggcggatataaaaggaagggcggggccgggtgtttaaccaccgctctgcgctgcggagacctggcctcccggggcctcctttgggagaggagccccttcccctggggggggcccttatttggggcccacttccctagagaattaagcgctaggggacacttcaccttccacggctatctcgggtacccaggggattgctggcgtgaagtcgtcctgattgttggaagta

SEQ ID NO: 432316 - DNA, 1592 bp, Homo sapiens
gcagtctcagccgacactgcgcgcgcctccaggcaccggcgttagcgggtcgccgacccgcaatccccgccgcggctgcttgcctaccggagtgtgcgccggcacctgccgccggagacatgttgcaaaaaccgaggaaccggggccgctctggcggccaggccgagagggacagagactggagccatagcggaaaccccggggcttcgcgggccggggaagacgcccgggttctcagagacggctttgccgaggaggccccgagcacgtcccgcgggccgggcggctcgcaggggtcgcagggcccctcgcctcagggcgcccgccgggcccaggccgcccccgccgtggggcccaggagccagaagcagctggagctgaaagtgtccgagctggtgcagttcttgctgattaaagaccagaagaagattccgatcaagcgggccgacatactgaagcacgtcatcggggactacaaggacatcttccccgacctcttcaaacgggccgccgagcgcctccagtacgtcttcgggtataagctggtggaacttgaacccaagagcaacacttacatcctcatcaacaccctggagcctgtggaggaggatgccgagatgaggggtgaccaaggcacgcccactacgggcctcctgatgatcgtcttagggctcatctttatgaagggcaacaccatcaaggaaactgaagcctgggactttctgcggcgcttaggggtctaccccaccaagaagcatttaattttcggagatccaaagaaactcattactgaggactttgtgcgacagcgtttacctggaataccggcggataccccacaccgaccccgtcgactacgaattccagtggggcccgcgaaccaacctggaaaccagcaagatgaaagttcttaagtttgtggccaaggtccataatcaagaccccaaggactggccagcgcagtactgtgaggctttggcagatgaggagaacagggccagacctcagcctagtggcccagctccatcctcttgaaaggtggattcagagggacccccgggacaagggtctgagacccaaaggcacagtttagaggattgggggaagggagaacgaacccagggagcatattgctgtaaacgcttcaatgtgtgtagctttaggatgtgtttgcaaagttttgtttttttaatgttgtgttattttgctccagattttcatctattgactatgatctggaacagataatgcaagaaggaacacataagtaagttgctttggtgccaagaaaataaaaaagctattatcaggtctcctaactaccccagtttgtaaggaaaaataaaagtttttataaaattaaaaaaaataattgcctatatccttattatgttaacctattttatttttctatatttcgtacatatataagtattattcatggttccaagcaatgagtgtaatgtattttctcccaatagtaattgtttatattcataattattcagctctgctgctaaacacgtagttccacttcgtttttttcttcttgctactgtagttattacaataaatactgtatttttgaagca

SEQ ID NO: 432317 - DNA, 14756 bp, Homo sapiens
ctgggcggccgggcgcggggagagggcgcgggagcggctcgtgcggcaggtaccatgcggacgcgcgagcccggcgaggccccggcaggcccgtccctgctcgggggcgcgctgagacggcgggtgagctccacgagagcgccgtcgccacttcgggccaactttgcgattcccgacagttaagcaatggggagacatttggctttgctcctgcttctgctccttctcttccaacattttggagacagtgatggcagccaacgacttgaacagactcctctgcagtttacacacctcgagtacaacgtcaccgtgcaggagaactctgcagctaagacttatgtggggcatcctgtcaagatgggtgtttacattacacatccagcgtgggaagtaaggtacaaaattgtttccggagacagtgaaaacctgttcaaagctgaagagtacattctcggagacttttgctttctaagaataaggaccaaaggaggaaatacagctattcttaatagagaagtgaaggatcactacacattgatagtgaaagcacttgaaaaaaatactaatgtggaggcgcgaacaaaggtcagggtgcaggtgctggatacaaatgacttgagaccgttattctcacccacctcatacagcgtttctttacctgaaaacacagctataaggaccagtatcgcaagagtcagcgccacggatgcagacataggaaccaacggggaattttactacagttttaaagatcgaacagatatgtttgctattcacccaaccagtggtgtgatagtgttaactggtagacttgattacctagagaccaagctctatgagatggaaatcctcgctgcggaccgtggcatgaagttgtatgggagcagtggcatcagcagcatggccaagctaacggtgcacatcgaacaggccaatgaatgtgctccggtgataacagcagtgacattgtcaccatcagaactggacagggacccagcatatgcaattgtgacagtggatgactgcgatcagggtgccaatggtgacatagcatctttaagcatcgtggcaggtgaccttctccagcagtttagaacagtgaggtcctttccagggagtaaggagtataaagtcaaagccatcggtgacattgattgggacagtcatcctttcggctacaatctcacactacaggctaaagataaaggaactccgccccagttctcttctgttaaagtcattcacgtgacttctccacagttcaaagccgggccagtcaagtttgaaaaggatgtttacagagcagaaataagtgaatttgctcctcccaacacacctgtggtcatggtaaaggccattcctgcttattcccatttgaggtatgtttttaaaaggacacctggaaaagctaaattcagtttaaattacaacactggtctcatttctattttagaaccagttaaaagacagcaggcagcccattttgaacttgaagtaacaacaagtgacagaaaagcgtccaccaaggtcttggtgaaagtcttaggtgcaaatagcaatccccctgaatttacccagacagcgtacaaagctgcttttgatgagaacgtgcccattggtactactatcatgagcctgagtgccgtagaccctgatgagggtgagaatgggtacgtgacatacagtatcgcaaatttaaatcatgtgccgtttgcgattgaccatttcactggtgccgtgagtacgtcagaaaacctggactacgaactgatgcctcgggtttatactctgaggattcgtgcatcagactggggcttgccgtaccgccgggaagtcgaagtccttgctacaattactctcaataacttgaatgacaacacacctttgtttgagaaaataaattgtgaagggacaattcccagagatctaggcgtgggagagcaaataaccactgtttctgctattgatgcagatgaacttcagttggtacagtatcagattgaagctggaaatgaactggatttgtttagtttaaaccccaactcgggggtattgtcattaaagcgatcgctaatggatggcttaggtgcaaaggtgtctttccacagtctgagaatcacagctacagatggagaaaattttgccacaccattatatatcaacataacagtggctgccagtcacaagctggtaaacttgcagtgtgaagagactggtgttgccaaaatgctggcagagaagctcctgcaggcaaataaattacacaaccagggagaggtggaggatattttcttcgattctcactctgtcaatgctcacataccgcagtttagaagcactcttccgactggtattcaggtaaaggaaaaccagcctgtgggttccagtgtaattttcatgaactccactgaccttgacactggcttcaatggaaaactggtctatgctgtttctggaggaaatgaggatagttgcttcatgattgatatggaaacaggaatgctgaaaattttatctcctcttgaccgtgaaacaacagacaaatacaccctgaatattaccgtctatgaccttgggataccccagaaggctgcgtggcgtcttctacatgtcgtggttgtcgatgccaatgataatccacccgagtttttacaggagagctattttgtggaagtgagtgaagacaaggaggtacatagtgaaatcatgcaggttgaagccacagataaagacctggggcccaacggacacgtgacgtactcaattcttacagacacagacacattttcaattgacagcgtgacgggtgttgttaacatcgcacgccctctggatcgagagctgcagcatgagcactccttaaagattgaggccagggaccaagccagagaagagcctcagctgttctccactgtcgttgtgaacagtatcactagaagatgttaatgacaacccacctacatttattccacctaattatcgtgtgaaagtccgagaggatcttccagaaggaaccgtcatcatgtggttagaagcccacgatcctgatttaggtcagtctggtcaggtgagatacagccttctggaccacggagaaggaaacttcgatgtggataaactcagtggagcagttaggatcgtccagcagttggactttgagaagaagcaagtgtataatctcactgtgagggccaaagacaagggaaagccagtttctctgtcttctacttgctatgttgaagttgaggtggttgatgtgaatgagaacctgcacccacccgtgttttccagctttgtggaaaaggggacagtgaaagaagatgcacctgttggttcattggtaatgacggtgtcggctcatgatgaggacgccggaagagatggggagatccgatactccattagagatggctctggcgttggtgttttcaaaataggtgaagagacaggtgtcatagagacgtcagatcgactggaccgtgaatcgacctcccattattggctaacagtctttgcaaccgatcagggtgtcgtgcctctttcatcgttcatagagatctacatagaggttgaggatgtcaatgacaatgcaccacagacatcagagcctgtttattacccagaaatcatggaaaattctcctaaagatgtatctgtggtccagatcgaggcatttgatccagattcgagctctaatgacaagctcatgtacaaaattacaagtggaaatccacaaggattcttttcaatacatcctaaaacaggtctcatcacaactacgtcaaggaagctagaccgagaacagcaagatgaacacatattagaggttactgtgacagacaatggtagtccccccaaatcaaccattgcaagagtcattgtgaaaatccttgatgaaaatgacaacaaacctcagtttctgcaaaagttctacaaaatcagactccctgagcgggaaaagccagaccgagaaagaaatgccagacgggagccgctctatcgcgtcatagccaccgacaaggatgagggccccaatgcagaaatctcctacagcatcgaagacgggaatgagcatggcaaatttttcatcgaaccgaaaactggagtggtttcgtccaagaggttttcagcagctggagaatatgatattctttcaattaaggcagttgacaatggtcgccctcaaaagtcatcaaccaccagactccatattgaatggatctccaagcccaaacagtccctggagcccatttcatttgaagaatcattttttacctttactgtgatggaaagtgaccccgttgctcacatgattggagtaatatctgtggagcctcctggcatacccctttggtttgacatcactggtggcaactacgacagtcacttcgatgtggacaagggaactggaaccatcattgttgccaaacctcttgatgcagaacagaagtcaaactacaacctcacagtcgaggctacagatggaaccaccactatcctcactcaggtattcatcaaagtaatagacacaaatgaccatcgtcctcagttttctacatcaaagtatgaagttgttattcctgaagatacagcgccagaaacagaaattttgcaaatcagtgctgtggatcaggatgagaaaaacaaactaatctacactctgcagagcagtagagatccactgagtctcaagaaatttcgtcttgatcctgcaaccggctctctctatacttctgagaaactggatcatgaagctgtttcaccagcacacctcacggtcatggtacgagatcaagatgtgcctgtaaaacgcaactttgcaaggattgtggtcaatgtcagcgacacgaatgaccacgccccgtggttcaccgcttcctcctacaaagggcgggtttatgaatcggcagccgttggctcagttgtgttgcaggtgacggctctggacaaggacaaagggaaaaatgctgaagtgctgtactcgatcgagtcaggaaatattggaaatattggaaattcttttatgattgatcctgtcttgggctctattaaaactgccaaagaattagatcgaagtaaccaagcggagtatgatttaatggtaaaagctacagataagggcagtccaccaatgagtgaaataacttctgtgcgtatctttgtcacaattgctgacaacgcctctccgaagtttacatcaaaagaatattctgttgaacttagtgaaactgtcagcattgggagtttcgttgggatggttacagcccatagtcaatcatcagtggtgtatgaaataaaagatggaaatacaggtgatgcttttgatattaatccacattctggaactatcatcactcagaaagccctggactttgaaactttgcccatttacacattgataatacaaggaactaacatggctggtttgtccactaatacaacggttctagttcacttgcaggatgagaatgacaacgcgccagtttttatgcaggcagaatatacaggactcattagtgaatcagcctcaattaacagcgtggtcctaacagacaggaatgtcccactggtgattcgagcagctgatgctgataaagactcaaatgctttgcttgtatatcacattgttgaaccatctgtacacacatattttgctattgattctagcactggtgctattcatacagtactaagtctggactatgaagaaacaagtatttttcactttaccgtccaagtgcatgacatgggaaccccacgtttatttgctgagtatgcagcgaatgtaacagtacatgtaattgacattaatgactgcccccctgtgtttgccaagccattatatgaagcatctcttttgttaccaacatacaaaggagtaaaagtcatcacagtaaatgctacagatgctgattcaagtgcattctcacagttgatttactccatcaccgaaggcaacatcggggagaagttttctatggactacaagactggtgctctcactgtccaaaacacaactcagttaagaagccgctacgagctaaccgttagagcttccgatggcagatttgccggccttacctctgtcaaaattaatgtgaaagaaagcaaagaaagtcacctaaagtttacccaggatgtctactctgcggtagtgaaagagaattccaccgaggccgaaacattagctgtcattactgctattgggagtccaatcaatgagcctttgttttatcacatcctcaacccagatcgcagatttaaaataagccgcacttcaggggttctgtcaaccactggcacgcccttcgatcgtgagcagcaggaggcgtttgatgtggttgtagaagtgatagaggaacataagccttctgcagtggcccacgttgtcgtgaaggtcattgtagaagaccaaaatgataatgcgccggtgtttgtcaaccttccctactacgccgttgttaaagtggacactgaggtgggccatgtcattcgctatgtcactgctgtagacagagacagtggcagaaacggggaagtgcattactacctcaaggaacatcatgaacactttcaaattggacccttgggtgaaatttcactgaaaaagcaatttgagcttgacaccttaaataaagaatatcttgttacagtggttgcaaaagatggagggaacccggccttttcagcggaagttatcgttccgatcactgtcatgaataaagccatgcctgtgtttgaaaaacctttctacagtgcagagattgcagagagcatccaggtgcacagccctgtggtccacgtgcaggctaacagcccggaaggcctgaaagtgttctacagcatcacagacggagaccctttcagccagttcactattaacttcaatactggagttatcaatgtcatagctcctctggactttgaggcccacccggcatataagctgagcatacgcgcaactgactccttgacgggcgctcatgctgaagtatttgtggacatcatagtagacgacatcaatgataaccctcctgtgtttgctcagcagtcttatgcggtgaccctgtctgaggcatctgtaattggaacgtctgttgttcaagttagagccaccgattctgattcagaaccaaatagaggaatctcataccagatgtttgggaatcacagcaagagtcatgatcattttcatgtagacagcagcactggcctcatctcactactcagaaccctggattacgagcagtcccggcagcacacgatttttgtgagggcagttgatggtggtatgcccacgctgagcagtgatgtgattgtcacggtggacgttaccgacctcaatggtaatccaccactctttgaacaacagatttatgaagccagaattagcgagcacgcccctcatgggcatttcgtgacctgtgtaaaagcctatgatgcagacagttcagacatagacaagttgcagtattccattctgtctggcaatgatcataaacattttgtcattgacagtgcaacagggattatcaccctctcaaacctgcaccggcacgccctgaagccattttacagtcttaacctgtcagtgtctgatggagtttttagaagttccacccaggttcatgtaactgtaattggaggcaatttgcacagtcctgctttccttcagaacgaatatgaagtggaactagctgaaaacgctcccctacataccctggtgatggaggtgaaaactacggatggggattctggtatttatggtcacgttacttaccatattgtaaatgactttgccaaagacagattttacataaatgagagaggacagatatttactttggaaaaacttgatcgagaaaccccggcggagaaagtgatctcagtccgtttaatggctaaggatgctggaggaaaagttgctttctgcaccgtgaatgtcatccttacagatgacaatgacaatgcaccacaatttcgagcaaccaaatacgaagtgaatatcgggtccagtgctgctaaagggacttcagtcgtaaagtctgcaagtgatgccgatgagggctccaatgccgacatcacctatgccattgaagcagactctgaaagtgtaaaagagaatttggaaattaacaaactgtccggcgtaatcactacaaaggagagcctcattggcttggaaaatgaattcttcactttctttgttagagctgtggataatgggtctccatcaaaagaatctgttgttcttgtctatgttaaaatccttccaccggaaatgcagcttccaaaattttcagaacctttctatacctttacagtgtcagaggacgtgcctgttggaacagagatagatctcatccgagcagaacatagtgggactgttctttacagcctggtcaaagggaatactccagaaagcaatagggatgagtcctttgtgattgacagacagagcgggagactgaagttggagaagagtcttgatcatgagacaactaagtggtatcagttttccatactggccaggtgcactcaagatgaccatgagatggtggcttctgtagatgttagtatccaagtgaaagatgcaaatgacaacagcccggtctttgaatctagtccatatgaggcattcattgttgaaaacctgccagggggaagtagagtaattcagatcagggcatctgatgctgactcaggaaccaacggccaagttatgtatagcctggatcagtcacaaagtgtggaagtcattgaatcctttgccattaacatggaaacaggctggattacaactttaaaggaacttgaccatgaaaagagagacaattaccagattaaagtggttgcatcagatcatggtgaaaagatccagctatcctccacagccattgtggatgttaccgtcaccgatgtcaacgatagtccaccacgattcacggccgagatctataaagggactgtgagtgaggatgacccccaaggtggggtgattgccatcttaagtaccacggatgctgattctgaagagatcaacagacaagttacatatttcataacaggaggggatcctttaggacagtttgccgttgaaactatacagaatgaatggaaggtatatgtgaagaaacctctagacagggaaaaaagggacaattaccttcttactatcacggcaactgatggcaccttctcatcaaaagcgatagttgaagtgaaagttctggatgcaaatgacaacagtccagtttgtgaaaagactttatattcagacactattcctgaagacgtccttcctggaaaattgatcatgcagatctctgctacagacgcagacatccgctctaacgctgaaattacttacacgttattgggttcaggtgcagaaaaattcaaactaaatccagacacaggtgaactgaaaacgtcaaccccccttgatcgtgaggagcaagctgtttatcatcttctcgtcagggccacagatggaggaggaagattctgccaagccagtattgtgctcacgctagaagatgtgaacgataacgcccccgaattctctgccgatccttatgccatcaccgtgtttgaaaacacagagccgggaacgctgctgacaagagtgcaggccacagatgccgacgcaggattaaatcggaagattttatactcactgattgactctgctgatgggcagttctccattaacgaattatctggaattattcagttagaaaaacctttggacagagaactccaggcagtatacaccctctctttgaaagctgtggatcaaggcttgccaaggaggctgactgccactggcactgtgattgtatcagttcttgacataaatgacaacccccctgtgtttgagtaccgtgaatatggtgccaccgtgtctgaggacattcttgttggaactgaagttcttcaagtgtatgcagcaagtcgggatattgaagcaaatgcagaaatcacctactcaataataagtggaaatgaacatgggaaattcagcatagattctaaaacaggggccgtatttatcattgagaatctggattatgagagctctcatgagtattacctaacagtagaggccactgatggaggcacgccttcactgagcgacgttgccactgtgaacgttaatgtaacagatatcaacgataatacccctgtgttcagccaagacacctacacgacagtcatcagtgaagatgccgttcttgagcagtctgtcatcacggttatggccgatgatgccgatggaccttccaacagccacatccactactcaattatagatggcaaccaaggaagctcgttcacaattgaccccgtcaggggagaagtcaaagtgaccaaacttctcgaccgagaaacgatttcaggttacacgctcacggttcaagcttctgataatggcagtccacccagagtcaacacgacgaccgtgaacatcgatgtgtccgatgtcaatgacaacgcgcccgtcttctccaggggaaactacagtgtcattatccaggaaaataagccagtgggcttcagcgtgctgcagctggtagtaacagatgaggattcttcccataacggtccacccttcttctttactattgtaactggaaatgatgagaaggcttttgaagttaacccgcaaggagtcctcctgacatcatctgccatcaagaggaaggagaaagatcattacttactgcaggtgaaggtggcagataatggaaagcctcagttgtcatctttgacatacattgacattagggtaattgaggagagcatctatccgcctgcgattttgcccctggagattttcatcacctcttctggagaagaatactcaggtggcgtcattgggaagatccatgccacagaccaggacgtgtatgatactctaacctacagtctcgaccctcagatggacaacctgttctctgtttccagcacagggggcaagctgatagcacacaaaaagctagacatagggcaataccttctcaatgtcagcgtaacagatgggaagttcacgacggtggccgacatcacagtgcatatcagacaagtcacacaggagatgttgaaccacaccatcgcgatccgctttgccaacctcactccggaagaattcgttggtgactactggcgcaacttccagcgagctttacggaacatcctgggtgtgaggaggaacgacatacagattgttagtttgcagtcctctgaacctcacccacatctggacgtcttactttttgtagagaaaccaggtagtgctcagatctcaacaaaacaacttctgcacaagattaactcttccgtgactgacattgaggaaatcattggagttaggatactgaatgtattccagaaactctgcgcgggactggactgcccctggaagttctgcgatgaaaaggtgtctgtggatgaaagtgtgatgtcaacacacagcacagccagactgagttttgtgactccccgccaccacagggcagcggtgtgtctctgcaaagagggaaggtgcccacctgtccaccatggctgtgaagatgatccgtgccctgagggatccgaatgtgtgtctgatccctgggaggagaaacacacctgtgtctgtcccagcggcaggtttggtcagtgcccagggagttcatctatgacactgactggaaacagctacgtgaaataccgtctgacggaaaatgaaaacaaattagagatgaaactgaccatgaggctcagaacatattccacgcatgcggttgtcatgtatgctcgaggaactgactatagcatcttggagattcatcatggaaggctgcagtacaagtttgactgtggaagtggccctggaattgtctctgttcagagcattcaggtcaatgatgggcagtggcacgcagtggccctggaagtgaatggaaactatgctcgcttggttctagaccaagttcatactgcatcgggcacagccccagggactctgaaaaccctgaacctggataactatgtgttttttggtggccacatccgtcagcagggaacaaggcatggaagaagtcctcaagttggtaatggtttcaggggttgtatggactccatttatttgaatgggcaggagctccctttaaacagcaaacccagaagctatgcacacatcgaagagtcggtggatgtatctccaggctgcttcctgacggccacggaagactgcgccagcaacccttgccagaatggaggcgtttgcaatccgtcacctgctggaggttattactgcaaatgcagtgccttgtacatagggacccactgtgagataagcgtcaatccgtgttcctccaacccatgcctctatgggggcacgtgtgttgtcgacaacggaggctttgtttgccagtgtagaggattatatactggtcagaggtgtcagcttagtccatactgcaaagatgaaccctgtaagaatggcggaacatgctttgacagtttggatggcgccgtttgtcagtgtgattcgggttttaggggagaaaggtgtcagagtgatatcgacgagtgctctggaaacccttgcctgcacggggccctctgtgagaacacgcacggctcctatcactgcaactgcagccacgagtacaggggacgtcactgcgaggatgctgcgcccaaccagtatgtgtccacgccgtggaacattgggttggcggaaggaattggaatcgttgtgtttgttgcagggatatttttactggtggtggtgtttgttctctgccgtaagatgattagtcggaaaaagaagcatcaggctgaacctaaagacaagcacctgggacccgctacggctttcttgcaaagaccgtattttgattccaagctaaataagaacatttactcagacataccaccccaggtgcctgtccggcctatttcctacaccccgagtattccaagtgactcaagaaacaatctggaccgaaattccttcgaaggatctgctatcccagagcatcccgaattcagcacttttaaccccgagtctgtgcacgggcaccgaaaagcagtggcggtctgcagcgtggcgccaaacctgcctcccccacccccttcaaactccccttctgacagcgactccatccagaagcctagctgggactttgactatgacacaaaagtggtggatcttgatccctgtctttccaagaagcctctagaggaaaagccttcccagccatacagtgcccgggaaagcctgtctgaagtgcagtccctgagctccttccagtccgaatcgtgcgatgacaatgggtatcactgggatacatcagattggatgccaagcgttcctctgccggacatacaagagttccccaactatgaggtgattgatgagcagacacccctgtactcagcagatccaaacgccatcgatacggactattaccctggaggctacgacatcgaaagtgattttcctccacccccagaagacttccccgcagctgatgagctaccaccgttaccgcccgaattcagcaatcagtttgaatccatccaccctcctagagacatgcctgccgcgggtagcttgggttcttcatcaagaaaccggcagaggttcaacttgaatcagtatttgcccaatttttatcccctcgatatgtctgaacctcaaacaaaaggcactggtgagaatagtacttgtagagaaccccatgccccttacccgccagggtatcaaagacacttcgaggcgcccgctgtcgagagcatgcccatgtctgtgtacgcctccaccgcctcctgctctgacgtgtcagcctgctgcgaagtggagtccgaggtcatgatgagtgactatgagagcggggacgacggccacttcgaagaggtgacgatcccgcccctggattcccagcagcacacggaagtctgactctcaactccccccaaagtgcctgactttagtgaacctagaggtgatgtgagtaatccgcgctgttctttgcagcagtgcttccaagctttttttggtgagccgaatgggcatggctgcgctggatcctgcgcctctggacgtgctagccatttccagtgtcccaactactgtcatcgtgaggttttcatcggctgtgccatttcccaacgtcttttgggatttacatctgtctgtgttaaaataatcaaacgaaaaatcagtcctgtgttgtcagcatgattcatgtatttatatagatttgattattttaattttcctgtctcttttttttgtaaattttatgtacagatttgatttttcatagttttaactagatttccaagatattttgtgcatttgtttcaactgaattttggtggtggtcagtgccattatctagcaccctgattttttttttttactataaccagggtttcattctgtctttttccactgaagtgtgacattttgttagtacatttcagtgtagtcattcatttctagctgtacataggatgaaggagagatcagatacatgaacatgtcttacatgggttgctgtatttagaattataaacatttttcattattggaaagtgtaacggggaccttctgcatacctgtttagaaccaaaaccaccatgacacagtttttatagtgtctgtatatttgtgatgcaatggtcttgtaaaggtttttaatgaaaactaccattagccagtctttcttactgacaataaattattaataaaa

SEQ ID NO: 432318 - DNA, 795 bp, Homo sapiens
ccgaaggaggagggcgggcgtttcacccgcgccacagctgcggccggccagagagaccgcagaggccgggacccccgcagcctccacggccgctgctgccactgtcggggtggcgcgcccagccggagaatcccgtccgcgcccggggcggggggcgaggcggggcgctgacgtcacctcccctcccccaccgcctccaagggggagggagtggggaaagaggcagcgagtcgccgcagccggcggccgcaactcctcaactcggcggctggctgcctgggcacgtcctgacaaacttggctgctcccgggccctcgttccggccccgcgcactctcttttcgcctgcgtttggtgcttaagtttgccctggtcggaagcctccggagatgcggccgcctgggtcccggcggcacggacgttggcactctggttagggacatgctgaagatcccggggaggcaaagttggtacttcaaacccggctcttaacacatatctacaccgcgaggggatcacggagctgccgaggactttagagcccagggccgaggactcggctagactggtgagttctttgttcaaatcgtgcatgccttttggcatttaagtttaaacgttaatgaaattacgtggggtgtgtggctctaagcgagtgcggggaagcgtgtgcgccctacgggttctcggctccaggagctgcgcatccctctggctttgtgcggatcggcgatgaaagattcgtatgcatagctttgggagttcataaaatacatatagagcactgttaaaaaga

SEQ ID NO: 432319 - DNA, 15155 bp, Homo sapiens
ccgaaggaggagggcgggcgtttcacccgcgccacagctgcggccggccagagagaccgcagaggccgggacccccgcagcctccacggccgctgctgccactgtcggggtggcgcgcccagccggagaatcccgtccgcgcccggggcggggggcgaggcggggcgctgacgtcacctcccctcccccaccgcctccaagggggagggagtggggaaagaggcagcgagtcgccgcagccggcggccgcaactcctcaactcggcggctggctgcctgggcacgtcctgacaaacttggctgctcccgggccctcgttccggccccgcgcactctcttttcgcctgcgtttggtgcttaagtttgccctggtcggaagcctccggagatgcggccgcctgggtcccggcggcacggacgttggcactctggttagggacatgctgaagatcccggggaggcaaagttggtacttcaaacccggctcttaacacatatctacaccgcgaggggatcacggagctgccgaggactttagagcccagggccgaggactcggctagactgattcccgacagttaagcaatggggagacatttggctttgctcctgcttctgctccttctcttccaacattttggagacagtgatggcagccaacgacttgaacagactcctctgcagtttacacacctcgagtacaacgtcaccgtgcaggagaactctgcagctaagacttatgtggggcatcctgtcaagatgggtgtttacattacacatccagcgtgggaagtaaggtacaaaattgtttccggagacagtgaaaacctgttcaaagctgaagagtacattctcggagacttttgctttctaagaataaggaccaaaggaggaaatacagctattcttaatagagaagtgaaggatcactacacattgatagtgaaagcacttgaaaaaaatactaatgtggaggcgcgaacaaaggtcagggtgcaggtgctggatacaaatgacttgagaccgttattctcacccacctcatacagcgtttctttacctgaaaacacagctataaggaccagtatcgcaagagtcagcgccacggatgcagacataggaaccaacggggaattttactacagttttaaagatcgaacagatatgtttgctattcacccaaccagtggtgtgatagtgttaactggtagacttgattacctagagaccaagctctatgagatggaaatcctcgctgcggaccgtggcatgaagttgtatgggagcagtggcatcagcagcatggccaagctaacggtgcacatcgaacaggccaatgaatgtgctccggtgataacagcagtgacattgtcaccatcagaactggacagggacccagcatatgcaattgtgacagtggatgactgcgatcagggtgccaatggtgacatagcatctttaagcatcgtggcaggtgaccttctccagcagtttagaacagtgaggtcctttccagggagtaaggagtataaagtcaaagccatcggtgacattgattgggacagtcatcctttcggctacaatctcacactacaggctaaagataaaggaactccgccccagttctcttctgttaaagtcattcacgtgacttctccacagttcaaagccgggccagtcaagtttgaaaaggatgtttacagagcagaaataagtgaatttgctcctcccaacacacctgtggtcatggtaaaggccattcctgcttattcccatttgaggtatgtttttaaaaggacacctggaaaagctaaattcagtttaaattacaacactggtctcatttctattttagaaccagttaaaagacagcaggcagcccattttgaacttgaagtaacaacaagtgacagaaaagcgtccaccaaggtcttggtgaaagtcttaggtgcaaatagcaatccccctgaatttacccagacagcgtacaaagctgcttttgatgagaacgtgcccattggtactactatcatgagcctgagtgccgtagaccctgatgagggtgagaatgggtacgtgacatacagtatcgcaaatttaaatcatgtgccgtttgcgattgaccatttcactggtgccgtgagtacgtcagaaaacctggactacgaactgatgcctcgggtttatactctgaggattcgtgcatcagactggggcttgccgtaccgccgggaagtcgaagtccttgctacaattactctcaataacttgaatgacaacacacctttgtttgagaaaataaattgtgaagggacaattcccagagatctaggcgtgggagagcaaataaccactgtttctgctattgatgcagatgaacttcagttggtacagtatcagattgaagctggaaatgaactggatttgtttagtttaaaccccaactcgggggtattgtcattaaagcgatcgctaatggatggcttaggtgcaaaggtgtctttccacagtctgagaatcacagctacagatggagaaaattttgccacaccattatatatcaacataacagtggctgccagtcacaagctggtaaacttgcagtgtgaagagactggtgttgccaaaatgctggcagagaagctcctgcaggcaaataaattacacaaccagggagaggtggaggatattttcttcgattctcactctgtcaatgctcacataccgcagtttagaagcactcttccgactggtattcaggtaaaggaaaaccagcctgtgggttccagtgtaattttcatgaactccactgaccttgacactggcttcaatggaaaactggtctatgctgtttctggaggaaatgaggatagttgcttcatgattgatatggaaacaggaatgctgaaaattttatctcctcttgaccgtgaaacaacagacaaatacaccctgaatattaccgtctatgaccttgggataccccagaaggctgcgtggcgtcttctacatgtcgtggttgtcgatgccaatgataatccacccgagtttttacaggagagctattttgtggaagtgagtgaagacaaggaggtacatagtgaaatcatgcaggttgaagccacagataaagacctggggcccaacggacacgtgacgtactcaattcttacagacacagacacattttcaattgacagcgtgacgggtgttgttaacatcgcacgccctctggatcgagagctgcagcatgagcactccttaaagattgaggccagggaccaagccagagaagagcctcagctgttctccactgtcgttgtgaacagtatcactagaagatgttaatgacaacccacctacatttattccacctaattatcgtgtgaaagtccgagaggatcttccagaaggaaccgtcatcatgtggttagaagcccacgatcctgatttaggtcagtctggtcaggtgagatacagccttctggaccacggagaaggaaacttcgatgtggataaactcagtggagcagttaggatcgtccagcagttggactttgagaagaagcaagtgtataatctcactgtgagggccaaagacaagggaaagccagtttctctgtcttctacttgctatgttgaagttgaggtggttgatgtgaatgagaacctgcacccacccgtgttttccagctttgtggaaaaggggacagtgaaagaagatgcacctgttggttcattggtaatgacggtgtcggctcatgatgaggacgccggaagagatggggagatccgatactccattagagatggctctggcgttggtgttttcaaaataggtgaagagacaggtgtcatagagacgtcagatcgactggaccgtgaatcgacctcccattattggctaacagtctttgcaaccgatcagggtgtcgtgcctctttcatcgttcatagagatctacatagaggttgaggatgtcaatgacaatgcaccacagacatcagagcctgtttattacccagaaatcatggaaaattctcctaaagatgtatctgtggtccagatcgaggcatttgatccagattcgagctctaatgacaagctcatgtacaaaattacaagtggaaatccacaaggattcttttcaatacatcctaaaacaggtctcatcacaactacgtcaaggaagctagaccgagaacagcaagatgaacacatattagaggttactgtgacagacaatggtagtccccccaaatcaaccattgcaagagtcattgtgaaaatccttgatgaaaatgacaacaaacctcagtttctgcaaaagttctacaaaatcagactccctgagcgggaaaagccagaccgagaaagaaatgccagacgggagccgctctatcgcgtcatagccaccgacaaggatgagggccccaatgcagaaatctcctacagcatcgaagacgggaatgagcatggcaaatttttcatcgaaccgaaaactggagtggtttcgtccaagaggttttcagcagctggagaatatgatattctttcaattaaggcagttgacaatggtcgccctcaaaagtcatcaaccaccagactccatattgaatggatctccaagcccaaacagtccctggagcccatttcatttgaagaatcattttttacctttactgtgatggaaagtgaccccgttgctcacatgattggagtaatatctgtggagcctcctggcatacccctttggtttgacatcactggtggcaactacgacagtcacttcgatgtggacaagggaactggaaccatcattgttgccaaacctcttgatgcagaacagaagtcaaactacaacctcacagtcgaggctacagatggaaccaccactatcctcactcaggtattcatcaaagtaatagacacaaatgaccatcgtcctcagttttctacatcaaagtatgaagttgttattcctgaagatacagcgccagaaacagaaattttgcaaatcagtgctgtggatcaggatgagaaaaacaaactaatctacactctgcagagcagtagagatccactgagtctcaagaaatttcgtcttgatcctgcaaccggctctctctatacttctgagaaactggatcatgaagctgtttcaccagcacacctcacggtcatggtacgagatcaagatgtgcctgtaaaacgcaactttgcaaggattgtggtcaatgtcagcgacacgaatgaccacgccccgtggttcaccgcttcctcctacaaagggcgggtttatgaatcggcagccgttggctcagttgtgttgcaggtgacggctctggacaaggacaaagggaaaaatgctgaagtgctgtactcgatcgagtcaggaaatattggaaatattggaaattcttttatgattgatcctgtcttgggctctattaaaactgccaaagaattagatcgaagtaaccaagcggagtatgatttaatggtaaaagctacagataagggcagtccaccaatgagtgaaataacttctgtgcgtatctttgtcacaattgctgacaacgcctctccgaagtttacatcaaaagaatattctgttgaacttagtgaaactgtcagcattgggagtttcgttgggatggttacagcccatagtcaatcatcagtggtgtatgaaataaaagatggaaatacaggtgatgcttttgatattaatccacattctggaactatcatcactcagaaagccctggactttgaaactttgcccatttacacattgataatacaaggaactaacatggctggtttgtccactaatacaacggttctagttcacttgcaggatgagaatgacaacgcgccagtttttatgcaggcagaatatacaggactcattagtgaatcagcctcaattaacagcgtggtcctaacagacaggaatgtcccactggtgattcgagcagctgatgctgataaagactcaaatgctttgcttgtatatcacattgttgaaccatctgtacacacatattttgctattgattctagcactggtgctattcatacagtactaagtctggactatgaagaaacaagtatttttcactttaccgtccaagtgcatgacatgggaaccccacgtttatttgctgagtatgcagcgaatgtaacagtacatgtaattgacattaatgactgcccccctgtgtttgccaagccattatatgaagcatctcttttgttaccaacatacaaaggagtaaaagtcatcacagtaaatgctacagatgctgattcaagtgcattctcacagttgatttactccatcaccgaaggcaacatcggggagaagttttctatggactacaagactggtgctctcactgtccaaaacacaactcagttaagaagccgctacgagctaaccgttagagcttccgatggcagatttgccggccttacctctgtcaaaattaatgtgaaagaaagcaaagaaagtcacctaaagtttacccaggatgtctactctgcggtagtgaaagagaattccaccgaggccgaaacattagctgtcattactgctattgggagtccaatcaatgagcctttgttttatcacatcctcaacccagatcgcagatttaaaataagccgcacttcaggggttctgtcaaccactggcacgcccttcgatcgtgagcagcaggaggcgtttgatgtggttgtagaagtgatagaggaacataagccttctgcagtggcccacgttgtcgtgaaggtcattgtagaagaccaaaatgataatgcgccggtgtttgtcaaccttccctactacgccgttgttaaagtggacactgaggtgggccatgtcattcgctatgtcactgctgtagacagagacagtggcagaaacggggaagtgcattactacctcaaggaacatcatgaacactttcaaattggacccttgggtgaaatttcactgaaaaagcaatttgagcttgacaccttaaataaagaatatcttgttacagtggttgcaaaagatggagggaacccggccttttcagcggaagttatcgttccgatcactgtcatgaataaagccatgcctgtgtttgaaaaacctttctacagtgcagagattgcagagagcatccaggtgcacagccctgtggtccacgtgcaggctaacagcccggaaggcctgaaagtgttctacagcatcacagacggagaccctttcagccagttcactattaacttcaatactggagttatcaatgtcatagctcctctggactttgaggcccacccggcatataagctgagcatacgcgcaactgactccttgacgggcgctcatgctgaagtatttgtggacatcatagtagacgacatcaatgataaccctcctgtgtttgctcagcagtcttatgcggtgaccctgtctgaggcatctgtaattggaacgtctgttgttcaagttagagccaccgattctgattcagaaccaaatagaggaatctcataccagatgtttgggaatcacagcaagagtcatgatcattttcatgtagacagcagcactggcctcatctcactactcagaaccctggattacgagcagtcccggcagcacacgatttttgtgagggcagttgatggtggtatgcccacgctgagcagtgatgtgattgtcacggtggacgttaccgacctcaatggtaatccaccactctttgaacaacagatttatgaagccagaattagcgagcacgcccctcatgggcatttcgtgacctgtgtaaaagcctatgatgcagacagttcagacatagacaagttgcagtattccattctgtctggcaatgatcataaacattttgtcattgacagtgcaacagggattatcaccctctcaaacctgcaccggcacgccctgaagccattttacagtcttaacctgtcagtgtctgatggagtttttagaagttccacccaggttcatgtaactgtaattggaggcaatttgcacagtcctgctttccttcagaacgaatatgaagtggaactagctgaaaacgctcccctacataccctggtgatggaggtgaaaactacggatggggattctggtatttatggtcacgttacttaccatattgtaaatgactttgccaaagacagattttacataaatgagagaggacagatatttactttggaaaaacttgatcgagaaaccccggcggagaaagtgatctcagtccgtttaatggctaaggatgctggaggaaaagttgctttctgcaccgtgaatgtcatccttacagatgacaatgacaatgcaccacaatttcgagcaaccaaatacgaagtgaatatcgggtccagtgctgctaaagggacttcagtcgtaaagtctgcaagtgatgccgatgagggctccaatgccgacatcacctatgccattgaagcagactctgaaagtgtaaaagagaatttggaaattaacaaactgtccggcgtaatcactacaaaggagagcctcattggcttggaaaatgaattcttcactttctttgttagagctgtggataatgggtctccatcaaaagaatctgttgttcttgtctatgttaaaatccttccaccggaaatgcagcttccaaaattttcagaacctttctatacctttacagtgtcagaggacgtgcctgttggaacagagatagatctcatccgagcagaacatagtgggactgttctttacagcctggtcaaagggaatactccagaaagcaatagggatgagtcctttgtgattgacagacagagcgggagactgaagttggagaagagtcttgatcatgagacaactaagtggtatcagttttccatactggccaggtgcactcaagatgaccatgagatggtggcttctgtagatgttagtatccaagtgaaagatgcaaatgacaacagcccggtctttgaatctagtccatatgaggcattcattgttgaaaacctgccagggggaagtagagtaattcagatcagggcatctgatgctgactcaggaaccaacggccaagttatgtatagcctggatcagtcacaaagtgtggaagtcattgaatcctttgccattaacatggaaacaggctggattacaactttaaaggaacttgaccatgaaaagagagacaattaccagattaaagtggttgcatcagatcatggtgaaaagatccagctatcctccacagccattgtggatgttaccgtcaccgatgtcaacgatagtccaccacgattcacggccgagatctataaagggactgtgagtgaggatgacccccaaggtggggtgattgccatcttaagtaccacggatgctgattctgaagagatcaacagacaagttacatatttcataacaggaggggatcctttaggacagtttgccgttgaaactatacagaatgaatggaaggtatatgtgaagaaacctctagacagggaaaaaagggacaattaccttcttactatcacggcaactgatggcaccttctcatcaaaagcgatagttgaagtgaaagttctggatgcaaatgacaacagtccagtttgtgaaaagactttatattcagacactattcctgaagacgtccttcctggaaaattgatcatgcagatctctgctacagacgcagacatccgctctaacgctgaaattacttacacgttattgggttcaggtgcagaaaaattcaaactaaatccagacacaggtgaactgaaaacgtcaaccccccttgatcgtgaggagcaagctgtttatcatcttctcgtcagggccacagatggaggaggaagattctgccaagccagtattgtgctcacgctagaagatgtgaacgataacgcccccgaattctctgccgatccttatgccatcaccgtgtttgaaaacacagagccgggaacgctgctgacaagagtgcaggccacagatgccgacgcaggattaaatcggaagattttatactcactgattgactctgctgatgggcagttctccattaacgaattatctggaattattcagttagaaaaacctttggacagagaactccaggcagtatacaccctctctttgaaagctgtggatcaaggcttgccaaggaggctgactgccactggcactgtgattgtatcagttcttgacataaatgacaacccccctgtgtttgagtaccgtgaatatggtgccaccgtgtctgaggacattcttgttggaactgaagttcttcaagtgtatgcagcaagtcgggatattgaagcaaatgcagaaatcacctactcaataataagtggaaatgaacatgggaaattcagcatagattctaaaacaggggccgtatttatcattgagaatctggattatgagagctctcatgagtattacctaacagtagaggccactgatggaggcacgccttcactgagcgacgttgccactgtgaacgttaatgtaacagatatcaacgataatacccctgtgttcagccaagacacctacacgacagtcatcagtgaagatgccgttcttgagcagtctgtcatcacggttatggccgatgatgccgatggaccttccaacagccacatccactactcaattatagatggcaaccaaggaagctcgttcacaattgaccccgtcaggggagaagtcaaagtgaccaaacttctcgaccgagaaacgatttcaggttacacgctcacggttcaagcttctgataatggcagtccacccagagtcaacacgacgaccgtgaacatcgatgtgtccgatgtcaatgacaacgcgcccgtcttctccaggggaaactacagtgtcattatccaggaaaataagccagtgggcttcagcgtgctgcagctggtagtaacagatgaggattcttcccataacggtccacccttcttctttactattgtaactggaaatgatgagaaggcttttgaagttaacccgcaaggagtcctcctgacatcatctgccatcaagaggaaggagaaagatcattacttactgcaggtgaaggtggcagataatggaaagcctcagttgtcatctttgacatacattgacattagggtaattgaggagagcatctatccgcctgcgattttgcccctggagattttcatcacctcttctggagaagaatactcaggtggcgtcattgggaagatccatgccacagaccaggacgtgtatgatactctaacctacagtctcgaccctcagatggacaacctgttctctgtttccagcacagggggcaagctgatagcacacaaaaagctagacatagggcaataccttctcaatgtcagcgtaacagatgggaagttcacgacggtggccgacatcacagtgcatatcagacaagtcacacaggagatgttgaaccacaccatcgcgatccgctttgccaacctcactccggaagaattcgttggtgactactggcgcaacttccagcgagctttacggaacatcctgggtgtgaggaggaacgacatacagattgttagtttgcagtcctctgaacctcacccacatctggacgtcttactttttgtagagaaaccaggtagtgctcagatctcaacaaaacaacttctgcacaagattaactcttccgtgactgacattgaggaaatcattggagttaggatactgaatgtattccagaaactctgcgcgggactggactgcccctggaagttctgcgatgaaaaggtgtctgtggatgaaagtgtgatgtcaacacacagcacagccagactgagttttgtgactccccgccaccacagggcagcggtgtgtctctgcaaagagggaaggtgcccacctgtccaccatggctgtgaagatgatccgtgccctgagggatccgaatgtgtgtctgatccctgggaggagaaacacacctgtgtctgtcccagcggcaggtttggtcagtgcccagggagttcatctatgacactgactggaaacagctacgtgaaataccgtctgacggaaaatgaaaacaaattagagatgaaactgaccatgaggctcagaacatattccacgcatgcggttgtcatgtatgctcgaggaactgactatagcatcttggagattcatcatggaaggctgcagtacaagtttgactgtggaagtggccctggaattgtctctgttcagagcattcaggtcaatgatgggcagtggcacgcagtggccctggaagtgaatggaaactatgctcgcttggttctagaccaagttcatactgcatcgggcacagccccagggactctgaaaaccctgaacctggataactatgtgttttttggtggccacatccgtcagcagggaacaaggcatggaagaagtcctcaagttggtaatggtttcaggggttgtatggactccatttatttgaatgggcaggagctccctttaaacagcaaacccagaagctatgcacacatcgaagagtcggtggatgtatctccaggctgcttcctgacggccacggaagactgcgccagcaacccttgccagaatggaggcgtttgcaatccgtcacctgctggaggttattactgcaaatgcagtgccttgtacatagggacccactgtgagataagcgtcaatccgtgttcctccaacccatgcctctatgggggcacgtgtgttgtcgacaacggaggctttgtttgccagtgtagaggattatatactggtcagaggtgtcagcttagtccatactgcaaagatgaaccctgtaagaatggcggaacatgctttgacagtttggatggcgccgtttgtcagtgtgattcgggttttaggggagaaaggtgtcagagtgatatcgacgagtgctctggaaacccttgcctgcacggggccctctgtgagaacacgcacggctcctatcactgcaactgcagccacgagtacaggggacgtcactgcgaggatgctgcgcccaaccagtatgtgtccacgccgtggaacattgggttggcggaaggaattggaatcgttgtgtttgttgcagggatatttttactggtggtggtgtttgttctctgccgtaagatgattagtcggaaaaagaagcatcaggctgaacctaaagacaagcacctgggacccgctacggctttcttgcaaagaccgtattttgattccaagctaaataagaacatttactcagacataccaccccaggtgcctgtccggcctatttcctacaccccgagtattccaagtgactcaagaaacaatctggaccgaaattccttcgaaggatctgctatcccagagcatcccgaattcagcacttttaaccccgagtctgtgcacgggcaccgaaaagcagtggcggtctgcagcgtggcgccaaacctgcctcccccacccccttcaaactccccttctgacagcgactccatccagaagcctagctgggactttgactatgacacaaaagtggtggatcttgatccctgtctttccaagaagcctctagaggaaaagccttcccagccatacagtgcccgggaaagcctgtctgaagtgcagtccctgagctccttccagtccgaatcgtgcgatgacaatgggtatcactgggatacatcagattggatgccaagcgttcctctgccggacatacaagagttccccaactatgaggtgattgatgagcagacacccctgtactcagcagatccaaacgccatcgatacggactattaccctggaggctacgacatcgaaagtgattttcctccacccccagaagacttccccgcagctgatgagctaccaccgttaccgcccgaattcagcaatcagtttgaatccatccaccctcctagagacatgcctgccgcgggtagcttgggttcttcatcaagaaaccggcagaggttcaacttgaatcagtatttgcccaatttttatcccctcgatatgtctgaacctcaaacaaaaggcactggtgagaatagtacttgtagagaaccccatgccccttacccgccagggtatcaaagacacttcgaggcgcccgctgtcgagagcatgcccatgtctgtgtacgcctccaccgcctcctgctctgacgtgtcagcctgctgcgaagtggagtccgaggtcatgatgagtgactatgagagcggggacgacggccacttcgaagaggtgacgatcccgcccctggattcccagcagcacacggaagtctgactctcaactccccccaaagtgcctgactttagtgaacctagaggtgatgtgagtaatccgcgctgttctttgcagcagtgcttccaagctttttttggtgagccgaatgggcatggctgcgctggatcctgcgcctctggacgtgctagccatttccagtgtcccaactactgtcatcgtgaggttttcatcggctgtgccatttcccaacgtcttttgggatttacatctgtctgtgttaaaataatcaaacgaaaaatcagtcctgtgttgtcagcatgattcatgtatttatatagatttgattattttaattttcctgtctcttttttttgtaaattttatgtacagatttgatttttcatagttttaactagatttccaagatattttgtgcatttgtttcaactgaattttggtggtggtcagtgccattatctagcaccctgattttttttttttactataaccagggtttcattctgtctttttccactgaagtgtgacattttgttagtacatttcagtgtagtcattcatttctagctgtacataggatgaaggagagatcagatacatgaacatgtcttacatgggttgctgtatttagaattataaacatttttcattattggaaagtgtaacggggaccttctgcatacctgtttagaaccaaaaccaccatgacacagtttttatagtgtctgtatatttgtgatgcaatggtcttgtaaaggtttttaatgaaaactaccattagccagtctttcttactgacaataaattattaataaaa

SEQ ID NO: 432320 - DNA, 12253 bp, Homo sapiens
agaatgtgtaacaacgacagaatgtgtaacaacgaccagacaaatacaccctgaatattaccgtctatgaccttgggataccccagaaggctgcgtggcgtcttctacatgtcgtggttgtcgatgccaatgataatccacccgagtttttacaggagagctattttgtggaagtgagtgaagacaaggaggtacatagtgaaatcatgcaggttgaagccacagataaagacctggggcccaacggacacgtgacgtactcaattcttacagacacagacacattttcaattgacagcgtgacgggtgttgttaacatcgcacgccctctggatcgagagctgcagcatgagcactccttaaagattgaggccagggaccaagccagagaagagcctcagctgttctccactgtcgttgtgaacagtatcactagaagatgttaatgacaacccacctacatttattccacctaattatcgtgtgaaagtccgagaggatcttccagaaggaaccgtcatcatgtggttagaagcccacgatcctgatttaggtcagtctggtcaggtgagatacagccttctggaccacggagaaggaaacttcgatgtggataaactcagtggagcagttaggatcgtccagcagttggactttgagaagaagcaagtgtataatctcactgtgagggccaaagacaagggaaagccagtttctctgtcttctacttgctatgttgaagttgaggtggttgatgtgaatgagaacctgcacccacccgtgttttccagctttgtggaaaaggggacagtgaaagaagatgcacctgttggttcattggtaatgacggtgtcggctcatgatgaggacgccggaagagatggggagatccgatactccattagagatggctctggcgttggtgttttcaaaataggtgaagagacaggtgtcatagagacgtcagatcgactggaccgtgaatcgacctcccattattggctaacagtctttgcaaccgatcagggtgtcgtgcctctttcatcgttcatagagatctacatagaggttgaggatgtcaatgacaatgcaccacagacatcagagcctgtttattacccagaaatcatggaaaattctcctaaagatgtatctgtggtccagatcgaggcatttgatccagattcgagctctaatgacaagctcatgtacaaaattacaagtggaaatccacaaggattcttttcaatacatcctaaaacaggtctcatcacaactacgtcaaggaagctagaccgagaacagcaagatgaacacatattagaggttactgtgacagacaatggtagtccccccaaatcaaccattgcaagagtcattgtgaaaatccttgatgaaaatgacaacaaacctcagtttctgcaaaagttctacaaaatcagactccctgagcgggaaaagccagaccgagaaagaaatgccagacgggagccgctctatcgcgtcatagccaccgacaaggatgagggccccaatgcagaaatctcctacagcatcgaagacgggaatgagcatggcaaatttttcatcgaaccgaaaactggagtggtttcgtccaagaggttttcagcagctggagaatatgatattctttcaattaaggcagttgacaatggtcgccctcaaaagtcatcaaccaccagactccatattgaatggatctccaagcccaaacagtccctggagcccatttcatttgaagaatcattttttacctttactgtgatggaaagtgaccccgttgctcacatgattggagtaatatctgtggagcctcctggcatacccctttggtttgacatcactggtggcaactacgacagtcacttcgatgtggacaagggaactggaaccatcattgttgccaaacctcttgatgcagaacagaagtcaaactacaacctcacagtcgaggctacagatggaaccaccactatcctcactcaggtattcatcaaagtaatagacacaaatgaccatcgtcctcagttttctacatcaaagtatgaagttgttattcctgaagatacagcgccagaaacagaaattttgcaaatcagtgctgtggatcaggatgagaaaaacaaactaatctacactctgcagagcagtagagatccactgagtctcaagaaatttcgtcttgatcctgcaaccggctctctctatacttctgagaaactggatcatgaagctgtttcaccagcacacctcacggtcatggtacgagatcaagatgtgcctgtaaaacgcaactttgcaaggattgtggtcaatgtcagcgacacgaatgaccacgccccgtggttcaccgcttcctcctacaaagggcgggtttatgaatcggcagccgttggctcagttgtgttgcaggtgacggctctggacaaggacaaagggaaaaatgctgaagtgctgtactcgatcgagtcaggaaatattggaaatattggaaattcttttatgattgatcctgtcttgggctctattaaaactgccaaagaattagatcgaagtaaccaagcggagtatgatttaatggtaaaagctacagataagggcagtccaccaatgagtgaaataacttctgtgcgtatctttgtcacaattgctgacaacgcctctccgaagtttacatcaaaagaatattctgttgaacttagtgaaactgtcagcattgggagtttcgttgggatggttacagcccatagtcaatcatcagtggtgtatgaaataaaagatggaaatacaggtgatgcttttgatattaatccacattctggaactatcatcactcagaaagccctggactttgaaactttgcccatttacacattgataatacaaggaactaacatggctggtttgtccactaatacaacggttctagttcacttgcaggatgagaatgacaacgcgccagtttttatgcaggcagaatatacaggactcattagtgaatcagcctcaattaacagcgtggtcctaacagacaggaatgtcccactggtgattcgagcagctgatgctgataaagactcaaatgctttgcttgtatatcacattgttgaaccatctgtacacacatattttgctattgattctagcactggtgctattcatacagtactaagtctggactatgaagaaacaagtatttttcactttaccgtccaagtgcatgacatgggaaccccacgtttatttgctgagtatgcagcgaatgtaacagtacatgtaattgacattaatgactgcccccctgtgtttgccaagccattatatgaagcatctcttttgttaccaacatacaaaggagtaaaagtcatcacagtaaatgctacagatgctgattcaagtgcattctcacagttgatttactccatcaccgaaggcaacatcggggagaagttttctatggactacaagactggtgctctcactgtccaaaacacaactcagttaagaagccgctacgagctaaccgttagagcttccgatggcagatttgccggccttacctctgtcaaaattaatgtgaaagaaagcaaagaaagtcacctaaagtttacccaggatgtctactctgcggtagtgaaagagaattccaccgaggccgaaacattagctgtcattactgctattgggagtccaatcaatgagcctttgttttatcacatcctcaacccagatcgcagatttaaaataagccgcacttcaggggttctgtcaaccactggcacgcccttcgatcgtgagcagcaggaggcgtttgatgtggttgtagaagtgatagaggaacataagccttctgcagtggcccacgttgtcgtgaaggtcattgtagaagaccaaaatgataatgcgccggtgtttgtcaaccttccctactacgccgttgttaaagtggacactgaggtgggccatgtcattcgctatgtcactgctgtagacagagacagtggcagaaacggggaagtgcattactacctcaaggaacatcatgaacactttcaaattggacccttgggtgaaatttcactgaaaaagcaatttgagcttgacaccttaaataaagaatatcttgttacagtggttgcaaaagatggagggaacccggccttttcagcggaagttatcgttccgatcactgtcatgaataaagccatgcctgtgtttgaaaaacctttctacagtgcagagattgcagagagcatccaggtgcacagccctgtggtccacgtgcaggctaacagcccggaaggcctgaaagtgttctacagcatcacagacggagaccctttcagccagttcactattaacttcaatactggagttatcaatgtcatagctcctctggactttgaggcccacccggcatataagctgagcatacgcgcaactgactccttgacgggcgctcatgctgaagtatttgtggacatcatagtagacgacatcaatgataaccctcctgtgtttgctcagcagtcttatgcggtgaccctgtctgaggcatctgtaattggaacgtctgttgttcaagttagagccaccgattctgattcagaaccaaatagaggaatctcataccagatgtttgggaatcacagcaagagtcatgatcattttcatgtagacagcagcactggcctcatctcactactcagaaccctggattacgagcagtcccggcagcacacgatttttgtgagggcagttgatggtggtatgcccacgctgagcagtgatgtgattgtcacggtggacgttaccgacctcaatggtaatccaccactctttgaacaacagatttatgaagccagaattagcgagcacgcccctcatgggcatttcgtgacctgtgtaaaagcctatgatgcagacagttcagacatagacaagttgcagtattccattctgtctggcaatgatcataaacattttgtcattgacagtgcaacagggattatcaccctctcaaacctgcaccggcacgccctgaagccattttacagtcttaacctgtcagtgtctgatggagtttttagaagttccacccaggttcatgtaactgtaattggaggcaatttgcacagtcctgctttccttcagaacgaatatgaagtggaactagctgaaaacgctcccctacataccctggtgatggaggtgaaaactacggatggggattctggtatttatggtcacgttacttaccatattgtaaatgactttgccaaagacagattttacataaatgagagaggacagatatttactttggaaaaacttgatcgagaaaccccggcggagaaagtgatctcagtccgtttaatggctaaggatgctggaggaaaagttgctttctgcaccgtgaatgtcatccttacagatgacaatgacaatgcaccacaatttcgagcaaccaaatacgaagtgaatatcgggtccagtgctgctaaagggacttcagtcgtaaagtctgcaagtgatgccgatgagggctccaatgccgacatcacctatgccattgaagcagactctgaaagtgtaaaagagaatttggaaattaacaaactgtccggcgtaatcactacaaaggagagcctcattggcttggaaaatgaattcttcactttctttgttagagctgtggataatgggtctccatcaaaagaatctgttgttcttgtctatgttaaaatccttccaccggaaatgcagcttccaaaattttcagaacctttctatacctttacagtgtcagaggacgtgcctgttggaacagagatagatctcatccgagcagaacatagtgggactgttctttacagcctggtcaaagggaatactccagaaagcaatagggatgagtcctttgtgattgacagacagagcgggagactgaagttggagaagagtcttgatcatgagacaactaagtggtatcagttttccatactggccaggtgcactcaagatgaccatgagatggtggcttctgtagatgttagtatccaagtgaaagatgcaaatgacaacagcccggtctttgaatctagtccatatgaggcattcattgttgaaaacctgccagggggaagtagagtaattcagatcagggcatctgatgctgactcaggaaccaacggccaagttatgtatagcctggatcagtcacaaagtgtggaagtcattgaatcctttgccattaacatggaaacaggctggattacaactttaaaggaacttgaccatgaaaagagagacaattaccagattaaagtggttgcatcagatcatggtgaaaagatccagctatcctccacagccattgtggatgttaccgtcaccgatgtcaacgatagtccaccacgattcacggccgagatctataaagggactgtgagtgaggatgacccccaaggtggggtgattgccatcttaagtaccacggatgctgattctgaagagatcaacagacaagttacatatttcataacaggaggggatcctttaggacagtttgccgttgaaactatacagaatgaatggaaggtatatgtgaagaaacctctagacagggaaaaaagggacaattaccttcttactatcacggcaactgatggcaccttctcatcaaaagcgatagttgaagtgaaagttctggatgcaaatgacaacagtccagtttgtgaaaagactttatattcagacactattcctgaagacgtccttcctggaaaattgatcatgcagatctctgctacagacgcagacatccgctctaacgctgaaattacttacacgttattgggttcaggtgcagaaaaattcaaactaaatccagacacaggtgaactgaaaacgtcaaccccccttgatcgtgaggagcaagctgtttatcatcttctcgtcagggccacagatggaggaggaagattctgccaagccagtattgtgctcacgctagaagatgtgaacgataacgcccccgaattctctgccgatccttatgccatcaccgtgtttgaaaacacagagccgggaacgctgctgacaagagtgcaggccacagatgccgacgcaggattaaatcggaagattttatactcactgattgactctgctgatgggcagttctccattaacgaattatctggaattattcagttagaaaaacctttggacagagaactccaggcagtatacaccctctctttgaaagctgtggatcaaggcttgccaaggaggctgactgccactggcactgtgattgtatcagttcttgacataaatgacaacccccctgtgtttgagtaccgtgaatatggtgccaccgtgtctgaggacattcttgttggaactgaagttcttcaagtgtatgcagcaagtcgggatattgaagcaaatgcagaaatcacctactcaataataagtggaaatgaacatgggaaattcagcatagattctaaaacaggggccgtatttatcattgagaatctggattatgagagctctcatgagtattacctaacagtagaggccactgatggaggcacgccttcactgagcgacgttgccactgtgaacgttaatgtaacagatatcaacgataatacccctgtgttcagccaagacacctacacgacagtcatcagtgaagatgccgttcttgagcagtctgtcatcacggttatggccgatgatgccgatggaccttccaacagccacatccactactcaattatagatggcaaccaaggaagctcgttcacaattgaccccgtcaggggagaagtcaaagtgaccaaacttctcgaccgagaaacgatttcaggttacacgctcacggttcaagcttctgataatggcagtccacccagagtcaacacgacgaccgtgaacatcgatgtgtccgatgtcaatgacaacgcgcccgtcttctccaggggaaactacagtgtcattatccaggaaaataagccagtgggcttcagcgtgctgcagctggtagtaacagatgaggattcttcccataacggtccacccttcttctttactattgtaactggaaatgatgagaaggcttttgaagttaacccgcaaggagtcctcctgacatcatctgccatcaagaggaaggagaaagatcattacttactgcaggtgaaggtggcagataatggaaagcctcagttgtcatctttgacatacattgacattagggtaattgaggagagcatctatccgcctgcgattttgcccctggagattttcatcacctcttctggagaagaatactcaggtggcgtcattgggaagatccatgccacagaccaggacgtgtatgatactctaacctacagtctcgaccctcagatggacaacctgttctctgtttccagcacagggggcaagctgatagcacacaaaaagctagacatagggcaataccttctcaatgtcagcgtaacagatgggaagttcacgacggtggccgacatcacagtgcatatcagacaagtcacacaggagatgttgaaccacaccatcgcgatccgctttgccaacctcactccggaagaattcgttggtgactactggcgcaacttccagcgagctttacggaacatcctgggtgtgaggaggaacgacatacagattgttagtttgcagtcctctgaacctcacccacatctggacgtcttactttttgtagagaaaccaggtagtgctcagatctcaacaaaacaacttctgcacaagattaactcttccgtgactgacattgaggaaatcattggagttaggatactgaatgtattccagaaactctgcgcgggactggactgcccctggaagttctgcgatgaaaaggtgtctgtggatgaaagtgtgatgtcaacacacagcacagccagactgagttttgtgactccccgccaccacagggcagcggtgtgtctctgcaaagagggaaggtgcccacctgtccaccatggctgtgaagatgatccgtgccctgagggatccgaatgtgtgtctgatccctgggaggagaaacacacctgtgtctgtcccagcggcaggtttggtcagtgcccagggagttcatctatgacactgactggaaacagctacgtgaaataccgtctgacggaaaatgaaaacaaattagagatgaaactgaccatgaggctcagaacatattccacgcatgcggttgtcatgtatgctcgaggaactgactatagcatcttggagattcatcatggaaggctgcagtacaagtttgactgtggaagtggccctggaattgtctctgttcagagcattcaggtcaatgatgggcagtggcacgcagtggccctggaagtgaatggaaactatgctcgcttggttctagaccaagttcatactgcatcgggcacagccccagggactctgaaaaccctgaacctggataactatgtgttttttggtggccacatccgtcagcagggaacaaggcatggaagaagtcctcaagttggtaatggtttcaggggttgtatggactccatttatttgaatgggcaggagctccctttaaacagcaaacccagaagctatgcacacatcgaagagtcggtggatgtatctccaggctgcttcctgacggccacggaagactgcgccagcaacccttgccagaatggaggcgtttgcaatccgtcacctgctggaggttattactgcaaatgcagtgccttgtacatagggacccactgtgagataagcgtcaatccgtgttcctccaacccatgcctctatgggggcacgtgtgttgtcgacaacggaggctttgtttgccagtgtagaggattatatactggtcagaggtgtcagcttagtccatactgcaaagatgaaccctgtaagaatggcggaacatgctttgacagtttggatggcgccgtttgtcagtgtgattcgggttttaggggagaaaggtgtcagagtgatatcgacgagtgctctggaaacccttgcctgcacggggccctctgtgagaacacgcacggctcctatcactgcaactgcagccacgagtacaggggacgtcactgcgaggatgctgcgcccaaccagtatgtgtccacgccgtggaacattgggttggcggaaggaattggaatcgttgtgtttgttgcagggatatttttactggtggtggtgtttgttctctgccgtaagatgattagtcggaaaaagaagcatcaggctgaacctaaagacaagcacctgggacccgctacggctttcttgcaaagaccgtattttgattccaagctaaataagaacatttactcagacataccaccccaggtgcctgtccggcctatttcctacaccccgagtattccaagtgactcaagaaacaatctggaccgaaattccttcgaaggatctgctatcccagagcatcccgaattcagcacttttaaccccgagtctgtgcacgggcaccgaaaagcagtggcggtctgcagcgtggcgccaaacctgcctcccccacccccttcaaactccccttctgacagcgactccatccagaagcctagctgggactttgactatgacacaaaagtggtggatcttgatccctgtctttccaagaagcctctagaggaaaagccttcccagccatacagtgcccgggaaagcctgtctgaagtgcagtccctgagctccttccagtccgaatcgtgcgatgacaatgggtatcactgggatacatcagattggatgccaagcgttcctctgccggacatacaagagttccccaactatgaggtgattgatgagcagacacccctgtactcagcagatccaaacgccatcgatacggactattaccctggaggctacgacatcgaaagtgattttcctccacccccagaagacttccccgcagctgatgagctaccaccgttaccgcccgaattcagcaatcagtttgaatccatccaccctcctagagacatgcctgccgcgggtagcttgggttcttcatcaagaaaccggcagaggttcaacttgaatcagtatttgcccaatttttatcccctcgatatgtctgaacctcaaacaaaaggcactggtgagaatagtacttgtagagaaccccatgccccttacccgccagggtatcaaagacacttcgaggcgcccgctgtcgagagcatgcccatgtctgtgtacgcctccaccgcctcctgctctgacgtgtcagcctgctgcgaagtggagtccgaggtcatgatgagtgactatgagagcggggacgacggccacttcgaagaggtgacgatcccgcccctggattcccagcagcacacggaagtctgactctcaactccccccaaagtgcctgactttagtgaacctagaggtgatgtgagtaatccgcgctgttctttgcagcagtgcttccaagctttttttggtgagccgaatgggcatggctgcgctggatcctgcgcctctggacgtgctagccatttccagtgtcccaactactgtcatcgtgaggttttcatcggctgtgccatttcccaacgtcttttgggatttacatctgtctgtgttaaaataatcaaacgaaaaatcagtcctgtgttgtcagcatgattcatgtatttatatagatttgattattttaattttcctgtctcttttttttgtaaattttatgtacagatttgatttttcatagttttaactagatttccaagatattttgtgcatttgtttcaactgaattttggtggtggtcagtgccattatctagcaccctgattttttttttttactataaccagggtttcattctgtctttttccactgaagtgtgacattttgttagtacatttcagtgtagtcattcatttctagctgtacataggatgaaggagagatcagatacatgaacatgtcttacatgggttgctgtatttagaattataaacatttttcattattggaaagtgtaacggggaccttctgcatacctgtttagaaccaaaaccaccatgacacagtttttatagtgtctgtatatttgtgatgcaatggtcttgtaaaggtttttaatgaaaactaccattagccagtctttcttactgacaataaattattaataaaa

SEQ ID NO: 432321 - DNA, 15255 bp, Homo sapiens
ccgaaggaggagggcgggcgtttcacccgcgccacagctgcggccggccagagagaccgcagaggccgggacccccgcagcctccacggccgctgctgccactgtcggggtggcgcgcccagccggagaatcccgtccgcgcccggggcggggggcgaggcggggcgctgacgtcacctcccctcccccaccgcctccaagggggagggagtggggaaagaggcagcgagtcgccgcagccggcggccgcaactcctcaactcggcggctggctgcctgggcacgtcctgacaaacttggctgctcccgggccctcgttccggccccgcgcactctcttttcgcctgcgtttggtgcttaagtttgccctggtcggaagcctccggagatgcggccgcctgggtcccggcggcacggacgttggcactctggttagggacatgctgaagatcccggggaggcaaagttggtacttcaaacccggctcttaacacatatctacaccgcgaggggatcacggagctgccgaggactttagagcccagggccgaggactcggctagactgattcccgacagttaagcaatggggagacatttggctttgctcctgcttctgctccttctcttccaacattttggagacagtgatggcagccaacgacttgaacagactcctctgcagtttacacacctcgagtacaacgtcaccgtgcaggagaactctgcagctaagacttatgtggggcatcctgtcaagatgggtgtttacattacacatccagcgtgggaagtaaggtacaaaattgtttccggagacagtgaaaacctgttcaaagctgaagagtacattctcggagacttttgctttctaagaataaggaccaaaggaggaaatacagctattcttaatagagaagtgaaggatcactacacattgatagtgaaagcacttgaaaaaaatactaatgtggaggcgcgaacaaaggtcagggtgcaggtgctggatacaaatgacttgagaccgttattctcacccacctcatacagcgtttctttacctgaaaacacagctataaggaccagtatcgcaagagtcagcgccacggatgcagacataggaaccaacggggaattttactacagttttaaagatcgaacagatatgtttgctattcacccaaccagtggtgtgatagtgttaactggtagacttgattacctagagaccaagctctatgagatggaaatcctcgctgcggaccgtggcatgaagttgtatgggagcagtggcatcagcagcatggccaagctaacggtgcacatcgaacaggccaatgaatgtgctccggtgataacagcagtgacattgtcaccatcagaactggacagggacccagcatatgcaattgtgacagtggatgactgcgatcagggtgccaatggtgacatagcatctttaagcatcgtggcaggtgaccttctccagcagtttagaacagtgaggtcctttccagggagtaaggagtataaagtcaaagccatcggtgacattgattgggacagtcatcctttcggctacaatctcacactacaggctaaagataaaggaactccgccccagttctcttctgttaaagtcattcacgtgacttctccacagttcaaagccgggccagtcaagtttgaaaaggatgtttacagagcagaaataagtgaatttgctcctcccaacacacctgtggtcatggtaaaggccattcctgcttattcccatttgaggtatgtttttaaaaggacacctggaaaagctaaattcagtttaaattacaacactggtctcatttctattttagaaccagttaaaagacagcaggcagcccattttgaacttgaagtaacaacaagtgacagaaaagcgtccaccaaggtcttggtgaaagtcttaggtgcaaatagcaatccccctgaatttacccagacagcgtacaaagctgcttttgatgagaacgtgcccattggtactactatcatgagcctgagtgccgtagaccctgatgagggtgagaatgggtacgtgacatacagtatcgcaaatttaaatcatgtgccgtttgcgattgaccatttcactggtgccgtgagtacgtcagaaaacctggactacgaactgatgcctcgggtttatactctgaggattcgtgcatcagactggggcttgccgtaccgccgggaagtcgaagtccttgctacaattactctcaataacttgaatgacaacacacctttgtttgagaaaataaattgtgaagggacaattcccagagatctaggcgtgggagagcaaataaccactgtttctgctattgatgcagatgaacttcagttggtacagtatcagattgaagctggaaatgaactggatttgtttagtttaaaccccaactcgggggtattgtcattaaagcgatcgctaatggatggcttaggtgcaaaggtgtctttccacagtctgagaatcacagctacagatggagaaaattttgccacaccattatatatcaacataacagtggctgccagtcacaagctggtaaacttgcagtgtgaagagactggtgttgccaaaatgctggcagagaagctcctgcaggcaaataaattacacaaccagggagaggtggaggatattttcttcgattctcactctgtcaatgctcacataccgcagtttagaagcactcttccgactggtattcaggtaaaggaaaaccagcctgtgggttccagtgtaattttcatgaactccactgaccttgacactggcttcaatggaaaactggtctatgctgtttctggaggaaatgaggatagttgcttcatgattgatatggaaacaggaatgctgaaaattttatctcctcttgaccgtgaaacaacagacaaatacaccctgaatattaccgtctatgaccttgggataccccagaaggctgcgtggcgtcttctacatgtcgtggttgtcgatgccaatgataatccacccgagtttttacaggagagctattttgtggaagtgagtgaagacaaggaggtacatagtgaaatcatgcaggttgaagccacagataaagacctggggcccaacggacacgtgacgtactcaattcttacagacacagacacattttcaattgacagcgtgacgggtgttgttaacatcgcacgccctctggatcgagagctgcagcatgagcactccttaaagattgaggccagggaccaagccagagaagagcctcagctgttctccactgtcgttgtgaacagtatcactagaagatgttaatgacaacccacctacatttattccacctaattatcgtgtgaaagtccgagaggatcttccagaaggaaccgtcatcatgtggttagaagcccacgatcctgatttaggtcagtctggtcaggtgagatacagccttctggaccacggagaaggaaacttcgatgtggataaactcagtggagcagttaggatcgtccagcagttggactttgagaagaagcaagtgtataatctcactgtgagggccaaagacaagggaaagccagtttctctgtcttctacttgctatgttgaagttgaggtggttgatgtgaatgagaacctgcacccacccgtgttttccagctttgtggaaaaggggacagtgaaagaagatgcacctgttggttcattggtaatgacggtgtcggctcatgatgaggacgccggaagagatggggagatccgatactccattagagatggctctggcgttggtgttttcaaaataggtgaagagacaggtgtcatagagacgtcagatcgactggaccgtgaatcgacctcccattattggctaacagtctttgcaaccgatcagggtgtcgtgcctctttcatcgttcatagagatctacatagaggttgaggatgtcaatgacaatgcaccacagacatcagagcctgtttattacccagaaatcatggaaaattctcctaaagatgtatctgtggtccagatcgaggcatttgatccagattcgagctctaatgacaagctcatgtacaaaattacaagtggaaatccacaaggattcttttcaatacatcctaaaacaggtctcatcacaactacgtcaaggaagctagaccgagaacagcaagatgaacacatattagaggttactgtgacagacaatggtagtccccccaaatcaaccattgcaagagtcattgtgaaaatccttgatgaaaatgacaacaaacctcagtttctgcaaaagttctacaaaatcagactccctgagcgggaaaagccagaccgagaaagaaatgccagacgggagccgctctatcgcgtcatagccaccgacaaggatgagggccccaatgcagaaatctcctacagcatcgaagacgggaatgagcatggcaaatttttcatcgaaccgaaaactggagtggtttcgtccaagaggttttcagcagctggagaatatgatattctttcaattaaggcagttgacaatggtcgccctcaaaagtcatcaaccaccagactccatattgaatggatctccaagcccaaacagtccctggagcccatttcatttgaagaatcattttttacctttactgtgatggaaagtgaccccgttgctcacatgattggagtaatatctgtggagcctcctggcatacccctttggtttgacatcactggtggcaactacgacagtcacttcgatgtggacaagggaactggaaccatcattgttgccaaacctcttgatgcagaacagaagtcaaactacaacctcacagtcgaggctacagatggaaccaccactatcctcactcaggtattcatcaaagtaatagacacaaatgaccatcgtcctcagttttctacatcaaagtatgaagttgttattcctgaagatacagcgccagaaacagaaattttgcaaatcagtgctgtggatcaggatgagaaaaacaaactaatctacactctgcagagcagtagagatccactgagtctcaagaaatttcgtcttgatcctgcaaccggctctctctatacttctgagaaactggatcatgaagctgtttcaccagcacacctcacggtcatggtacgagatcaagatgtgcctgtaaaacgcaactttgcaaggattgtggtcaatgtcagcgacacgaatgaccacgccccgtggttcaccgcttcctcctacaaagggcgggtttatgaatcggcagccgttggctcagttgtgttgcaggtgacggctctggacaaggacaaagggaaaaatgctgaagtgctgtactcgatcgagtcaggaaatattggaaatattggaaattcttttatgattgatcctgtcttgggctctattaaaactgccaaagaattagatcgaagtaaccaagcggagtatgatttaatggtaaaagctacagataagggcagtccaccaatgagtgaaataacttctgtgcgtatctttgtcacaattgctgacaacgcctctccgaagtttacatcaaaagaatattctgttgaacttagtgaaactgtcagcattgggagtttcgttgggatggttacagcccatagtcaatcatcagtggtgtatgaaataaaagatggaaatacaggtgatgcttttgatattaatccacattctggaactatcatcactcagaaagccctggactttgaaactttgcccatttacacattgataatacaaggaactaacatggctggtttgtccactaatacaacggttctagttcacttgcaggatgagaatgacaacgcgccagtttttatgcaggcagaatatacaggactcattagtgaatcagcctcaattaacagcgtggtcctaacagacaggaatgtcccactggtgattcgagcagctgatgctgataaagactcaaatgctttgcttgtatatcacattgttgaaccatctgtacacacatattttgctattgattctagcactggtgctattcatacagtactaagtctggactatgaagaaacaagtatttttcactttaccgtccaagtgcatgacatgggaaccccacgtttatttgctgagtatgcagcgaatgtaacagtacatgtaattgacattaatgactgcccccctgtgtttgccaagccattatatgaagcatctcttttgttaccaacatacaaaggagtaaaagtcatcacagtaaatgctacagatgctgattcaagtgcattctcacagttgatttactccatcaccgaaggcaacatcggggagaagttttctatggactacaagactggtgctctcactgtccaaaacacaactcagttaagaagccgctacgagctaaccgttagagcttccgatggcagatttgccggccttacctctgtcaaaattaatgtgaaagaaagcaaagaaagtcacctaaagtttacccaggatgtctactctgcggtagtgaaagagaattccaccgaggccgaaacattagctgtcattactgctattgggagtccaatcaatgagcctttgttttatcacatcctcaacccagatcgcagatttaaaataagccgcacttcaggggttctgtcaaccactggcacgcccttcgatcgtgagcagcaggaggcgtttgatgtggttgtagaagtgatagaggaacataagccttctgcagtggcccacgttgtcgtgaaggtcattgtagaagaccaaaatgataatgcgccggtgtttgtcaaccttccctactacgccgttgttaaagtggacactgaggtgggccatgtcattcgctatgtcactgctgtagacagagacagtggcagaaacggggaagtgcattactacctcaaggaacatcatgaacactttcaaattggacccttgggtgaaatttcactgaaaaagcaatttgagcttgacaccttaaataaagaatatcttgttacagtggttgcaaaagatggagggaacccggccttttcagcggaagttatcgttccgatcactgtcatgaataaagccatgcctgtgtttgaaaaacctttctacagtgcagagattgcagagagcatccaggtgcacagccctgtggtccacgtgcaggctaacagcccggaaggcctgaaagtgttctacagcatcacagacggagaccctttcagccagttcactattaacttcaatactggagttatcaatgtcatagctcctctggactttgaggcccacccggcatataagctgagcatacgcgcaactgactccttgacgggcgctcatgctgaagtatttgtggacatcatagtagacgacatcaatgataaccctcctgtgtttgctcagcagtcttatgcggtgaccctgtctgaggcatctgtaattggaacgtctgttgttcaagttagagccaccgattctgattcagaaccaaatagaggaatctcataccagatgtttgggaatcacagcaagagtcatgatcattttcatgtagacagcagcactggcctcatctcactactcagaaccctggattacgagcagtcccggcagcacacgatttttgtgagggcagttgatggtggtatgcccacgctgagcagtgatgtgattgtcacggtggacgttaccgacctcaatggtaatccaccactctttgaacaacagatttatgaagccagaattagcgagcacgcccctcatgggcatttcgtgacctgtgtaaaagcctatgatgcagacagttcagacatagacaagttgcagtattccattctgtctggcaatgatcataaacattttgtcattgacagtgcaacagggattatcaccctctcaaacctgcaccggcacgccctgaagccattttacagtcttaacctgtcagtgtctgatggagtttttagaagttccacccaggttcatgtaactgtaattggaggcaatttgcacagtcctgctttccttcagaacgaatatgaagtggaactagctgaaaacgctcccctacataccctggtgatggaggtgaaaactacggatggggattctggtatttatggtcacgttacttaccatattgtaaatgactttgccaaagacagattttacataaatgagagaggacagatatttactttggaaaaacttgatcgagaaaccccggcggagaaagtgatctcagtccgtttaatggctaaggatgctggaggaaaagttgctttctgcaccgtgaatgtcatccttacagatgacaatgacaatgcaccacaatttcgagcaaccaaatacgaagtgaatatcgggtccagtgctgctaaagggacttcagtcgtaaagtctgcaagtgatgccgatgagggctccaatgccgacatcacctatgccattgaagcagactctgaaagtgtaaaagagaatttggaaattaacaaactgtccggcgtaatcactacaaaggagagcctcattggcttggaaaatgaattcttcactttctttgttagagctgtggataatgggtctccatcaaaagaatctgttgttcttgtctatgttaaaatccttccaccggaaatgcagcttccaaaattttcagaacctttctatacctttacagtgtcagaggacgtgcctgttggaacagagatagatctcatccgagcagaacatagtgggactgttctttacagcctggtcaaagggaatactccagaaagcaatagggatgagtcctttgtgattgacagacagagcgggagactgaagttggagaagagtcttgatcatgagacaactaagtggtatcagttttccatactggccaggtgcactcaagatgaccatgagatggtggcttctgtagatgttagtatccaagtgaaagatgcaaatgacaacagcccggtctttgaatctagtccatatgaggcattcattgttgaaaacctgccagggggaagtagagtaattcagatcagggcatctgatgctgactcaggaaccaacggccaagttatgtatagcctggatcagtcacaaagtgtggaagtcattgaatcctttgccattaacatggaaacaggctggattacaactttaaaggaacttgaccatgaaaagagagacaattaccagattaaagtggttgcatcagatcatggtgaaaagatccagctatcctccacagccattgtggatgttaccgtcaccgatgtcaacgatagtccaccacgattcacggccgagatctataaagggactgtgagtgaggatgacccccaaggtggggtgattgccatcttaagtaccacggatgctgattctgaagagatcaacagacaagttacatatttcataacaggaggggatcctttaggacagtttgccgttgaaactatacagaatgaatggaaggtatatgtgaagaaacctctagacagggaaaaaagggacaattaccttcttactatcacggcaactgatggcaccttctcatcaaaagcgatagttgaagtgaaagttctggatgcaaatgacaacagtccagtttgtgaaaagactttatattcagacactattcctgaagacgtccttcctggaaaattgatcatgcagatctctgctacagacgcagacatccgctctaacgctgaaattacttacacgttattgggttcaggtgcagaaaaattcaaactaaatccagacacaggtgaactgaaaacgtcaaccccccttgatcgtgaggagcaagctgtttatcatcttctcgtcagggccacagatggaggaggaagattctgccaagccagtattgtgctcacgctagaagatgtgaacgataacgcccccgaattctctgccgatccttatgccatcaccgtgtttgaaaacacagagccgggaacgctgctgacaagagtgcaggccacagatgccgacgcaggattaaatcggaagattttatactcactgattgactctgctgatgggcagttctccattaacgaattatctggaattattcagttagaaaaacctttggacagagaactccaggcagtatacaccctctctttgaaagctgtggatcaaggcttgccaaggaggctgactgccactggcactgtgattgtatcagttcttgacataaatgacaacccccctgtgtttgagtaccgtgaatatggtgccaccgtgtctgaggacattcttgttggaactgaagttcttcaagtgtatgcagcaagtcgggatattgaagcaaatgcagaaatcacctactcaataataagtggaaatgaacatgggaaattcagcatagattctaaaacaggggccgtatttatcattgagaatctggattatgagagctctcatgagtattacctaacagtagaggccactgatggaggcacgccttcactgagcgacgttgccactgtgaacgttaatgtaacagatatcaacgataatacccctgtgttcagccaagacacctacacgacagtcatcagtgaagatgccgttcttgagcagtctgtcatcacggttatggccgatgatgccgatggaccttccaacagccacatccactactcaattatagatggcaaccaaggaagctcgttcacaattgaccccgtcaggggagaagtcaaagtgaccaaacttctcgaccgagaaacgatttcaggttacacgctcacggttcaagcttctgataatggcagtccacccagagtcaacacgacgaccgtgaacatcgatgtgtccgatgtcaatgacaacgcgcccgtcttctccaggggaaactacagtgtcattatccaggaaaataagccagtgggcttcagcgtgctgcagctggtagtaacagatgaggattcttcccataacggtccacccttcttctttactattgtaactggaaatgatgagaaggcttttgaagttaacccgcaaggagtcctcctgacatcatctgccatcaagaggaaggagaaagatcattacttactgcaggtgaaggtggcagataatggaaagcctcagttgtcatctttgacatacattgacattagggtaattgaggagagcatctatccgcctgcgattttgcccctggagattttcatcacctcttctggagaagaatactcaggtggcgtcattgggaagatccatgccacagaccaggacgtgtatgatactctaacctacagtctcgaccctcagatggacaacctgttctctgtttccagcacagggggcaagctgatagcacacaaaaagctagacatagggcaataccttctcaatgtcagcgtaacagatgggaagttcacgacggtggccgacatcacagtgcatatcagacaagtcacacaggagatgttgaaccacaccatcgcgatccgctttgccaacctcactccggaagaattcgttggtgactactggcgcaacttccagcgagctttacggaacatcctgggtgtgaggaggaacgacatacagattgttagtttgcagtcctctgaacctcacccacatctggacgtcttactttttgtagagaaaccaggtagtgctcagatctcaacaaaacaacttctgcacaagattaactcttccgtgactgacattgaggaaatcattggagttaggatactgaatgtattccagaaactctgcgcgggactggactgcccctggaagttctgcgatgaaaaggtgtctgtggatgaaagtgtgatgtcaacacacagcacagccagactgagttttgtgactccccgccaccacagggcagcggtgtgtctctgcaaagagggaaggtgcccacctgtccaccatggctgtgaagatgatccgtgccctgagggatccgaatgtgtgtctgatccctgggaggagaaacacacctgtgtctgtcccagcggcaggtttggtcagtgcccagggagttcatctatgacactgactggaaacagctacgtgaaataccgtctgacggaaaatgaaaacaaattagagatgaaactgaccatgaggctcagaacatattccacgcatgcggttgtcatgtatgctcgaggaactgactatagcatcttggagattcatcatggaaggctgcagtacaagtttgactgtggaagtggccctggaattgtctctgttcagagcattcaggtcaatgatgggcagtggcacgcagtggccctggaagtgaatggaaactatgctcgcttggttctagaccaagttcatactgcatcgggcacagccccagggactctgaaaaccctgaacctggataactatgtgttttttggtggccacatccgtcagcagggaacaaggcatggaagaagtcctcaagttggtaatggtttcaggggttgtatggactccatttatttgaatgggcaggagctccctttaaacagcaaacccagaagctatgcacacatcgaagagtcggtggatgtatctccaggctgcttcctgacggccacggaagactgcgccagcaacccttgccagaatggaggcgtttgcaatccgtcacctgctggaggttattactgcaaatgcagtgccttgtacatagggacccactgtgagataagcgtcaatccgtgttcctccaacccatgcctctatgggggcacgtgtgttgtcgacaacggaggctttgtttgccagtgtagaggattatatactggtcagaggtgtcagcttagtccatactgcaaagatgaaccctgtaagaatggcggaacatgctttgacagtttggatggcgccgtttgtcagtgtgattcgggttttaggggagaaagctcatcaaggagggattagtcttcagtctctaaggattgagcctgacatacgctggcgtatgctacagaggtctctcctcattcctgacttccttggcaggtgtcagagtgatatcgacgagtgctctggaaacccttgcctgcacggggccctctgtgagaacacgcacggctcctatcactgcaactgcagccacgagtacaggggacgtcactgcgaggatgctgcgcccaaccagtatgtgtccacgccgtggaacattgggttggcggaaggaattggaatcgttgtgtttgttgcagggatatttttactggtggtggtgtttgttctctgccgtaagatgattagtcggaaaaagaagcatcaggctgaacctaaagacaagcacctgggacccgctacggctttcttgcaaagaccgtattttgattccaagctaaataagaacatttactcagacataccaccccaggtgcctgtccggcctatttcctacaccccgagtattccaagtgactcaagaaacaatctggaccgaaattccttcgaaggatctgctatcccagagcatcccgaattcagcacttttaaccccgagtctgtgcacgggcaccgaaaagcagtggcggtctgcagcgtggcgccaaacctgcctcccccacccccttcaaactccccttctgacagcgactccatccagaagcctagctgggactttgactatgacacaaaagtggtggatcttgatccctgtctttccaagaagcctctagaggaaaagccttcccagccatacagtgcccgggaaagcctgtctgaagtgcagtccctgagctccttccagtccgaatcgtgcgatgacaatgggtatcactgggatacatcagattggatgccaagcgttcctctgccggacatacaagagttccccaactatgaggtgattgatgagcagacacccctgtactcagcagatccaaacgccatcgatacggactattaccctggaggctacgacatcgaaagtgattttcctccacccccagaagacttccccgcagctgatgagctaccaccgttaccgcccgaattcagcaatcagtttgaatccatccaccctcctagagacatgcctgccgcgggtagcttgggttcttcatcaagaaaccggcagaggttcaacttgaatcagtatttgcccaatttttatcccctcgatatgtctgaacctcaaacaaaaggcactggtgagaatagtacttgtagagaaccccatgccccttacccgccagggtatcaaagacacttcgaggcgcccgctgtcgagagcatgcccatgtctgtgtacgcctccaccgcctcctgctctgacgtgtcagcctgctgcgaagtggagtccgaggtcatgatgagtgactatgagagcggggacgacggccacttcgaagaggtgacgatcccgcccctggattcccagcagcacacggaagtctgactctcaactccccccaaagtgcctgactttagtgaacctagaggtgatgtgagtaatccgcgctgttctttgcagcagtgcttccaagctttttttggtgagccgaatgggcatggctgcgctggatcctgcgcctctggacgtgctagccatttccagtgtcccaactactgtcatcgtgaggttttcatcggctgtgccatttcccaacgtcttttgggatttacatctgtctgtgttaaaataatcaaacgaaaaatcagtcctgtgttgtcagcatgattcatgtatttatatagatttgattattttaattttcctgtctcttttttttgtaaattttatgtacagatttgatttttcatagttttaactagatttccaagatattttgtgcatttgtttcaactgaattttggtggtggtcagtgccattatctagcaccctgattttttttttttactataaccagggtttcattctgtctttttccactgaagtgtgacattttgttagtacatttcagtgtagtcattcatttctagctgtacataggatgaaggagagatcagatacatgaacatgtcttacatgggttgctgtatttagaattataaacatttttcattattggaaagtgtaacggggaccttctgcatacctgtttagaaccaaaaccaccatgacacagtttttatagtgtctgtatatttgtgatgcaatggtcttgtaaaggtttttaatgaaaactaccattagccagtctttcttactgacaataaattattaataaaa

SEQ ID NO: 432322 - DNA, 14661 bp, Homo sapiens
ccgaaggaggagggcgggcgtttcacccgcgccacagctgcggccggccagagagaccgcagaggccgggacccccgcagcctccacggccgctgctgccactgtcggggtggcgcgcccagccggagaatcccgtccgcgcccggggcggggggcgaggcggggcgctgacgtcacctcccctcccccaccgcctccaagggggagggagtggggaaagaggcagcgagtcgccgcagccggcggccgcaactcctcaactcggcggctggctgcctgggcacgtcctgacaaacttggctgctcccgggccctcgttccggccccgcgcactctcttttcgcctgcgtttggtgcttaagtttgccctggtcggaagcctccggagatgcggccgcctgggtcccggcggcacggacgttggcactctggttagggacatgctgaagatcccggggaggcaaagttggtacttcaaacccggctcttaacacatatctacaccgcgaggggatcacggagctgccgaggactttagagcccagggccgaggactcggctagactgattcccgacagttaagcaatggggagacatttggctttgctcctgcttctgctccttctcttccaacattttggagacagtgatggcagccaacgacttgaacagactcctctgcagtttacacacctcgagtacaacgtcaccgtgcaggagaactctgcagctaagacttatgtggggcatcctgtcaagatgggtgtttacattacacatccagcgtgggaagtaaggtacaaaattgtttccggagacagtgaaaacctgttcaaagctgaagagtacattctcggagacttttgctttctaagaataaggaccaaaggaggaaatacagctattcttaatagagaagtgaaggatcactacacattgatagtgaaagcacttgaaaaaaatactaatgtggaggcgcgaacaaaggtcagggtgcaggtgctggatacaaatgacttgagaccgttattctcacccacctcatacagcgtttctttacctgaaaacacagctataaggaccagtatcgcaagagtcagcgccacggatgcagacataggaaccaacggggaattttactacagttttaaagatcgaacagatatgtttgctattcacccaaccagtggtgtgatagtgttaactggtagacttgattacctagagaccaagctctatgagatggaaatcctcgctgcggaccgtggcatgaagttgtatgggagcagtggcatcagcagcatggccaagctaacggtgcacatcgaacaggccaatgaatgtgctccggtgataacagcagtgacattgtcaccatcagaactggacagggacccagcatatgcaattgtgacagtggatgactgcgatcagggtgccaatggtgacatagcatctttaagcatcgtggcaggtgaccttctccagcagtttagaacagtgaggtcctttccagggagtaaggagtataaagtcaaagccatcggtgacattgattgggacagtcatcctttcggctacaatctcacactacaggctaaagataaaggaactccgccccagttctcttctgttaaagtcattcacgtgacttctccacagttcaaagccgggccagtcaagtttgaaaaggatgtttacagagcagaaataagtgaatttgctcctcccaacacacctgtggtcatggtaaaggccattcctgcttattcccatttgaggtatgtttttaaaaggacacctggaaaagctaaattcagtttaaattacaacactggtctcatttctattttagaaccagttaaaagacagcaggcagcccattttgaacttgaagtaacaacaagtgacagaaaagcgtccaccaaggtcttggtgaaagtcttaggtgcaaatagcaatccccctgaatttacccagacagcgtacaaagctgcttttgatgagaacgtgcccattggtactactatcatgagcctgagtgccgtagaccctgatgagggtgagaatgggtacgtgacatacagtatcgcaaatttaaatcatgtgccgtttgcgattgaccatttcactggtgccgtgagtacgtcagaaaacctggactacgaactgatgcctcgggtttatactctgaggattcgtgcatcagactggggcttgccgtaccgccgggaagtcgaagtccttgctacaattactctcaataacttgaatgacaacacacctttgtttgagaaaataaattgtgaagggacaattcccagagatctaggcgtgggagagcaaataaccactgtttctgctattgatgcagatgaacttcagttggtacagtatcagattgaagctggaaatgaactggatttgtttagtttaaaccccaactcgggggtattgtcattaaagcgatcgctaatggatggcttaggtgcaaaggtgtctttccacagtctgagaatcacagctacagatggagaaaattttgccacaccattatatatcaacataacagtggctgccagtcacaagctggtaaacttgcagtgtgaagagactggtgttgccaaaatgctggcagagaagctcctgcaggcaaataaattacacaaccagggagaggtggaggatattttcttcgattctcactctgtcaatgctcacataccgcagtttagaagcactcttccgactggtattcaggtaaaggaaaaccagcctgtgggttccagtgtaattttcatgaactccactgaccttgacactggcttcaatggaaaactggtctatgctgtttctggaggaaatgaggatagttgcttcatgattgatatggaaacaggaatgctgaaaattttatctcctcttgaccgtgaaacaacagacaaatacaccctgaatattaccgtctatgaccttgggataccccagaaggctgcgtggcgtcttctacatgtcgtggttgtcgatgccaatgataatccacccgagtttttacaggagagctattttgtggaagtgagtgaagacaaggaggtacatagtgaaatcatgcaggttgaagccacagataaagacctggggcccaacggacacgtgacgtactcaattcttacagacacagacacattttcaattgacagcgtgacgggtgttgttaacatcgcacgccctctggatcgagagctgcagcatgagcactccttaaagattgaggccagggaccaagccagagaagagcctcagctgttctccactgtcgttgtgaacagtatcactagaagatgttaatgacaacccacctacatttattccacctaattatcgtgtgaaagtccgagaggatcttccagaaggaaccgtcatcatgtggttagaagcccacgatcctgatttaggtcagtctggtcaggtgagatacagccttctggaccacggagaaggaaacttcgatgtggataaactcagtggagcagttaggatcgtccagcagttggactttgagaagaagcaagtgtataatctcactgtgagggccaaagacaagggaaagccagtttctctgtcttctacttgctatgttgaagttgaggtggttgatgtgaatgagaacctgcacccacccgtgttttccagctttgtggaaaaggggacagtgaaagaagatgcacctgttggttcattggtaatgacggtgtcggctcatgatgaggacgccggaagagatggggagatccgatactccattagagatggctctggcgttggtgttttcaaaataggtgaagagacaggtgtcatagagacgtcagatcgactggaccgtgaatcgacctcccattattggctaacagtctttgcaaccgatcagggtgtcgtgcctctttcatcgttcatagagatctacatagaggttgaggatgtcaatgacaatgcaccacagacatcagagcctgtttattacccagaaatcatggaaaattctcctaaagatgtatctgtggtccagatcgaggcatttgatccagattcgagctctaatgacaagctcatgtacaaaattacaagtggaaatccacaaggattcttttcaatacatcctaaaacaggtctcatcacaactacgtcaaggaagctagaccgagaacagcaagatgaacacatattagaggttactgtgacagacaatggtagtccccccaaatcaaccattgcaagagtcattgtgaaaatccttgatgaaaatgacaacaaacctcagtttctgcaaaagttctacaaaatcagactccctgagcgggaaaagccagaccgagaaagaaatgccagacgggagccgctctatcgcgtcatagccaccgacaaggatgagggccccaatgcagaaatctcctacagcatcgaagacgggaatgagcatggcaaatttttcatcgaaccgaaaactggagtggtttcgtccaagaggttttcagcagctggagaatatgatattctttcaattaaggcagttgacaatggtcgccctcaaaagtcatcaaccaccagactccatattgaatggatctccaagcccaaacagtccctggagcccatttcatttgaagaatcattttttacctttactgtgatggaaagtgaccccgttgctcacatgattggagtaatatctgtggagcctcctggcatacccctttggtttgacatcactggtggcaactacgacagtcacttcgatgtggacaagggaactggaaccatcattgttgccaaacctcttgatgcagaacagaagtcaaactacaacctcacagtcgaggctacagatggaaccaccactatcctcactcaggtattcatcaaagtaatagacacaaatgaccatcgtcctcagttttctacatcaaagtatgaagttgttattcctgaagatacagcgccagaaacagaaattttgcaaatcagtgctgtggatcaggatgagaaaaacaaactaatctacactctgcagagcagtagagatccactgagtctcaagaaatttcgtcttgatcctgcaaccggctctctctatacttctgagaaactggatcatgaagctgtttcaccagcacacctcacggtcatggtacgagatcaagatgtgcctgtaaaacgcaactttgcaaggattgtggtcaatgtcagcgacacgaatgaccacgccccgtggttcaccgcttcctcctacaaagggcgggtttatgaatcggcagccgttggctcagttgtgttgcaggtgacggctctggacaaggacaaagggaaaaatgctgaagtgctgtactcgatcgagtcaggaaatattggaaatattggaaattcttttatgattgatcctgtcttgggctctattaaaactgccaaagaattagatcgaagtaaccaagcggagtatgatttaatggtaaaagctacagataagggcagtccaccaatgagtgaaataacttctgtgcgtatctttgtcacaattgctgacaacgcctctccgaagtttacatcaaaagaatattctgttgaacttagtgaaactgtcagcattgggagtttcgttgggatggttacagcccatagtcaatcatcagtggtgtatgaaataaaagatggaaatacaggtgatgcttttgatattaatccacattctggaactatcatcactcagaaagccctggactttgaaactttgcccatttacacattgataatacaaggaactaacatggctggtttgtccactaatacaacggttctagttcacttgcaggatgagaatgacaacgcgccagtttttatgcaggcagaatatacaggactcattagtgaatcagcctcaattaacagcgtggtcctaacagacaggaatgtcccactggtgattcgagcagctgatgctgataaagactcaaatgctttgcttgtatatcacattgttgaaccatctgtacacacatattttgctattgattctagcactggtgctattcatacagtactaagtctggactatgaagaaacaagtatttttcactttaccgtccaagtgcatgacatgggaaccccacgtttatttgctgagtatgcagcgaatgtaacagtacatgtaattgacattaatgactgcccccctgtgtttgccaagccattatatgaagcatctcttttgttaccaacatacaaaggagtaaaagtcatcacagtaaatgctacagatgctgattcaagtgcattctcacagttgatttactccatcaccgaaggcaacatcggggagaagttttctatggactacaagactggtgctctcactgtccaaaacacaactcagttaagaagccgctacgagctaaccgttagagcttccgatggcagatttgccggccttacctctgtcaaaattaatgtgaaagaaagcaaagaaagtcacctaaagtttacccaggatgtctactctgcggtagtgaaagagaattccaccgaggccgaaacattagctgtcattactgctattgggagtccaatcaatgagcctttgttttatcacatcctcaacccagatcgcagatttaaaataagccgcacttcaggggttctgtcaaccactggcacgcccttcgatcgtgagcagcaggaggcgtttgatgtggttgtagaagtgatagaggaacataagccttctgcagtggcccacgttgtcgtgaaggtcattgtagaagaccaaaatgataatgcgccggtgtttgtcaaccttccctactacgccgttgttaaagtggacactgaggtgggccatgtcattcgctatgtcactgctgtagacagagacagtggcagaaacggggaagtgcattactacctcaaggaacatcatgaacactttcaaattggacccttgggtgaaatttcactgaaaaagcaatttgagcttgacaccttaaataaagaatatcttgttacagtggttgcaaaagatggagggaacccggccttttcagcggaagttatcgttccgatcactgtcatgaataaagccatgcctgtgtttgaaaaacctttctacagtgcagagattgcagagagcatccaggtgcacagccctgtggtccacgtgcaggctaacagcccggaaggcctgaaagtgttctacagcatcacagacggagaccctttcagccagttcactattaacttcaatactggagttatcaatgtcatagctcctctggactttgaggcccacccggcatataagctgagcatacgcgcaactgactccttgacgggcgctcatgctgaagtatttgtggacatcatagtagacgacatcaatgataaccctcctgtgtttgctcagcagtcttatgcggtgaccctgtctgaggcatctgtaattggaacgtctgttgttcaagttagagccaccgattctgattcagaaccaaatagaggaatctcataccagatgtttgggaatcacagcaagagtcatgatcattttcatgtagacagcagcactggcctcatctcactactcagaaccctggattacgagcagtcccggcagcacacgatttttgtgagggcagttgatggtggtatgcccacgctgagcagtgatgtgattgtcacggtggacgttaccgacctcaatggtaatccaccactctttgaacaacagatttatgaagccagaattagcgagcacgcccctcatgggcatttcgtgacctgtgtaaaagcctatgatgcagacagttcagacatagacaagttgcagtattccattctgtctggcaatgatcataaacattttgtcattgacagtgcaacagggattatcaccctctcaaacctgcaccggcacgccctgaagccattttacagtcttaacctgtcagtgtctgatggagtttttagaagttccacccaggttcatgtaactgtaattggaggcaatttgcacagtcctgctttccttcagaacgaatatgaagtggaactagctgaaaacgctcccctacataccctggtgatggaggtgaaaactacggatggggattctggtatttatggtcacgttacttaccatattgtaaatgactttgccaaagacagattttacataaatgagagaggacagatatttactttggaaaaacttgatcgagaaaccccggcggagaaagtgatctcagtccgtttaatggctaaggatgctggaggaaaagttgctttctgcaccgtgaatgtcatccttacagatgacaatgacaatgcaccacaatttcgagcaaccaaatacgaagtgaatatcgggtccagtgctgctaaagggacttcagtcgtaaagtctgcaagtgatgccgatgagggctccaatgccgacatcacctatgccattgaagcagactctgaaagtgtaaaagagaatttggaaattaacaaactgtccggcgtaatcactacaaaggagagcctcattggcttggaaaatgaattcttcactttctttgttagagctgtggataatgggtctccatcaaaagaatctgttgttcttgtctatgttaaaatccttccaccggaaatgcagcttccaaaattttcagaacctttctatacctttacagtgtcagaggacgtgcctgttggaacagagatagatctcatccgagcagaacatagtgggactgttctttacagcctggtcaaagggaatactccagaaagcaatagggatgagtcctttgtgattgacagacagagcgggagactgaagttggagaagagtcttgatcatgagacaactaagtggtatcagttttccatactggccaggtgcactcaagatgaccatgagatggtggcttctgtagatgttagtatccaagtgaaagatgcaaatgacaacagcccggtctttgaatctagtccatatgaggcattcattgttgaaaacctgccagggggaagtagagtaattcagatcagggcatctgatgctgactcaggaaccaacggccaagttatgtatagcctggatcagtcacaaagtgtggaagtcattgaatcctttgccattaacatggaaacaggctggattacaactttaaaggaacttgaccatgaaaagagagacaattaccagattaaagtggttgcatcagatcatggtgaaaagatccagctatcctccacagccattgtggatgttaccgtcaccgatgtcaacgatagtccaccacgattcacggccgagatctataaagggactgtgagtgaggatgacccccaaggtggggtgattgccatcttaagtaccacggatgctgattctgaagagatcaacagacaagttacatatttcataacaggaggggatcctttaggacagtttgccgttgaaactatacagaatgaatggaaggtatatgtgaagaaacctctagacagggaaaaaagggacaattaccttcttactatcacggcaactgatggcaccttctcatcaaaagcgatagttgaagtgaaagttctggatgcaaatgacaacagtccagtttgtgaaaagactttatattcagacactattcctgaagacgtccttcctggaaaattgatcatgcagatctctgctacagacgcagacatccgctctaacgctgaaattacttacacgttattgggttcaggtgcagaaaaattcaaactaaatccagacacaggtgaactgaaaacgtcaaccccccttgatcgtgaggagcaagctgtttatcatcttctcgtcagggccacagatggaggaggaagattctgccaagccagtattgtgctcacgctagaagatgtgaacgataacgcccccgaattctctgccgatccttatgccatcaccgtgtttgaaaacacagagccgggaacgctgctgacaagagtgcaggccacagatgccgacgcaggattaaatcggaagattttatactcactgattgactctgctgatgggcagttctccattaacgaattatctggaattattcagttagaaaaacctttggacagagaactccaggcagtatacaccctctctttgaaagctgtggatcaaggcttgccaaggaggctgactgccactggcactgtgattgtatcagttcttgacataaatgacaacccccctgtgtttgagtaccgtgaatatggtgccaccgtgtctgaggacattcttgttggaactgaagttcttcaagtgtatgcagcaagtcgggatattgaagcaaatgcagaaatcacctactcaataataagtggaaatgaacatgggaaattcagcatagattctaaaacaggggccgtatttatcattgagaatctggattatgagagctctcatgagtattacctaacagtagaggccactgatggaggcacgccttcactgagcgacgttgccactgtgaacgttaatgtaacagatatcaacgataatacccctgtgttcagccaagacacctacacgacagtcatcagtgaagatgccgttcttgagcagtctgtcatcacggttatggccgatgatgccgatggaccttccaacagccacatccactactcaattatagatggcaaccaaggaagctcgttcacaattgaccccgtcaggggagaagtcaaagtgaccaaacttctcgaccgagaaacgatttcaggttacacgctcacggttcaagcttctgataatggcagtccacccagagtcaacacgacgaccgtgaacatcgatgtgtccgatgtcaatgacaacgcgcccgtcttctccaggggaaactacagtgtcattatccaggaaaataagccagtgggcttcagcgtgctgcagctggtagtaacagatgaggattcttcccataacggtccacccttcttctttactattgtaactggaaatgatgagaaggcttttgaagttaacccgcaaggagtcctcctgacatcatctgccatcaagaggaaggagaaagatcattacttactgcaggtgaaggtggcagataatggaaagcctcagttgtcatctttgacatacattgacattagggtaattgaggagagcatctatccgcctgcgattttgcccctggagattttcatcacctcttctggagaagaatactcaggtggcgtcattgggaagatccatgccacagaccaggacgtgtatgatactctaacctacagtctcgaccctcagatggacaacctgttctctgtttccagcacagggggcaagctgatagcacacaaaaagctagacatagggcaataccttctcaatgtcagcgtaacagatgggaagttcacgacggtggccgacatcacagtgcatatcagacaagtcacacaggagatgttgaaccacaccatcgcgatccgctttgccaacctcactccggaagaattcgttggtgactactggcgcaacttccagcgagctttacggaacatcctgggtgtgaggaggaacgacatacagattgttagtttgcagtcctctgaacctcacccacatctggacgtcttactttttgtagagaaaccaggtagtgctcagatctcaacaaaacaacttctgcacaagattaactcttccgtgactgacattgaggaaatcattggagttaggatactgaatgtattccagaaactctgcgcgggactggactgcccctggaagttctgcgatgaaaaggtgtctgtggatgaaagtgtgatgtcaacacacagcacagccagactgagttttgtgactccccgccaccacagggcagcggtgtgtctctgcaaagagggaaggtgcccacctgtccaccatggctgtgaagatgatccgtgccctgagggatccgaatgtgtgtctgatccctgggaggagaaacacacctgtgtctgtcccagcggcaggtttggtcagtgcccagggagttcatctatgacactgactggaaacagctacgtgaaataccgtctgacggaaaatgaaaacaaattagagatgaaactgaccatgaggctcagaacatattccacgcatgcggttgtcatgtatgctcgaggaactgactatagcatcttggagattcatcatggaaggctgcagtacaagtttgactgtggaagtggccctggaattgtctctgttcagagcattcaggtcaatgatgggcagtggcacgcagtggccctggaagtgaatggaaactatgctcgcttggttctagaccaagttcatactgcatcgggcacagccccagggactctgaaaaccctgaacctggataactatgtgttttttggtggccacatccgtcagcagggaacaaggcatggaagaagtcctcaagttggtaatggtttcaggggttgtatggactccatttatttgaatgggcaggagctccctttaaacagcaaacccagaagctatgcacacatcgaagagtcggtggatgtatctccaggctgcttcctgacggccacggaagactgcgccagcaacccttgccagaatggaggcgtttgcaatccgtcacctgctggaggttattactgcaaatgcagtgccttgtacatagggacccactgtgagataagcgtcaatccgtgttcctccaacccatgcctctatgggggcacgtgtgttgtcgacaacggaggctttgtttgccagtgtagaggattatatactggtcagaggtgtcagcttagtccatactgcaaagatgaaccctgtaagaatggcggaacatgctttgacagtttggatggcgccgtttgtcagtgtgattcgggttttaggggagaaaggtgtcagagtgatatcgacgagtgctctggaaacccttgcctgcacggggccctctgtgagaacacgcacggctcctatcactgcaactgcagccacgagtacaggggacgtcactgcgaggatgctgcgcccaaccacaaaagtggtggatcttgatccctgtctttccaagaagcctctagaggaaaagccttcccagccatacagtgcccgggaaagcctgtctgaagtgcagtccctgagctccttccagtccgaatcgtgcgatgacaatgggtatcactgggatacatcagattggatgccaagcgttcctctgccggacatacaagagttccccaactatgaggtgattgatgagcagacacccctgtactcagcagatccaaacgccatcgatacggactattaccctggaggctacgacatcgaaagtgattttcctccacccccagaagacttccccgcagctgatgagctaccaccgttaccgcccgaattcagcaatcagtttgaatccatccaccctcctagagacatgcctgccgcgggtagcttgggttcttcatcaagaaaccggcagaggttcaacttgaatcagtatttgcccaatttttatcccctcgatatgtctgaacctcaaacaaaaggcactggtgagaatagtacttgtagagaaccccatgccccttacccgccagggtatcaaagacacttcgaggcgcccgctgtcgagagcatgcccatgtctgtgtacgcctccaccgcctcctgctctgacgtgtcagcctgctgcgaagtggagtccgaggtcatgatgagtgactatgagagcggggacgacggccacttcgaagaggtgacgatcccgcccctggattcccagcagcacacggaagtctgactctcaactccccccaaagtgcctgactttagtgaacctagaggtgatgtgagtaatccgcgctgttctttgcagcagtgcttccaagctttttttggtgagccgaatgggcatggctgcgctggatcctgcgcctctggacgtgctagccatttccagtgtcccaactactgtcatcgtgaggttttcatcggctgtgccatttcccaacgtcttttgggatttacatctgtctgtgttaaaataatcaaacgaaaaatcagtcctgtgttgtcagcatgattcatgtatttatatagatttgattattttaattttcctgtctcttttttttgtaaattttatgtacagatttgatttttcatagttttaactagatttccaagatattttgtgcatttgtttcaactgaattttggtggtggtcagtgccattatctagcaccctgattttttttttttactataaccagggtttcattctgtctttttccactgaagtgtgacattttgttagtacatttcagtgtagtcattcatttctagctgtacataggatgaaggagagatcagatacatgaacatgtcttacatgggttgctgtatttagaattataaacatttttcattattggaaagtgtaacggggaccttctgcatacctgtttagaaccaaaaccaccatgacacagtttttatagtgtctgtatatttgtgatgcaatggtcttgtaaaggtttttaatgaaaactaccattagccagtctttcttactgacaataaattattaataaaa

SEQ ID NO: 432323 - DNA, 5154 bp, Homo sapiens
gataaatcggctggtaccgaattcgaaagtgtgcaggcacagatgccgacgcaggattaaatcggaagattttatactcactgattgactctgctgatgggcagttctccattaacgaattatctggaattattcagttagaaaaacctttggacagagaactccaggcagtatacaccctctctttgaaagctgtggatcaaggcttgccaaggaggctgactgccactggcactgtgattgtatcagttcttgacataaatgacaacccccctgtgtttgagtaccgtgaatatggtgccaccgtgtctgaggacattcttgttggaactgaagttcttcaagtgtatgcagcaagtcgggatattgaagcaaatgcagaaatcacctactcaataataagtggaaatgaacatgggaaattcagcatagattctaaaacaggggccgtatttatcattgagaatctggattatgagagctctcatgagtattacctaacagtagaggccactgatggaggcacgccttcactgagcgacgttgccactgtgaacgttaatgtaacagatatcaacgataatacccctgtgttcagccaagacacctacacgacagtcatcagtgaagatgccgttcttgagcagtctgtcatcacggttatggccgatgatgccgatggaccttccaacagccacatccactactcaattatagatggcaaccaaggaagctcgttcacaattgaccccgtcaggggagaagtcaaagtgaccaaacttctcgaccgagaaacgatttcaggttacacgctcacggttcaagcttctgataatggcagtccacccagagtcaacacgacgaccgtgaacatcgatgtgtccgatgtcaatgacaacgcgcccgtcttctccaggggaaactacagtgtcattatccaggaaaataagccagtgggcttcagcgtgctgcagctggtagtaacagatgaggattcttcccataacggtccacccttcttctttactattgtaactggaaatgatgagaaggcttttgaagttaacccgcaaggagtcctcctgacatcatctgccatcaagaggaaggagaaagatcattacttactgcaggtgaaggtggcagataatggaaagcctcagttgtcatctttgacatacattgacattagggtaattgaggagagcatctatccgcctgcgattttgcccctggagattttcatcacctcttctggagaagaatactcaggtggcgtcattgggaagatccatgccacagaccaggacgtgtatgatactctaacctacagtctcgaccctcagatggacaacctgttctctgtttccagcacagggggcaagctgatagcacacaaaaagctagacatagggcaataccttctcaatgtcagcgtaacagatgggaagttcacgacggtggccgacatcacagtgcatatcagacaagtcacacaggagatgttgaaccacaccatcgcgatccgctttgccaacctcactccggaagaattcgttggtgactactggcgcaacttccagcgagctttacggaacatcctgggtgtgaggaggaacgacatacagattgttagtttgcagtcctctgaacctcacccacatctggacgtcttactttttgtagagaaaccaggtagtgctcagatctcaacaaaacaacttctgcacaagattaactcttccgtgactgacattgaggaaatcattggagttaggatactgaatgtattccagaaactctgcgcgggactggactgcccctggaagttctgcgatgaaaaggtgtctgtggatgaaagtgtgatgtcaacacacagcacagccagactgagttttgtgactccccgccaccacagggcagcggtgtgtctctgcaaagagggaaggtgcccacctgtccaccatggctgtgaagatgatccgtgccctgagggatccgaatgtgtgtctgatccctgggaggagaaacacacctgtgtctgtcccagcggcaggtttggtcagtgcccagggagttcatctatgacactgactggaaacagctacgtgaaataccgtctgacggaaaatgaaaacaaattagagatgaaactgaccatgaggctcagaacatattccacgcatgcggttgtcatgtatgctcgaggaactgactatagcatcttggagattcatcatggaaggctgcagtacaagtttgactgtggaagtggccctggaattgtctctgttcagagcattcaggtcaatgatgggcagtggcacgcagtggccctggaagtgaatggaaactatgctcgcttggttctagaccaagttcatactgcatcgggcacagccccagggactctgaaaaccctgaacctggataactatgtgttttttggtggccacatccgtcagcagggaacaaggcatggaagaagtcctcaagttggtaatggtttcaggggttgtatggactccatttatttgaatgggcaggagctccctttaaacagcaaacccagaagctatgcacacatcgaagagtcggtggatgtatctccaggctgcttcctgacggccacggaagactgcgccagcaacccttgccagaatggaggcgtttgcaatccgtcacctgctggaggttattactgcaaatgcagtgccttgtacatagggacccactgtgagataagcgtcaatccgtgttcctccaacccatgcctctatgggggcacgtgtgttgtcgacaacggaggctttgtttgccagtgtagaggattatatactggtcagaggtgtcagcttagtccatactgcaaagatgaaccctgtaagaatggcggaacatgctttgacagtttggatggcgccgtttgtcagtgtgattcgggttttaggggagaaaggtgtcagagtgatatcgacgagtgctctggaaacccttgcctgcacggggccctctgtgagaacacgcacggctcctatcactgcaactgcagccacgagtacaggggacgtcactgcgaggatgctgcgcccaaccagtatgtgtccacgccgtggaacattgggttggcggaaggaattggaatcgttgtgtttgttgcagggatatttttactggtggtggtgtttgttctctgccgtaagatgattagtcggaaaaagaagcatcaggctgaacctaaagacaagcacctgggacccgctacggctttcttgcaaagaccgtattttgattccaagctaaataagaacatttactcagacataccaccccaggtgcctgtccggcctatttcctacaccccgagtattccaagtgactcaagaaacaatctggaccgaaattccttcgaaggatctgctatcccagagcatcccgaattcagcacttttaaccccgagtctgtgcacgggcaccgaaaagcagtggcggtctgcagcgtggcgccaaacctgcctcccccacccccttcaaactccccttctgacagcgactccatccagaagcctagctgggactttgactatgacacaaaagtggtggatcttgatccctgtctttccaagaagcctctagaggaaaagccttcccagccatacagtgcccgggaaagcctgtctgaagtgcagtccctgagctccttccagtccgaatcgtgcgatgacaatgggtatcactgggatacatcagattggatgccaagcgttcctctgccggacatacaagagttccccaactatgaggtgattgatgagcagacacccctgtactcagcagatccaaacgccatcgatacggactattaccctggaggctacgacatcgaaagtgattttcctccacccccagaagacttccccgcagctgatgagctaccaccgttaccgcccgaattcagcaatcagtttgaatccatccaccctcctagagacatgcctgccgcgggtagcttgggttcttcatcaagaaaccggcagaggttcaacttgaatcagtatttgcccaatttttatcccctcgatatgtctgaacctcaaacaaaaggcactggtgagaatagtacttgtagagaaccccatgccccttacccgccagggtatcaaagacacttcgaggcgcccgctgtcgagagcatgcccatgtctgtgtacgcctccaccgcctcctgctctgacgtgtcagcctgctgcgaagtggagtccgaggtcatgatgagtgactatgagagcggggacgacggccacttcgaagaggtgacgatcccgcccctggattcccagcagcacacggaagtctgactctcaactccccccaaagtgcctgactttagtgaacctagaggtgatgtgagtaatccgcgctgttctttgcagcagtgcttccaagctttttttggtgagccgaatgggcatggctgcgctggatcctgcgcctctggacgtgctagccatttccagtgtcccaactactgtcatcgtgaggttttcatcggctgtgccatttcccaacgtcttttgggatttacatctgtctgtgttaaaataatcaaacgaaaaatcagtcctgtgttgtcagcatgattcatgtatttatatagatttgattattttaattttcctgtctcttttttttgtaaattttatgtacagatttgatttttcatagttttaactagatttccaagatattttgtgcatttgtttcaactgaattttggtggtggtcagtgccattatctagcaccctgattttttttttttactataaccagggtttcattctgtctttttccactgaagtgtgacattttgttagtacatttcagtgtagtcattcatttctagctgtacataggatgaaggagagatcagatacatgaacatgtcttacatgggttgctgtatttagaattataaacatttttcattattggaaagtgtaacggggaccttctgcatacctgtttagaaccaaaaccaccatgacacagtttttatagtgtctgtatatttgtgatgcaatggtcttgtaaaggtttttaatgaaaactaccattagccagtctttcttactgacaataaattattaataaaa

SEQ ID NO: 432324 - DNA, 4079 bp, Homo sapiens
ctagaggagtcctaacgatacagttcagaggaaggagaaagatcataacttactgcaggtgaaggtggcagataatggaaagcctcagttgtcatctttgacatacattgacattagggtaattgaggagagcatctatccgcctgcgattttgcccctggagattttcatcacctcttctggagaagaatactcaggtggcgtcattgggaagatccatgccacagaccaggacgtgtatgatactctaacctacagtctcgaccctcagatggacaacctgttctctgtttccagcacagggggcaagctgatagcacacaaaaagctagacatagggcaataccttctcaatgtcagcgtaacagatgggaagttcacgacggtggccgacatcacagtgcatatcagacaagtcacacaggagatgttgaaccacaccatcgcgatccgctttgccaacctcactccggaagaattcgttggtgactactggcgcaacttccagcgagctttacggaacatcctgggtgtgaggaggaacgacatacagattgttagtttgcagtcctctgaacctcacccacatctggacgtcttactttttgtagagaaaccaggtagtgctcagatctcaacaaaacaacttctgcacaagattaactcttccgtgactgacattgaggaaatcattggagttaggatactgaatgtattccagaaactctgcgcgggactggactgcccctggaagttctgcgatgaaaaggtgtctgtggatgaaagtgtgatgtcaacacacagcacagccagactgagttttgtgactccccgccaccacagggcagcggtgtgtctctgcaaagagggaaggtgcccacctgtccaccatggctgtgaagatgatccgtgccctgagggatccgaatgtgtgtctgatccctgggaggagaaacacacctgtgtctgtcccagcggcaggtttggtcagtgcccagggagttcatctatgacactgactggaaacagctacgtgaaataccgtctgacggaaaatgaaaacaaattagagatgaaactgaccatgaggctcagaacatattccacgcatgcggttgtcatgtatgctcgaggaactgactatagcatcttggagattcatcatggaaggctgcagtacaagtttgactgtggaagtggccctggaattgtctctgttcagagcattcaggtcaatgatgggcagtggcacgcagtggccctggaagtgaatggaaactatgctcgcttggttctagaccaagttcatactgcatcgggcacagccccagggactctgaaaaccctgaacctggataactatgtgttttttggtggccacatccgtcagcagggaacaaggcatggaagaagtcctcaagttggtaatggtttcaggggttgtatggactccatttatttgaatgggcaggagctccctttaaacagcaaacccagaagctatgcacacatcgaagagtcggtggatgtatctccaggctgcttcctgacggccacggaagactgcgccagcaacccttgccagaatggaggcgtttgcaatccgtcacctgctggaggttattactgcaaatgcagtgccttgtacatagggacccactgtgagataagcgtcaatccgtgttcctccaacccatgcctctatgggggcacgtgtgttgtcgacaacggaggctttgtttgccagtgtagaggattatatactggtcagaggtgtcagcttagtccatactgcaaagatgaaccctgtaagaatggcggaacatgctttgacagtttggatggcgccgtttgtcagtgtgattcgggttttaggggagaaaggtgtcagagtgatatcgacgagtgctctggaaacccttgcctgcacggggccctctgtgagaacacgcacggctcctatcactgcaactgcagccacgagtacaggggacgtcactgcgaggatgctgcgcccaaccagtatgtgtccacgccgtggaacattgggttggcggaaggaattggaatcgttgtgtttgttgcagggatatttttactggtggtggtgtttgttctctgccgtaagatgattagtcggaaaaagaagcatcaggctgaacctaaagacaagcacctgggacccgctacggctttcttgcaaagaccgtattttgattccaagctaaataagaacatttactcagacataccaccccaggtgcctgtccggcctatttcctacaccccgagtattccaagtgactcaagaaacaatctggaccgaaattccttcgaaggatctgctatcccagagcatcccgaattcagcacttttaaccccgagtctgtgcacgggcaccgaaaagcagtggcggtctgcagcgtggcgccaaacctgcctcccccacccccttcaaactccccttctgacagcgactccatccagaagcctagctgggactttgactatgacacaaaagtggtggatcttgatccctgtctttccaagaagcctctagaggaaaagccttcccagccatacagtgcccgggaaagcctgtctgaagtgcagtccctgagctccttccagtccgaatcgtgcgatgacaatgggtatcactgggatacatcagattggatgccaagcgttcctctgccggacatacaagagttccccaactatgaggtgattgatgagcagacacccctgtactcagcagatccaaacgccatcgatacggactattaccctggaggctacgacatcgaaagtgattttcctccacccccagaagacttccccgcagctgatgagctaccaccgttaccgcccgaattcagcaatcagtttgaatccatccaccctcctagagacatgcctgccgcgggtagcttgggttcttcatcaagaaaccggcagaggttcaacttgaatcagtatttgcccaatttttatcccctcgatatgtctgaacctcaaacaaaaggcactggtgagaatagtacttgtagagaaccccatgccccttacccgccagggtatcaaagacacttcgaggcgcccgctgtcgagagcatgcccatgtctgtgtacgcctccaccgcctcctgctctgacgtgtcagcctgctgcgaagtggagtccgaggtcatgatgagtgactatgagagcggggacgacggccacttcgaagaggtgacgatcccgcccctggattcccagcagcacacggaagtctgactctcaactccccccaaagtgcctgactttagtgaacctagaggtgatgtgagtaatccgcgctgttctttgcagcagtgcttccaagctttttttggtgagccgaatgggcatggctgcgctggatcctgcgcctctggacgtgctagccatttccagtgtcccaactactgtcatcgtgaggttttcatcggctgtgccatttcccaacgtcttttgggatttacatctgtctgtgttaaaataatcaaacgaaaaatcagtcctgtgttgtcagcatgattcatgtatttatatagatttgattattttaattttcctgtctcttttttttgtaaattttatgtacagatttgatttttcatagttttaactagatttccaagatattttgtgcatttgtttcaactgaattttggtggtggtcagtgccattatctagcaccctgattttttttttttactataaccagggtttcattctgtctttttccactgaagtgtgacattttgttagtacatttcagtgtagtcattcatttctagctgtacataggatgaaggagagatcagatacatgaacatgtcttacatgggttgctgtatttagaattataaacatttttcattattggaaagtgtaacggggaccttctgcatacctgtttagaaccaaaaccaccatgacacagtttttatagtgtctgtatatttgtgatgcaatggtcttgtaaaggtttttaatgaaaactaccattagccagtctttcttactgacaataaattattaataaaa

SEQ ID NO: 432325 - DNA, 2755 bp, Homo sapiens
cagatgtgatgatctcctttcttaaatctttacatgtttgagaggctgaggcaggaggatcacttgaggctagaagtgaggcagcctgggcgttacagggaaaccccatctctacaaaaacttaaaaaatcagccaggcatgtggcatgcctctagttccagctactcaggaggctgaggtgggaggatccctgagcccgggagtttgaggatgcaatgagctgagattgcgccactgcactccagcctgggtggcagagcgagaccctgtctcaaaaaataaaaatattgaaaggttattactgcaaatgcagtgccttgtacatagggacccactgtgagataagcgtcaatccgtgttcctccaacccatgcctctatgggggcacgtgtgttgtcgacaacggaggctttgtttgccagtgtagaggattatatactggtcagaggtgtcagcttagtccatactgcaaagatgaaccctgtaagaatggcggaacatgctttgacagtttggatggcgccgtttgtcagtgtgattcgggttttaggggagaaaggtgtcagagtgatatcgacgagtgctctggaaacccttgcctgcacggggccctctgtgagaacacgcacggctcctatcactgcaactgcagccacgagtacaggggacgtcactgcgaggatgctgcgcccaaccagtatgtgtccacgccgtggaacattgggttggcggaaggaattggaatcgttgtgtttgttgcagggatatttttactggtggtggtgtttgttctctgccgtaagatgattagtcggaaaaagaagcatcaggctgaacctaaagacaagcacctgggacccgctacggctttcttgcaaagaccgtattttgattccaagctaaataagaacatttactcagacataccaccccaggtgcctgtccggcctatttcctacaccccgagtattccaagtgactcaagaaacaatctggaccgaaattccttcgaaggatctgctatcccagagcatcccgaattcagcacttttaaccccgagtctgtgcacgggcaccgaaaagcagtggcggtctgcagcgtggcgccaaacctgcctcccccacccccttcaaactccccttctgacagcgactccatccagaagcctagctgggactttgactatgacacaaaagtggtggatcttgatccctgtctttccaagaagcctctagaggaaaagccttcccagccatacagtgcccgggaaagcctgtctgaagtgcagtccctgagctccttccagtccgaatcgtgcgatgacaatgggtatcactgggatacatcagattggatgccaagcgttcctctgccggacatacaagagttccccaactatgaggtgattgatgagcagacacccctgtactcagcagatccaaacgccatcgatacggactattaccctggaggctacgacatcgaaagtgattttcctccacccccagaagacttccccgcagctgatgagctaccaccgttaccgcccgaattcagcaatcagtttgaatccatccaccctcctagagacatgcctgccgcgggtagcttgggttcttcatcaagaaaccggcagaggttcaacttgaatcagtatttgcccaatttttatcccctcgatatgtctgaacctcaaacaaaaggcactggtgagaatagtacttgtagagaaccccatgccccttacccgccagggtatcaaagacacttcgaggcgcccgctgtcgagagcatgcccatgtctgtgtacgcctccaccgcctcctgctctgacgtgtcagcctgctgcgaagtggagtccgaggtcatgatgagtgactatgagagcggggacgacggccacttcgaagaggtgacgatcccgcccctggattcccagcagcacacggaagtctgactctcaactccccccaaagtgcctgactttagtgaacctagaggtgatgtgagtaatccgcgctgttctttgcagcagtgcttccaagctttttttggtgagccgaatgggcatggctgcgctggatcctgcgcctctggacgtgctagccatttccagtgtcccaactactgtcatcgtgaggttttcatcggctgtgccatttcccaacgtcttttgggatttacatctgtctgtgttaaaataatcaaacgaaaaatcagtcctgtgttgtcagcatgattcatgtatttatatagatttgattattttaattttcctgtctcttttttttgtaaattttatgtacagatttgatttttcatagttttaactagatttccaagatattttgtgcatttgtttcaactgaattttggtggtggtcagtgccattatctagcaccctgattttttttttttactataaccagggtttcattctgtctttttccactgaagtgtgacattttgttagtacatttcagtgtagtcattcatttctagctgtacataggatgaaggagagatcagatacatgaacatgtcttacatgggttgctgtatttagaattataaacatttttcattattggaaagtgtaacggggaccttctgcatacctgtttagaaccaaaaccaccatgacacagtttttatagtgtctgtatatttgtgatgcaatggtcttgtaaaggtttttaatgaaaactaccattagccagtctttcttactgacaataaattattaataaaa

SEQ ID NO: 432326 - DNA, 15499 bp, Homo sapiens
ccgaaggaggagggcgggcgtttcacccgcgccacagctgcggccggccagagagaccgcagaggccgggacccccgcagcctccacggccgctgctgccactgtcggggtggcgcgcccagccggagaatcccgtccgcgcccggggcggggggcgaggcggggcgctgacgtcacctcccctcccccaccgcctccaagggggagggagtggggaaagaggcagcgagtcgccgcagccggcggccgcaactcctcaactcggcggctggctgcctgggcacgtcctgacaaacttggctgctcccgggccctcgttccggccccgcgcactctcttttcgcctgcgtttggtgcttaagtttgccctggtcggaagcctccggagatgcggccgcctgggtcccggcggcacggacgttggcactctggttagggacatgctgaagatcccggggaggcaaagttggtacttcaaacccggctcttaacacatatctacaccgcgaggggatcacggagctgccgaggactttagagcccagggccgaggactcggctagactgattcccgacagttaagcaatggggagacatttggctttgctcctgcttctgctccttctcttccaacattttggagacagtgatggcagccaacgacttgaacagactcctctgcagtttacacacctcgagtacaacgtcaccgtgcaggagaactctgcagctaagacttatgtggggcatcctgtcaagatgggtgtttacattacacatccagcgtgggaagtaaggtacaaaattgtttccggagacagtgaaaacctgttcaaagctgaagagtacattctcggagacttttgctttctaagaataaggaccaaaggaggaaatacagctattcttaatagagaagtgaaggatcactacacattgatagtgaaagcacttgaaaaaaatactaatgtggaggcgcgaacaaaggtcagggtgcaggtgctggatacaaatgacttgagaccgttattctcacccacctcatacagcgtttctttacctgaaaacacagctataaggaccagtatcgcaagagtcagcgccacggatgcagacataggaaccaacggggaattttactacagttttaaagatcgaacagatatgtttgctattcacccaaccagtggtgtgatagtgttaactggtagacttgattacctagagaccaagctctatgagatggaaatcctcgctgcggaccgtggcatgaagttgtatgggagcagtggcatcagcagcatggccaagctaacggtgcacatcgaacaggccaatgaatgtgctccggtgataacagcagtgacattgtcaccatcagaactggacagggacccagcatatgcaattgtgacagtggatgactgcgatcagggtgccaatggtgacatagcatctttaagcatcgtggcaggtgaccttctccagcagtttagaacagtgaggtcctttccagggagtaaggagtataaagtcaaagccatcggtgacattgattgggacagtcatcctttcggctacaatctcacactacaggctaaagataaaggaactccgccccagttctcttctgttaaagtcattcacgtgacttctccacagttcaaagccgggccagtcaagtttgaaaaggatgtttacagagcagaaataagtgaatttgctcctcccaacacacctgtggtcatggtaaaggccattcctgcttattcccatttgaggtatgtttttaaaaggacacctggaaaagctaaattcagtttaaattacaacactggtctcatttctattttagaaccagttaaaagacagcaggcagcccattttgaacttgaagtaacaacaagtgacagaaaagcgtccaccaaggtcttggtgaaagtcttaggtgcaaatagcaatccccctgaatttacccagacagcgtacaaagctgcttttgatgagaacgtgcccattggtactactatcatgagcctgagtgccgtagaccctgatgagggtgagaatgggtacgtgacatacagtatcgcaaatttaaatcatgtgccgtttgcgattgaccatttcactggtgccgtgagtacgtcagaaaacctggactacgaactgatgcctcgggtttatactctgaggattcgtgcatcagactggggcttgccgtaccgccgggaagtcgaagtccttgctacaattactctcaataacttgaatgacaacacacctttgtttgagaaaataaattgtgaagggacaattcccagagatctaggcgtgggagagcaaataaccactgtttctgctattgatgcagatgaacttcagttggtacagtatcagattgaagctggaaatgaactggatttgtttagtttaaaccccaactcgggggtattgtcattaaagcgatcgctaatggatggcttaggtgcaaaggtgtctttccacagtctgagaatcacagctacagatggagaaaattttgccacaccattatatatcaacataacagtggctgccagtcacaagctggtaaacttgcagtgtgaagagactggtgttgccaaaatgctggcagagaagctcctgcaggcaaataaattacacaaccagggagaggtggaggatattttcttcgattctcactctgtcaatgctcacataccgcagtttagaagcactcttccgactggtattcaggtaaaggaaaaccagcctgtgggttccagtgtaattttcatgaactccactgaccttgacactggcttcaatggaaaactggtctatgctgtttctggaggaaatgaggatagttgcttcatgattgatatggaaacaggaatgctgaaaattttatctcctcttgaccgtgaaacaacagacaaatacaccctgaatattaccgtctatgaccttgggataccccagaaggctgcgtggcgtcttctacatgtcgtggttgtcgatgccaatgataatccacccgagtttttacaggagagctattttgtggaagtgagtgaagacaaggaggtacatagtgaaatcatgcaggttgaagccacagataaagacctggggcccaacggacacgtgacgtactcaattcttacagacacagacacattttcaattgacagcgtgacgggtgttgttaacatcgcacgccctctggatcgagagctgcagcatgagcactccttaaagattgaggccagggaccaagccagagaagagcctcagctgttctccactgtcgttgtgaacagtatcactagaagatgttaatgacaacccacctacatttattccacctaattatcgtgtgaaagtccgagaggatcttccagaaggaaccgtcatcatgtggttagaagcccacgatcctgatttaggtcagtctggtcaggtgagatacagccttctggaccacggagaaggaaacttcgatgtggataaactcagtggagcagttaggatcgtccagcagttggactttgagaagaagcaagtgtataatctcactgtgagggccaaagacaagggaaagccagtttctctgtcttctacttgctatgttgaagttgaggtggttgatgtgaatgagaacctgcacccacccgtgttttccagctttgtggaaaaggggacagtgaaagaagatgcacctgttggttcattggtaatgacggtgtcggctcatgatgaggacgccggaagagatggggagatccgatactccattagagatggctctggcgttggtgttttcaaaataggtgaagagacaggtgtcatagagacgtcagatcgactggaccgtgaatcgacctcccattattggctaacagtctttgcaaccgatcagggtgtcgtgcctctttcatcgttcatagagatctacatagaggttgaggatgtcaatgacaatgcaccacagacatcagagcctgtttattacccagaaatcatggaaaattctcctaaagatgtatctgtggtccagatcgaggcatttgatccagattcgagctctaatgacaagctcatgtacaaaattacaagtggaaatccacaaggattcttttcaatacatcctaaaacaggtctcatcacaactacgtcaaggaagctagaccgagaacagcaagatgaacacatattagaggttactgtgacagacaatggtagtccccccaaatcaaccattgcaagagtcattgtgaaaatccttgatgaaaatgacaacaaacctcagtttctgcaaaagttctacaaaatcagactccctgagcgggaaaagccagaccgagaaagaaatgccagacgggagccgctctatcgcgtcatagccaccgacaaggatgagggccccaatgcagaaatctcctacagcatcgaagacgggaatgagcatggcaaatttttcatcgaaccgaaaactggagtggtttcgtccaagaggttttcagcagctggagaatatgatattctttcaattaaggcagttgacaatggtcgccctcaaaagtcatcaaccaccagactccatattgaatggatctccaagcccaaacagtccctggagcccatttcatttgaagaatcattttttacctttactgtgatggaaagtgaccccgttgctcacatgattggagtaatatctgtggagcctcctggcatacccctttggtttgacatcactggtggcaactacgacagtcacttcgatgtggacaagggaactggaaccatcattgttgccaaacctcttgatgcagaacagaagtcaaactacaacctcacagtcgaggctacagatggaaccaccactatcctcactcaggtattcatcaaagtaatagacacaaatgaccatcgtcctcagttttctacatcaaagtatgaagttgttattcctgaagatacagcgccagaaacagaaattttgcaaatcagtgctgtggatcaggatgagaaaaacaaactaatctacactctgcagagcagtagagatccactgagtctcaagaaatttcgtcttgatcctgcaaccggctctctctatacttctgagaaactggatcatgaagctgtttcaccagcacacctcacggtcatggtacgagatcaagatgtgcctgtaaaacgcaactttgcaaggattgtggtcaatgtcagcgacacgaatgaccacgccccgtggttcaccgcttcctcctacaaagggcgggtttatgaatcggcagccgttggctcagttgtgttgcaggtgacggctctggacaaggacaaagggaaaaatgctgaagtgctgtactcgatcgagtcaggaaatattggaaatattggaaattcttttatgattgatcctgtcttgggctctattaaaactgccaaagaattagatcgaagtaaccaagcggagtatgatttaatggtaaaagctacagataagggcagtccaccaatgagtgaaataacttctgtgcgtatctttgtcacaattgctgacaacgcctctccgaagtttacatcaaaagaatattctgttgaacttagtgaaactgtcagcattgggagtttcgttgggatggttacagcccatagtcaatcatcagtggtgtatgaaataaaagatggaaatacaggtgatgcttttgatattaatccacattctggaactatcatcactcagaaagccctggactttgaaactttgcccatttacacattgataatacaaggaactaacatggctggtttgtccactaatacaacggttctagttcacttgcaggatgagaatgacaacgcgccagtttttatgcaggcagaatatacaggactcattagtgaatcagcctcaattaacagcgtggtcctaacagacaggaatgtcccactggtgattcgagcagctgatgctgataaagactcaaatgctttgcttgtatatcacattgttgaaccatctgtacacacatattttgctattgattctagcactggtgctattcatacagtactaagtctggactatgaagaaacaagtatttttcactttaccgtccaagtgcatgacatgggaaccccacgtttatttgctgagtatgcagcgaatgtaacagtacatgtaattgacattaatgactgcccccctgtgtttgccaagccattatatgaagcatctcttttgttaccaacatacaaaggagtaaaagtcatcacagtaaatgctacagatgctgattcaagtgcattctcacagttgatttactccatcaccgaaggcaacatcggggagaagttttctatggactacaagactggtgctctcactgtccaaaacacaactcagttaagaagccgctacgagctaaccgttagagcttccgatggcagatttgccggccttacctctgtcaaaattaatgtgaaagaaagcaaagaaagtcacctaaagtttacccaggatgtctactctgcggtagtgaaagagaattccaccgaggccgaaacattagctgtcattactgctattgggagtccaatcaatgagcctttgttttatcacatcctcaacccagatcgcagatttaaaataagccgcacttcaggggttctgtcaaccactggcacgcccttcgatcgtgagcagcaggaggcgtttgatgtggttgtagaagtgatagaggaacataagccttctgcagtggcccacgttgtcgtgaaggtcattgtagaagaccaaaatgataatgcgccggtgtttgtcaaccttccctactacgccgttgttaaagtggacactgaggtgggccatgtcattcgctatgtcactgctgtagacagagacagtggcagaaacggggaagtgcattactacctcaaggaacatcatgaacactttcaaattggacccttgggtgaaatttcactgaaaaagcaatttgagcttgacaccttaaataaagaatatcttgttacagtggttgcaaaagatggagggaacccggccttttcagcggaagttatcgttccgatcactgtcatgaataaagccatgcctgtgtttgaaaaacctttctacagtgcagagattgcagagagcatccaggtgcacagccctgtggtccacgtgcaggctaacagcccggaaggcctgaaagtgttctacagcatcacagacggagaccctttcagccagttcactattaacttcaatactggagttatcaatgtcatagctcctctggactttgaggcccacccggcatataagctgagcatacgcgcaactgactccttgacgggcgctcatgctgaagtatttgtggacatcatagtagacgacatcaatgataaccctcctgtgtttgctcagcagtcttatgcggtgaccctgtctgaggcatctgtaattggaacgtctgttgttcaagttagagccaccgattctgattcagaaccaaatagaggaatctcataccagatgtttgggaatcacagcaagagtcatgatcattttcatgtagacagcagcactggcctcatctcactactcagaaccctggattacgagcagtcccggcagcacacgatttttgtgagggcagttgatggtggtatgcccacgctgagcagtgatgtgattgtcacggtggacgttaccgacctcaatggtaatccaccactctttgaacaacagatttatgaagccagaattagcgagcacgcccctcatgggcatttcgtgacctgtgtaaaagcctatgatgcagacagttcagacatagacaagttgcagtattccattctgtctggcaatgatcataaacattttgtcattgacagtgcaacagggattatcaccctctcaaacctgcaccggcacgccctgaagccattttacagtcttaacctgtcagtgtctgatggagtttttagaagttccacccaggttcatgtaactgtaattggaggcaatttgcacagtcctgctttccttcagaacgaatatgaagtggaactagctgaaaacgctcccctacataccctggtgatggaggtgaaaactacggatggggattctggtatttatggtcacgttacttaccatattgtaaatgactttgccaaagacagattttacataaatgagagaggacagatatttactttggaaaaacttgatcgagaaaccccggcggagaaagtgatctcagtccgtttaatggctaaggatgctggaggaaaagttgctttctgcaccgtgaatgtcatccttacagatgacaatgacaatgcaccacaatttcgagcaaccaaatacgaagtgaatatcgggtccagtgctgctaaagggacttcagtcgtaaagtctgcaagtgatgccgatgagggctccaatgccgacatcacctatgccattgaagcagactctgaaagtgtaaaagagaatttggaaattaacaaactgtccggcgtaatcactacaaaggagagcctcattggcttggaaaatgaattcttcactttctttgttagagctgtggataatgggtctccatcaaaagaatctgttgttcttgtctatgttaaaatccttccaccggaaatgcagcttccaaaattttcagaacctttctatacctttacagtgtcagaggacgtgcctgttggaacagagatagatctcatccgagcagaacatagtgggactgttctttacagcctggtcaaagggaatactccagaaagcaatagggatgagtcctttgtgattgacagacagagcgggagactgaagttggagaagagtcttgatcatgagacaactaagtggtatcagttttccatactggccaggtgcactcaagatgaccatgagatggtggcttctgtagatgttagtatccaagtgaaagatgcaaatgacaacagcccggtctttgaatctagtccatatgaggcattcattgttgaaaacctgccagggggaagtagagtaattcagatcagggcatctgatgctgactcaggaaccaacggccaagttatgtatagcctggatcagtcacaaagtgtggaagtcattgaatcctttgccattaacatggaaacaggctggattacaactttaaaggaacttgaccatgaaaagagagacaattaccagattaaagtggttgcatcagatcatggtgaaaagatccagctatcctccacagccattgtggatgttaccgtcaccgatgtcaacgatagtccaccacgattcacggccgagatctataaagggactgtgagtgaggatgacccccaaggtggggtgattgccatcttaagtaccacggatgctgattctgaagagatcaacagacaagttacatatttcataacaggaggggatcctttaggacagtttgccgttgaaactatacagaatgaatggaaggtatatgtgaagaaacctctagacagggaaaaaagggacaattaccttcttactatcacggcaactgatggcaccttctcatcaaaagcgatagttgaagtgaaagttctggatgcaaatgacaacagtccagtttgtgaaaagactttatattcagacactattcctgaagacgtccttcctggaaaattgatcatgcagatctctgctacagacgcagacatccgctctaacgctgaaattacttacacgttattgggttcaggtgcagaaaaattcaaactaaatccagacacaggtgaactgaaaacgtcaaccccccttgatcgtgaggagcaagctgtttatcatcttctcgtcagggccacagatggaggaggaagattctgccaagccagtattgtgctcacgctagaagatgtgaacgataacgcccccgaattctctgccgatccttatgccatcaccgtgtttgaaaacacagagccgggaacgctgctgacaagagtgcaggccacagatgccgacgcaggattaaatcggaagattttatactcactgattgactctgctgatgggcagttctccattaacgaattatctggaattattcagttagaaaaacctttggacagagaactccaggcagtatacaccctctctttgaaagctgtggatcaaggcttgccaaggaggctgactgccactggcactgtgattgtatcagttcttgacataaatgacaacccccctgtgtttgagtaccgtgaatatggtgccaccgtgtctgaggacattcttgttggaactgaagttcttcaagtgtatgcagcaagtcgggatattgaagcaaatgcagaaatcacctactcaataataagtggaaatgaacatgggaaattcagcatagattctaaaacaggggccgtatttatcattgagaatctggattatgagagctctcatgagtattacctaacagtagaggccactgatggaggcacgccttcactgagcgacgttgccactgtgaacgttaatgtaacagatatcaacgataatacccctgtgttcagccaagacacctacacgacagtcatcagtgaagatgccgttcttgagcagtctgtcatcacggttatggccgatgatgccgatggaccttccaacagccacatccactactcaattatagatggcaaccaaggaagctcgttcacaattgaccccgtcaggggagaagtcaaagtgaccaaacttctcgaccgagaaacgatttcaggttacacgctcacggttcaagcttctgataatggcagtccacccagagtcaacacgacgaccgtgaacatcgatgtgtccgatgtcaatgacaacgcgcccgtcttctccaggggaaactacagtgtcattatccaggaaaataagccagtgggcttcagcgtgctgcagctggtagtaacagatgaggattcttcccataacggtccacccttcttctttactattgtaactggaaatgatgagaaggcttttgaagttaacccgcaaggagtcctcctgacatcatctgccatcaagaggaaggagaaagatcattacttactgcaggtgaaggtggcagataatggaaagcctcagttgtcatctttgacatacattgacattagggtaattgaggagagcatctatccgcctgcgattttgcccctggagattttcatcacctcttctggagaagaatactcaggtggcgtcattgggaagatccatgccacagaccaggacgtgtatgatactctaacctacagtctcgaccctcagatggacaacctgttctctgtttccagcacagggggcaagctgatagcacacaaaaagctagacatagggcaataccttctcaatgtcagcgtaacagatgggaagttcacgacggtggccgacatcacagtgcatatcagacaagtcacacaggagatgttgaaccacaccatcgcgatccgctttgccaacctcactccggaagaattcgttggtgactactggcgcaacttccagcgagctttacggaacatcctgggtgtgaggaggaacgacatacagattgttagtttgcagtcctctgaacctcacccacatctggacgtcttactttttgtagagaaaccaggtagtgctcagatctcaacaaaacaacttctgcacaagattaactcttccgtgactgacattgaggaaatcattggagttaggatactgaatgtattccagaaactctgcgcgggactggactgcccctggaagttctgcgatgaaaaggtgtctgtggatgaaagtgtgatgtcaacacacagcacagccagactgagttttgtgactccccgccaccacagggcagcggtgtgtctctgcaaagagggaaggtgcccacctgtccaccatggctgtgaagatgatccgtgccctgagggatccgaatgtgtgtctgatccctgggaggagaaacacacctgtgtctgtcccagcggcaggtttggtcagtgcccagggagttcatctatgacactgactggaaacagctacgtgaaataccgtctgacggaaaatgaaaacaaattagagatgaaactgaccatgaggctcagaacatattccacgcatgcggttgtcatgtatgctcgaggaactgactatagcatcttggagattcatcatggaaggctgcagtacaagtttgactgtggaagtggccctggaattgtctctgttcagagcattcaggtcaatgatgggcagtggcacgcagtggccctggaagtgaatggaaactatgctcgcttggttctagaccaagttcatactgcatcgggcacagccccagggactctgaaaaccctgaacctggataactatgtgttttttggtggccacatccgtcagcagggaacaaggcatggaagaagtcctcaagttggtaatggtttcaggggttgtatggactccatttatttgaatgggcaggagctccctttaaacagcaaacccagaagctatgcacacatcgaagagtcggtggatgtatctccaggctgcttcctgacggccacggaagactgcgccagcaacccttgccagaatggaggcgtttgcaatccgtcacctgctggaggttattactgcaaatgcagtgccttgtacatagggacccactgtgagataagcgtcaatccgtgttcctccaacccatgcctctatgggggcacgtgtgttgtcgacaacggaggctttgtttgccagtgtagaggattatatactggtcagaggtgtcagcttagtccatactgcaaagatgaaccctgtaagaatggcggaacatgctttgacagtttggatggcgccgtttgtcagtgtgattcgggttttaggggagaaaggtgtcagagtgatatcgacgagtgctctggaaacccttgcctgcacggggccctctgtgagaacacgcacggctcctatcactgcaactgcagccacgagtacaggggacgtcactgcgaggatgctgcgcccaaccagtatgtgtccacgccgtggaacattgggttggcggaaggaattggaatcgttgtgtttgttgcagggatatttttactggtggtggtgtttgttctctgccgtaagatgattagtcggaaaaagaagcatcaggctgaacctaaagacaagcacctgggacccgctacggctttcttgcaaagaccgtattttgattccaagctaaataagaacatttactcagacataccaccccaggtgcctgtccggcctatttcctacaccccgagtattccaagtgactcaagaaacaatctggaccgaaattccttcgaaggatctgctatcccagagcatcccgaattcagcacttttaaccccgagtctgtgcacgggcaccgaaaagcagtggcggtctgcagcgtggcgccaaacctgcctcccccacccccttcaaactccccttctgacagcgactccatccagaagcctagctgggactttgactatgacacaaaagtggtggatcttgatccctgtctttccaagaagcctctagaggaaaagccttcccagccatacagtgcccgggaaagcctgtctgaagtgcagtccctgagctccttccagtccgaatcgtgcgatgacaatgggtatcactgggatacatcagattggatgccaagcgttcctctgccggacatacaagagttccccaactatgaggtgattgatgagcagacacccctgtactcagcagatccaaacgccatcgatacggactattaccctggaggctacgacatcgaaagtgattttcctccacccccagaagacttccccgcagctgatgagctaccaccgttaccgcccgaattcagcaatcagtttgaatccatccaccctcctagagacatgcctgccgcgggtagcttgggttcttcatcaagaaaccggcagaggttcaacttgaatcagtatttgcccaatttttatcccctcgatatgtctgaacctcaaacaaaaggcactggtgagaatagtacttgtagagaaccccatgccccttacccgccagggtatcaaagacacttcgaggcgcccgctgtcgagagcatgcccatgtctgtgtacgcctccaccgcctcctgctctgacgtgtcagcctgctgcgaagtggagtccgaggtcatgatgagtgactatgagagcggggacgacggccacttcgaagaggtgacgatcccgcccctggattcccagcagcacacggaagtctgactctcaactccccccaaagtgcctgactttagtgaacctagaggtgatgtgagtaatccgcgctgttctttgcagcagtgcttccaagctttttttggtgagccgaatgggcatggctgcgctggatcctgcgcctctggacgtgctagccatttccagtgtcccaactactgtcatcgtgaggttttcatcggctgtgccatttcccaacgtcttttgggatttacatctgtctgtgttaaaataatcaaacgaaaaatcagtcctgtgttgtcagcatgattcatgtatttatatagatttgattattttaattttcctgtctcttttttttgtaaattttatgtacagatttgatttttcatagttttaactagatttccaagatattttgtgcatttgtttcaactgaattttggtggtggtcagtgccattatctagcaccctgattttttttttttactataaccagggtttcattctgtctttttccactgaagtgtgacattttgttagtacatttcagtgtagtcattcatttctagctgtacataggatgaaggagagatcagatacatgaacatgtcttacatgggttgctgtatttagaattataaacatttttcattattggaaagtgtaacggggaccttctgcatacctgtttagaaccaaaaccaccatgacacagtttttatagtgtctgtatatttgtgatgcaatggtcttgtaaaggtttttaatgaaaactaccattagccagtctttcttactgacaataaattattaataaaaataaaaaacagaagaaaaagaacgaccaacgagctaaaaaggacgcagcacgagccacgatcgctgaaacacacgagacagagagcgaaagggggggggcgggggccgaactaagaaaatctcccacgagggggaggcaggccacaatagataggtacgaaaccaccgcggtttcgtggcaggacaaggaggctgcccaataaacataggagttgcgcattatataaacggaggaagcagcgggcggtgtaaataacaacggggtgggtgggtaagaacaagatagtggtgtagagtgctagctgagaagacgccacctcggggggggggacacattcggagca

SEQ ID NO: 432327 - DNA, 1584 bp, Homo sapiens
gctcgcagtgggcacggtatacaaaagtggtggatcttgatccctgtctttccaagaagcctctagaggaaaagccttcccagccatacagtgcccgggaaagcctgtctgaagtgcagtccctgagctccttccagtccgaatcgtgcgatgacaatgggtatcactgggatacatcagattggatgccaagcgttcctctgccggacatacaagagttccccaactatgaggtgattgatgagcagacacccctgtactcagcagatccaaacgccatcgatacggactattaccctggaggctacgacatcgaaagtgattttcctccacccccagaagacttccccgcagctgatgagctaccaccgttaccgcccgaattcagcaatcagtttgaatccatccaccctcctagagacatgcctgccgcgggtagcttgggttcttcatcaagaaaccggcagaggttcaacttgaatcagtatttgcccaatttttatcccctcgatatgtctgaacctcaaacaaaaggcactggtgagaatagtacttgtagagaaccccatgccccttacccgccagggtatcaaagacacttcgaggcgcccgctgtcgagagcatgcccatgtctgtgtacgcctccaccgcctcctgctctgacgtgtcagcctgctgcgaagtggagtccgaggtcatgatgagtgactatgagagcggggacgacggccacttcgaagaggtgacgatcccgcccctggattcccagcagcacacggaagtctgactctcaactccccccaaagtgcctgactttagtgaacctagaggtgatgtgagtaatccgcgctgttctttgcagcagtgcttccaagctttttttggtgagccgaatgggcatggctgcgctggatcctgcgcctctggacgtgctagccatttccagtgtcccaactactgtcatcgtgaggttttcatcggctgtgccatttcccaacgtcttttgggatttacatctgtctgtgttaaaataatcaaacgaaaaatcagtcctgtgttgtcagcatgattcatgtatttatatagatttgattattttaattttcctgtctcttttttttgtaaattttatgtacagatttgatttttcatagttttaactagatttccaagatattttgtgcatttgtttcaactgaattttggtggtggtcagtgccattatctagcaccctgattttttttttttactataaccagggtttcattctgtctttttccactgaagtgtgacattttgttagtacatttcagtgtagtcattcatttctagctgtacataggatgaaggagagatcagatacatgaacatgtcttacatgggttgctgtatttagaattataaacatttttcattattggaaagtgtaacggggaccttctgcatacctgtttagaaccaaaaccaccatgacacagtttttatagtgtctgtatatttgtgatgcaatggtcttgtaaaggtttttaatgaaaactaccattagccagtctttcttactgacaataaattattaataaaa

SEQ ID NO: 432328 - DNA, 1206 bp, Homo sapiens
agaggatcccgggcagaagatacctcatccaccctcctagagacatgcctgccgcgggtagcttgggttcttcatcaagaaaccggcagaggttcaacttgaatcagtatttgcccaatttttatcccctcgatatgtctgaacctcaaacaaaaggcactggtgagaatagtacttgtagagaaccccatgccccttacccgccagggtatcaaagacacttcgaggcgcccgctgtcgagagcatgcccatgtctgtgtacgcctccaccgcctcctgctctgacgtgtcagcctgctgcgaagtggagtccgaggtcatgatgagtgactatgagagcggggacgacggccacttcgaagaggtgacgatcccgcccctggattcccagcagcacacggaagtctgactctcaactccccccaaagtgcctgactttagtgaacctagaggtgatgtgagtaatccgcgctgttctttgcagcagtgcttccaagctttttttggtgagccgaatgggcatggctgcgctggatcctgcgcctctggacgtgctagccatttccagtgtcccaactactgtcatcgtgaggttttcatcggctgtgccatttcccaacgtcttttgggatttacatctgtctgtgttaaaataatcaaacgaaaaatcagtcctgtgttgtcagcatgattcatgtatttatatagatttgattattttaattttcctgtctcttttttttgtaaattttatgtacagatttgatttttcatagttttaactagatttccaagatattttgtgcatttgtttcaactgaattttggtggtggtcagtgccattatctagcaccctgattttttttttttactataaccagggtttcattctgtctttttccactgaagtgtgacattttgttagtacatttcagtgtagtcattcatttctagctgtacataggatgaaggagagatcagatacatgaacatgtcttacatgggttgctgtatttagaattataaacatttttcattattggaaagtgtaacggggaccttctgcatacctgtttagaaccaaaaccaccatgacacagtttttatagtgtctgtatatttgtgatgcaatggtcttgtaaaggtttttaatgaaaactaccattagccagtctttcttactgacaataaattattaataaaa

SEQ ID NO: 432329 - DNA, 14534 bp, Homo sapiens
ccgaaggaggagggcgggcgtttcacccgcgccacagctgcggccggccagagagaccgcagaggccgggacccccgcagcctccacggccgctgctgccactgtcggggtggcgcgcccagccggagaatcccgtccgcgcccggggcggggggcgaggcggggcgctgacgtcacctcccctcccccaccgcctccaagggggagggagtggggaaagaggcagcgagtcgccgcagccggcggccgcaactcctcaactcggcggctggctgcctgggcacgtcctgacaaacttggctgctcccgggccctcgttccggccccgcgcactctcttttcgcctgcgtttggtgcttaagtttgccctggtcggaagcctccggagatgcggccgcctgggtcccggcggcacggacgttggcactctggttagggacatgctgaagatcccggggaggcaaagttggtacttcaaacccggctcttaacacatatctacaccgcgaggggatcacggagctgccgaggactttagagcccagggccgaggactcggctagactgattcccgacagttaagcaatggggagacatttggctttgctcctgcttctgctccttctcttccaacattttggagacagtgatggcagccaacgacttgaacagactcctctgcagtttacacacctcgagtacaacgtcaccgtgcaggagaactctgcagctaagacttatgtggggcatcctgtcaagatgggtgtttacattacacatccagcgtgggaagtaaggtacaaaattgtttccggagacagtgaaaacctgttcaaagctgaagagtacattctcggagacttttgctttctaagaataaggaccaaaggaggaaatacagctattcttaatagagaagtgaaggatcactacacattgatagtgaaagcacttgaaaaaaatactaatgtggaggcgcgaacaaaggtcagggtgcaggtgctggatacaaatgacttgagaccgttattctcacccacctcatacagcgtttctttacctgaaaacacagctataaggaccagtatcgcaagagtcagcgccacggatgcagacataggaaccaacggggaattttactacagttttaaagatcgaacagatatgtttgctattcacccaaccagtggtgtgatagtgttaactggtagacttgattacctagagaccaagctctatgagatggaaatcctcgctgcggaccgtggcatgaagttgtatgggagcagtggcatcagcagcatggccaagctaacggtgcacatcgaacaggccaatgaatgtgctccggtgataacagcagtgacattgtcaccatcagaactggacagggacccagcatatgcaattgtgacagtggatgactgcgatcagggtgccaatggtgacatagcatctttaagcatcgtggcaggtgaccttctccagcagtttagaacagtgaggtcctttccagggagtaaggagtataaagtcaaagccatcggtgacattgattgggacagtcatcctttcggctacaatctcacactacaggctaaagataaaggaactccgccccagttctcttctgttaaagtcattcacgtgacttctccacagttcaaagccgggccagtcaagtttgaaaaggatgtttacagagcagaaataagtgaatttgctcctcccaacacacctgtggtcatggtaaaggccattcctgcttattcccatttgaggtatgtttttaaaaggacacctggaaaagctaaattcagtttaaattacaacactggtctcatttctattttagaaccagttaaaagacagcaggcagcccattttgaacttgaagtaacaacaagtgacagaaaagcgtccaccaaggtcttggtgaaagtcttaggtgcaaatagcaatccccctgaatttacccagacagcgtacaaagctgcttttgatgagaacgtgcccattggtactactatcatgagcctgagtgccgtagaccctgatgagggtgagaatgggtacgtgacatacagtatcgcaaatttaaatcatgtgccgtttgcgattgaccatttcactggtgccgtgagtacgtcagaaaacctggactacgaactgatgcctcgggtttatactctgaggattcgtgcatcagactggggcttgccgtaccgccgggaagtcgaagtccttgctacaattactctcaataacttgaatgacaacacacctttgtttgagaaaataaattgtgaagggacaattcccagagatctaggcgtgggagagcaaataaccactgtttctgctattgatgcagatgaacttcagttggtacagtatcagattgaagctggaaatgaactggatttgtttagtttaaaccccaactcgggggtattgtcattaaagcgatcgctaatggatggcttaggtgcaaaggtgtctttccacagtctgagaatcacagctacagatggagaaaattttgccacaccattatatatcaacataacagtggctgccagtcacaagctggtaaacttgcagtgtgaagagactggtgttgccaaaatgctggcagagaagctcctgcaggcaaataaattacacaaccagggagaggtggaggatattttcttcgattctcactctgtcaatgctcacataccgcagtttagaagcactcttccgactggtattcaggtaaaggaaaaccagcctgtgggttccagtgtaattttcatgaactccactgaccttgacactggcttcaatggaaaactggtctatgctgtttctggaggaaatgaggatagttgcttcatgattgatatggaaacaggaatgctgaaaattttatctcctcttgaccgtgaaacaacagacaaatacaccctgaatattaccgtctatgaccttgggataccccagaaggctgcgtggcgtcttctacatgtcgtggttgtcgatgccaatgataatccacccgagtttttacaggagagctattttgtggaagtgagtgaagacaaggaggtacatagtgaaatcatgcaggttgaagccacagataaagacctggggcccaacggacacgtgacgtactcaattcttacagacacagacacattttcaattgacagcgtgacgggtgttgttaacatcgcacgccctctggatcgagagctgcagcatgagcactccttaaagattgaggccagggaccaagccagagaagagcctcagctgttctccactgtcgttgtgaacagtatcactagaagatgttaatgacaacccacctacatttattccacctaattatcgtgtgaaagtccgagaggatcttccagaaggaaccgtcatcatgtggttagaagcccacgatcctgatttaggtcagtctggtcaggtgagatacagccttctggaccacggagaaggaaacttcgatgtggataaactcagtggagcagttaggatcgtccagcagttggactttgagaagaagcaagtgtataatctcactgtgagggccaaagacaagggaaagccagtttctctgtcttctacttgctatgttgaagttgaggtggttgatgtgaatgagaacctgcacccacccgtgttttccagctttgtggaaaaggggacagtgaaagaagatgcacctgttggttcattggtaatgacggtgtcggctcatgatgaggacgccggaagagatggggagatccgatactccattagagatggctctggcgttggtgttttcaaaataggtgaagagacaggtgtcatagagacgtcagatcgactggaccgtgaatcgacctcccattattggctaacagtctttgcaaccgatcagggtgtcgtgcctctttcatcgttcatagagatctacatagaggttgaggatgtcaatgacaatgcaccacagacatcagagcctgtttattacccagaaatcatggaaaattctcctaaagatgtatctgtggtccagatcgaggcatttgatccagattcgagctctaatgacaagctcatgtacaaaattacaagtggaaatccacaaggattcttttcaatacatcctaaaacaggtctcatcacaactacgtcaaggaagctagaccgagaacagcaagatgaacacatattagaggttactgtgacagacaatggtagtccccccaaatcaaccattgcaagagtcattgtgaaaatccttgatgaaaatgacaacaaacctcagtttctgcaaaagttctacaaaatcagactccctgagcgggaaaagccagaccgagaaagaaatgccagacgggagccgctctatcgcgtcatagccaccgacaaggatgagggccccaatgcagaaatctcctacagcatcgaagacgggaatgagcatggcaaatttttcatcgaaccgaaaactggagtggtttcgtccaagaggttttcagcagctggagaatatgatattctttcaattaaggcagttgacaatggtcgccctcaaaagtcatcaaccaccagactccatattgaatggatctccaagcccaaacagtccctggagcccatttcatttgaagaatcattttttacctttactgtgatggaaagtgaccccgttgctcacatgattggagtaatatctgtggagcctcctggcatacccctttggtttgacatcactggtggcaactacgacagtcacttcgatgtggacaagggaactggaaccatcattgttgccaaacctcttgatgcagaacagaagtcaaactacaacctcacagtcgaggctacagatggaaccaccactatcctcactcaggtattcatcaaagtaatagacacaaatgaccatcgtcctcagttttctacatcaaagtatgaagttgttattcctgaagatacagcgccagaaacagaaattttgcaaatcagtgctgtggatcaggatgagaaaaacaaactaatctacactctgcagagcagtagagatccactgagtctcaagaaatttcgtcttgatcctgcaaccggctctctctatacttctgagaaactggatcatgaagctgtttcaccagcacacctcacggtcatggtacgagatcaagatgtgcctgtaaaacgcaactttgcaaggattgtggtcaatgtcagcgacacgaatgaccacgccccgtggttcaccgcttcctcctacaaagggcgggtttatgaatcggcagccgttggctcagttgtgttgcaggtgacggctctggacaaggacaaagggaaaaatgctgaagtgctgtactcgatcgagtcaggaaatattggaaatattggaaattcttttatgattgatcctgtcttgggctctattaaaactgccaaagaattagatcgaagtaaccaagcggagtatgatttaatggtaaaagctacagataagggcagtccaccaatgagtgaaataacttctgtgcgtatctttgtcacaattgctgacaacgcctctccgaagtttacatcaaaagaatattctgttgaacttagtgaaactgtcagcattgggagtttcgttgggatggttacagcccatagtcaatcatcagtggtgtatgaaataaaagatggaaatacaggtgatgcttttgatattaatccacattctggaactatcatcactcagaaagccctggactttgaaactttgcccatttacacattgataatacaaggaactaacatggctggtttgtccactaatacaacggttctagttcacttgcaggatgagaatgacaacgcgccagtttttatgcaggcagaatatacaggactcattagtgaatcagcctcaattaacagcgtggtcctaacagacaggaatgtcccactggtgattcgagcagctgatgctgataaagactcaaatgctttgcttgtatatcacattgttgaaccatctgtacacacatattttgctattgattctagcactggtgctattcatacagtactaagtctggactatgaagaaacaagtatttttcactttaccgtccaagtgcatgacatgggaaccccacgtttatttgctgagtatgcagcgaatgtaacagtacatgtaattgacattaatgactgcccccctgtgtttgccaagccattatatgaagcatctcttttgttaccaacatacaaaggagtaaaagtcatcacagtaaatgctacagatgctgattcaagtgcattctcacagttgatttactccatcaccgaaggcaacatcggggagaagttttctatggactacaagactggtgctctcactgtccaaaacacaactcagttaagaagccgctacgagctaaccgttagagcttccgatggcagatttgccggccttacctctgtcaaaattaatgtgaaagaaagcaaagaaagtcacctaaagtttacccaggatgtctactctgcggtagtgaaagagaattccaccgaggccgaaacattagctgtcattactgctattgggagtccaatcaatgagcctttgttttatcacatcctcaacccagatcgcagatttaaaataagccgcacttcaggggttctgtcaaccactggcacgcccttcgatcgtgagcagcaggaggcgtttgatgtggttgtagaagtgatagaggaacataagccttctgcagtggcccacgttgtcgtgaaggtcattgtagaagaccaaaatgataatgcgccggtgtttgtcaaccttccctactacgccgttgttaaagtggacactgaggtgggccatgtcattcgctatgtcactgctgtagacagagacagtggcagaaacggggaagtgcattactacctcaaggaacatcatgaacactttcaaattggacccttgggtgaaatttcactgaaaaagcaatttgagcttgacaccttaaataaagaatatcttgttacagtggttgcaaaagatggagggaacccggccttttcagcggaagttatcgttccgatcactgtcatgaataaagccatgcctgtgtttgaaaaacctttctacagtgcagagattgcagagagcatccaggtgcacagccctgtggtccacgtgcaggctaacagcccggaaggcctgaaagtgttctacagcatcacagacggagaccctttcagccagttcactattaacttcaatactggagttatcaatgtcatagctcctctggactttgaggcccacccggcatataagctgagcatacgcgcaactgactccttgacgggcgctcatgctgaagtatttgtggacatcatagtagacgacatcaatgataaccctcctgtgtttgctcagcagtcttatgcggtgaccctgtctgaggcatctgtaattggaacgtctgttgttcaagttagagccaccgattctgattcagaaccaaatagaggaatctcataccagatgtttgggaatcacagcaagagtcatgatcattttcatgtagacagcagcactggcctcatctcactactcagaaccctggattacgagcagtcccggcagcacacgatttttgtgagggcagttgatggtggtatgcccacgctgagcagtgatgtgattgtcacggtggacgttaccgacctcaatggtaatccaccactctttgaacaacagatttatgaagccagaattagcgagcacgcccctcatgggcatttcgtgacctgtgtaaaagcctatgatgcagacagttcagacatagacaagttgcagtattccattctgtctggcaatgatcataaacattttgtcattgacagtgcaacagggattatcaccctctcaaacctgcaccggcacgccctgaagccattttacagtcttaacctgtcagtgtctgatggagtttttagaagttccacccaggttcatgtaactgtaattggaggcaatttgcacagtcctgctttccttcagaacgaatatgaagtggaactagctgaaaacgctcccctacataccctggtgatggaggtgaaaactacggatggggattctggtatttatggtcacgttacttaccatattgtaaatgactttgccaaagacagattttacataaatgagagaggacagatatttactttggaaaaacttgatcgagaaaccccggcggagaaagtgatctcagtccgtttaatggctaaggatgctggaggaaaagttgctttctgcaccgtgaatgtcatccttacagatgacaatgacaatgcaccacaatttcgagcaaccaaatacgaagtgaatatcgggtccagtgctgctaaagggacttcagtcgtaaagtctgcaagtgatgccgatgagggctccaatgccgacatcacctatgccattgaagcagactctgaaagtgtaaaagagaatttggaaattaacaaactgtccggcgtaatcactacaaaggagagcctcattggcttggaaaatgaattcttcactttctttgttagagctgtggataatgggtctccatcaaaagaatctgttgttcttgtctatgttaaaatccttccaccggaaatgcagcttccaaaattttcagaacctttctatacctttacagtgtcagaggacgtgcctgttggaacagagatagatctcatccgagcagaacatagtgggactgttctttacagcctggtcaaagggaatactccagaaagcaatagggatgagtcctttgtgattgacagacagagcgggagactgaagttggagaagagtcttgatcatgagacaactaagtggtatcagttttccatactggccaggtgcactcaagatgaccatgagatggtggcttctgtagatgttagtatccaagtgaaagatgcaaatgacaacagcccggtctttgaatctagtccatatgaggcattcattgttgaaaacctgccagggggaagtagagtaattcagatcagggcatctgatgctgactcaggaaccaacggccaagttatgtatagcctggatcagtcacaaagtgtggaagtcattgaatcctttgccattaacatggaaacaggctggattacaactttaaaggaacttgaccatgaaaagagagacaattaccagattaaagtggttgcatcagatcatggtgaaaagatccagctatcctccacagccattgtggatgttaccgtcaccgatgtcaacgatagtccaccacgattcacggccgagatctataaagggactgtgagtgaggatgacccccaaggtggggtgattgccatcttaagtaccacggatgctgattctgaagagatcaacagacaagttacatatttcataacaggaggggatcctttaggacagtttgccgttgaaactatacagaatgaatggaaggtatatgtgaagaaacctctagacagggaaaaaagggacaattaccttcttactatcacggcaactgatggcaccttctcatcaaaagcgatagttgaagtgaaagttctggatgcaaatgacaacagtccagtttgtgaaaagactttatattcagacactattcctgaagacgtccttcctggaaaattgatcatgcagatctctgctacagacgcagacatccgctctaacgctgaaattacttacacgttattgggttcaggtgcagaaaaattcaaactaaatccagacacaggtgaactgaaaacgtcaaccccccttgatcgtgaggagcaagctgtttatcatcttctcgtcagggccacagatggaggaggaagattctgccaagccagtattgtgctcacgctagaagatgtgaacgataacgcccccgaattctctgccgatccttatgccatcaccgtgtttgaaaacacagagccgggaacgctgctgacaagagtgcaggccacagatgccgacgcaggattaaatcggaagattttatactcactgattgactctgctgatgggcagttctccattaacgaattatctggaattattcagttagaaaaacctttggacagagaactccaggcagtatacaccctctctttgaaagctgtggatcaaggcttgccaaggaggctgactgccactggcactgtgattgtatcagttcttgacataaatgacaacccccctgtgtttgagtaccgtgaatatggtgccaccgtgtctgaggacattcttgttggaactgaagttcttcaagtgtatgcagcaagtcgggatattgaagcaaatgcagaaatcacctactcaataataagtggaaatgaacatgggaaattcagcatagattctaaaacaggggccgtatttatcattgagaatctggattatgagagctctcatgagtattacctaacagtagaggccactgatggaggcacgccttcactgagcgacgttgccactgtgaacgttaatgtaacagatatcaacgataatacccctgtgttcagccaagacacctacacgacagtcatcagtgaagatgccgttcttgagcagtctgtcatcacggttatggccgatgatgccgatggaccttccaacagccacatccactactcaattatagatggcaaccaaggaagctcgttcacaattgaccccgtcaggggagaagtcaaagtgaccaaacttctcgaccgagaaacgatttcaggttacacgctcacggttcaagcttctgataatggcagtccacccagagtcaacacgacgaccgtgaacatcgatgtgtccgatgtcaatgacaacgcgcccgtcttctccaggggaaactacagtgtcattatccaggaaaataagccagtgggcttcagcgtgctgcagctggtagtaacagatgaggattcttcccataacggtccacccttcttctttactattgtaactggaaatgatgagaaggcttttgaagttaacccgcaaggagtcctcctgacatcatctgccatcaagaggaaggagaaagatcattacttactgcaggtgaaggtggcagataatggaaagcctcagttgtcatctttgacatacattgacattagggtaattgaggagagcatctatccgcctgcgattttgcccctggagattttcatcacctcttctggagaagaatactcaggtggcgtcattgggaagatccatgccacagaccaggacgtgtatgatactctaacctacagtctcgaccctcagatggacaacctgttctctgtttccagcacagggggcaagctgatagcacacaaaaagctagacatagggcaataccttctcaatgtcagcgtaacagatgggaagttcacgacggtggccgacatcacagtgcatatcagacaagtcacacaggagatgttgaaccacaccatcgcgatccgctttgccaacctcactccggaagaattcgttggtgactactggcgcaacttccagcgagctttacggaacatcctgggtgtgaggaggaacgacatacagattgttagtttgcagtcctctgaacctcacccacatctggacgtcttactttttgtagagaaaccaggtagtgctcagatctcaacaaaacaacttctgcacaagattaactcttccgtgactgacattgaggaaatcattggagttaggatactgaatgtattccagaaactctgcgcgggactggactgcccctggaagttctgcgatgaaaaggtgtctgtggatgaaagtgtgatgtcaacacacagcacagccagactgagttttgtgactccccgccaccacagggcagcggtgtgtctctgcaaagagggaaggtgcccacctgtccaccatggctgtgaagatgatccgtgccctgagggatccgaatgtgtgtctgatccctgggaggagaaacacacctgtgtctgtcccagcggcaggtttggtcagtgcccagggagttcatctatgacactgactggaaacagctacgtgaaataccgtctgacggaaaatgaaaacaaattagagatgaaactgaccatgaggctcagaacatattccacgcatgcggttgtcatgtatgctcgaggaactgactatagcatcttggagattcatcatggaaggctgcagtacaagtttgactgtggaagtggccctggaattgtctctgttcagagcattcaggtcaatgatgggcagtggcacgcagtggccctggaagtgaatggaaactatgctcgcttggttctagaccaagttcatactgcatcgggcacagccccagggactctgaaaaccctgaacctggataactatgtgttttttggtggccacatccgtcagcagggaacaaggcatggaagaagtcctcaagttggtaatggtttcaggggttgtatggactccatttatttgaatgggcaggagctccctttaaacagcaaacccagaagctatgcacacatcgaagagtcggtggatgtatctccaggctgcttcctgacggccacggaagactgcgccagcaacccttgccagaatggaggcgtttgcaatccgtcacctgctggaggttattactgcaaatgcagtgccttgtacatagggacccactgtgagataagcgtcaatccgtgttcctccaacccatgcctctatgggggcacgtgtgttgtcgacaacggaggctttgtttgccagtgtagaggattatatactggtcagaggtgtcagcttagtccatactgcaaagatgaaccctgtaagaatggcggaacatgctttgacagtttggatggcgccgtttgtcagtgtgattcgggttttaggggagaaaggtgtcagagtgatatcgacgagtgctctggaaacccttgcctgcacggggccctctgtgagaacacgcacggctcctatcactgcaactgcagccacgagtacaggggacgtcactgcgaggatgctgcgcccaaccagtatgtgtccacgccgtggaacattgggttggcggaaggaattggaatcgttgtgtttgttgcagggatatttttactggtggtggtgtttgttctctgccgtaagatgattagtcggaaaaagaagcatcaggctgaacctaaagacaagcacctgggacccgctacggctttcttgcaaagaccgtattttgattccaagctaaataagaacatttactcagacataccaccccaggtgcctgtccggcctatttcctacaccccgagtattccaagtgactcaagaaacaatctggaccgaaattccttcgaaggatctgctatcccagagcatcccgaattcagcacttttaaccccgagtctgtgcacgggcaccgaaaagcagtggcggtctgcagcgtggcgccaaacctgcctcccccacccccttcaaactccccttctgacagcgactccatccagaagcctagctgggactttgactatgacacaaaagtggtggatcttgatccctgtctttccaagaagcctctagaggaaaagccttcccagccatacagtgcccgggaaagcctgtctgaagtgcagtccctgagctccttccagtccgaatcgtgcgatgacaatgggtatcactgggatacatcagattggatgccaagcgttcctctgccggacatacaagagttccccaactatgaggtgattgatgagcagacacccctgtactcagcagatccaaacgccatcgatacggactattaccctggaggctacgacatcgaaagtgattttcctccacccccagaagacttccccgcagctgatgagctaccaccgttaccgcccgaattcagcaatcagtttgaatccatccaccctcctagagacatgcctgccgcgggtagcttgggttcttcatcaagaaaccggcagaggttcaacttgaatcagtatttgcccaatttttatcccctcgatatgtctgaacctcaaacaaaaggcactggtgagaatagtacttgtagagaaccccatgccccttacccgccagggtatcaaagacacttcgaggcgcccgctgtcgagagcatgcccatgtctgtgtacgcctccaccgcctcctgctctgacgtgtcagcctgctgcgaagtggagtccgaggtcatgatgagtgactatgagagcggggacgacggccacttcgaagaggtgacgatcccgcccctggattcccagcagcacacggaagtctgactctcaactccccccaaagtgcctgactttagtgaacctagaggtgatgtgagtaatccgcgctgttctttgcagcagtgcttccaagctttttttggtgagccgaatgggcatggctgcgctggatcctgcgcctctatccactcatccatcctcaaccacctatccgttcttt

SEQ ID NO: 432330 - DNA, 13182 bp, Homo sapiens
ccgaaggaggagggcgggcgtttcacccgcgccacagctgcggccggccagagagaccgcagaggccgggacccccgcagcctccacggccgctgctgccactgtcggggtggcgcgcccagccggagaatcccgtccgcgcccggggcggggggcgaggcggggcgctgacgtcacctcccctcccccaccgcctccaagggggagggagtggggaaagaggcagcgagtcgccgcagccggcggccgcaactcctcaactcggcggctggctgcctgggcacgtcctgacaaacttggctgctcccgggccctcgttccggccccgcgcactctcttttcgcctgcgtttggtgcttaagtttgccctggtcggaagcctccggagatgcggccgcctgggtcccggcggcacggacgttggcactctggttagggacatgctgaagatcccggggaggcaaagttggtacttcaaacccggctcttaacacatatctacaccgcgaggggatcacggagctgccgaggactttagagcccagggccgaggactcggctagactgattcccgacagttaagcaatggggagacatttggctttgctcctgcttctgctccttctcttccaacattttggagacagtgatggcagccaacgacttgaacagactcctctgcagtttacacacctcgagtacaacgtcaccgtgcaggagaactctgcagctaagacttatgtggggcatcctgtcaagatgggtgtttacattacacatccagcgtgggaagtaaggtacaaaattgtttccggagacagtgaaaacctgttcaaagctgaagagtacattctcggagacttttgctttctaagaataaggaccaaaggaggaaatacagctattcttaatagagaagtgaaggatcactacacattgatagtgaaagcacttgaaaaaaatactaatgtggaggcgcgaacaaaggtcagggtgcaggtgctggatacaaatgacttgagaccgttattctcacccacctcatacagcgtttctttacctgaaaacacagctataaggaccagtatcgcaagagtcagcgccacggatgcagacataggaaccaacggggaattttactacagttttaaagatcgaacagatatgtttgctattcacccaaccagtggtgtgatagtgttaactggtagacttgattacctagagaccaagctctatgagatggaaatcctcgctgcggaccgtggcatgaagttgtatgggagcagtggcatcagcagcatggccaagctaacggtgcacatcgaacaggccaatgaatgtgctccggtgataacagcagtgacattgtcaccatcagaactggacagggacccagcatatgcaattgtgacagtggatgactgcgatcagggtgccaatggtgacatagcatctttaagcatcgtggcaggtgaccttctccagcagtttagaacagtgaggtcctttccagggagtaaggagtataaagtcaaagccatcggtgacattgattgggacagtcatcctttcggctacaatctcacactacaggctaaagataaaggaactccgccccagttctcttctgttaaagtcattcacgtgacttctccacagttcaaagccgggccagtcaagtttgaaaaggatgtttacagagcagaaataagtgaatttgctcctcccaacacacctgtggtcatggtaaaggccattcctgcttattcccatttgaggtatgtttttaaaaggacacctggaaaagctaaattcagtttaaattacaacactggtctcatttctattttagaaccagttaaaagacagcaggcagcccattttgaacttgaagtaacaacaagtgacagaaaagcgtccaccaaggtcttggtgaaagtcttaggtgcaaatagcaatccccctgaatttacccagacagcgtacaaagctgcttttgatgagaacgtgcccattggtactactatcatgagcctgagtgccgtagaccctgatgagggtgagaatgggtacgtgacatacagtatcgcaaatttaaatcatgtgccgtttgcgattgaccatttcactggtgccgtgagtacgtcagaaaacctggactacgaactgatgcctcgggtttatactctgaggattcgtgcatcagactggggcttgccgtaccgccgggaagtcgaagtccttgctacaattactctcaataacttgaatgacaacacacctttgtttgagaaaataaattgtgaagggacaattcccagagatctaggcgtgggagagcaaataaccactgtttctgctattgatgcagatgaacttcagttggtacagtatcagattgaagctggaaatgaactggatttgtttagtttaaaccccaactcgggggtattgtcattaaagcgatcgctaatggatggcttaggtgcaaaggtgtctttccacagtctgagaatcacagctacagatggagaaaattttgccacaccattatatatcaacataacagtggctgccagtcacaagctggtaaacttgcagtgtgaagagactggtgttgccaaaatgctggcagagaagctcctgcaggcaaataaattacacaaccagggagaggtggaggatattttcttcgattctcactctgtcaatgctcacataccgcagtttagaagcactcttccgactggtattcaggtaaaggaaaaccagcctgtgggttccagtgtaattttcatgaactccactgaccttgacactggcttcaatggaaaactggtctatgctgtttctggaggaaatgaggatagttgcttcatgattgatatggaaacaggaatgctgaaaattttatctcctcttgaccgtgaaacaacagacaaatacaccctgaatattaccgtctatgaccttgggataccccagaaggctgcgtggcgtcttctacatgtcgtggttgtcgatgccaatgataatccacccgagtttttacaggagagctattttgtggaagtgagtgaagacaaggaggtacatagtgaaatcatgcaggttgaagccacagataaagacctggggcccaacggacacgtgacgtactcaattcttacagacacagacacattttcaattgacagcgtgacgggtgttgttaacatcgcacgccctctggatcgagagctgcagcatgagcactccttaaagattgaggccagggaccaagccagagaagagcctcagctgttctccactgtcgttgtgaacagtatcactagaagatgttaatgacaacccacctacatttattccacctaattatcgtgtgaaagtccgagaggatcttccagaaggaaccgtcatcatgtggttagaagcccacgatcctgatttaggtcagtctggtcaggtgagatacagccttctggaccacggagaaggaaacttcgatgtggataaactcagtggagcagttaggatcgtccagcagttggactttgagaagaagcaagtgtataatctcactgtgagggccaaagacaagggaaagccagtttctctgtcttctacttgctatgttgaagttgaggtggttgatgtgaatgagaacctgcacccacccgtgttttccagctttgtggaaaaggggacagtgaaagaagatgcacctgttggttcattggtaatgacggtgtcggctcatgatgaggacgccggaagagatggggagatccgatactccattagagatggctctggcgttggtgttttcaaaataggtgaagagacaggtgtcatagagacgtcagatcgactggaccgtgaatcgacctcccattattggctaacagtctttgcaaccgatcagggtgtcgtgcctctttcatcgttcatagagatctacatagaggttgaggatgtcaatgacaatgcaccacagacatcagagcctgtttattacccagaaatcatggaaaattctcctaaagatgtatctgtggtccagatcgaggcatttgatccagattcgagctctaatgacaagctcatgtacaaaattacaagtggaaatccacaaggattcttttcaatacatcctaaaacaggtctcatcacaactacgtcaaggaagctagaccgagaacagcaagatgaacacatattagaggttactgtgacagacaatggtagtccccccaaatcaaccattgcaagagtcattgtgaaaatccttgatgaaaatgacaacaaacctcagtttctgcaaaagttctacaaaatcagactccctgagcgggaaaagccagaccgagaaagaaatgccagacgggagccgctctatcgcgtcatagccaccgacaaggatgagggccccaatgcagaaatctcctacagcatcgaagacgggaatgagcatggcaaatttttcatcgaaccgaaaactggagtggtttcgtccaagaggttttcagcagctggagaatatgatattctttcaattaaggcagttgacaatggtcgccctcaaaagtcatcaaccaccagactccatattgaatggatctccaagcccaaacagtccctggagcccatttcatttgaagaatcattttttacctttactgtgatggaaagtgaccccgttgctcacatgattggagtaatatctgtggagcctcctggcatacccctttggtttgacatcactggtggcaactacgacagtcacttcgatgtggacaagggaactggaaccatcattgttgccaaacctcttgatgcagaacagaagtcaaactacaacctcacagtcgaggctacagatggaaccaccactatcctcactcaggtattcatcaaagtaatagacacaaatgaccatcgtcctcagttttctacatcaaagtatgaagttgttattcctgaagatacagcgccagaaacagaaattttgcaaatcagtgctgtggatcaggatgagaaaaacaaactaatctacactctgcagagcagtagagatccactgagtctcaagaaatttcgtcttgatcctgcaaccggctctctctatacttctgagaaactggatcatgaagctgtttcaccagcacacctcacggtcatggtacgagatcaagatgtgcctgtaaaacgcaactttgcaaggattgtggtcaatgtcagcgacacgaatgaccacgccccgtggttcaccgcttcctcctacaaagggcgggtttatgaatcggcagccgttggctcagttgtgttgcaggtgacggctctggacaaggacaaagggaaaaatgctgaagtgctgtactcgatcgagtcaggaaatattggaaatattggaaattcttttatgattgatcctgtcttgggctctattaaaactgccaaagaattagatcgaagtaaccaagcggagtatgatttaatggtaaaagctacagataagggcagtccaccaatgagtgaaataacttctgtgcgtatctttgtcacaattgctgacaacgcctctccgaagtttacatcaaaagaatattctgttgaacttagtgaaactgtcagcattgggagtttcgttgggatggttacagcccatagtcaatcatcagtggtgtatgaaataaaagatggaaatacaggtgatgcttttgatattaatccacattctggaactatcatcactcagaaagccctggactttgaaactttgcccatttacacattgataatacaaggaactaacatggctggtttgtccactaatacaacggttctagttcacttgcaggatgagaatgacaacgcgccagtttttatgcaggcagaatatacaggactcattagtgaatcagcctcaattaacagcgtggtcctaacagacaggaatgtcccactggtgattcgagcagctgatgctgataaagactcaaatgctttgcttgtatatcacattgttgaaccatctgtacacacatattttgctattgattctagcactggtgctattcatacagtactaagtctggactatgaagaaacaagtatttttcactttaccgtccaagtgcatgacatgggaaccccacgtttatttgctgagtatgcagcgaatgtaacagtacatgtaattgacattaatgactgcccccctgtgtttgccaagccattatatgaagcatctcttttgttaccaacatacaaaggagtaaaagtcatcacagtaaatgctacagatgctgattcaagtgcattctcacagttgatttactccatcaccgaaggcaacatcggggagaagttttctatggactacaagactggtgctctcactgtccaaaacacaactcagttaagaagccgctacgagctaaccgttagagcttccgatggcagatttgccggccttacctctgtcaaaattaatgtgaaagaaagcaaagaaagtcacctaaagtttacccaggatgtctactctgcggtagtgaaagagaattccaccgaggccgaaacattagctgtcattactgctattgggagtccaatcaatgagcctttgttttatcacatcctcaacccagatcgcagatttaaaataagccgcacttcaggggttctgtcaaccactggcacgcccttcgatcgtgagcagcaggaggcgtttgatgtggttgtagaagtgatagaggaacataagccttctgcagtggcccacgttgtcgtgaaggtcattgtagaagaccaaaatgataatgcgccggtgtttgtcaaccttccctactacgccgttgttaaagtggacactgaggtgggccatgtcattcgctatgtcactgctgtagacagagacagtggcagaaacggggaagtgcattactacctcaaggaacatcatgaacactttcaaattggacccttgggtgaaatttcactgaaaaagcaatttgagcttgacaccttaaataaagaatatcttgttacagtggttgcaaaagatggagggaacccggccttttcagcggaagttatcgttccgatcactgtcatgaataaagccatgcctgtgtttgaaaaacctttctacagtgcagagattgcagagagcatccaggtgcacagccctgtggtccacgtgcaggctaacagcccggaaggcctgaaagtgttctacagcatcacagacggagaccctttcagccagttcactattaacttcaatactggagttatcaatgtcatagctcctctggactttgaggcccacccggcatataagctgagcatacgcgcaactgactccttgacgggcgctcatgctgaagtatttgtggacatcatagtagacgacatcaatgataaccctcctgtgtttgctcagcagtcttatgcggtgaccctgtctgaggcatctgtaattggaacgtctgttgttcaagttagagccaccgattctgattcagaaccaaatagaggaatctcataccagatgtttgggaatcacagcaagagtcatgatcattttcatgtagacagcagcactggcctcatctcactactcagaaccctggattacgagcagtcccggcagcacacgatttttgtgagggcagttgatggtggtatgcccacgctgagcagtgatgtgattgtcacggtggacgttaccgacctcaatggtaatccaccactctttgaacaacagatttatgaagccagaattagcgagcacgcccctcatgggcatttcgtgacctgtgtaaaagcctatgatgcagacagttcagacatagacaagttgcagtattccattctgtctggcaatgatcataaacattttgtcattgacagtgcaacagggattatcaccctctcaaacctgcaccggcacgccctgaagccattttacagtcttaacctgtcagtgtctgatggagtttttagaagttccacccaggttcatgtaactgtaattggaggcaatttgcacagtcctgctttccttcagaacgaatatgaagtggaactagctgaaaacgctcccctacataccctggtgatggaggtgaaaactacggatggggattctggtatttatggtcacgttacttaccatattgtaaatgactttgccaaagacagattttacataaatgagagaggacagatatttactttggaaaaacttgatcgagaaaccccggcggagaaagtgatctcagtccgtttaatggctaaggatgctggaggaaaagttgctttctgcaccgtgaatgtcatccttacagatgacaatgacaatgcaccacaatttcgagcaaccaaatacgaagtgaatatcgggtccagtgctgctaaagggacttcagtcgtaaagtctgcaagtgatgccgatgagggctccaatgccgacatcacctatgccattgaagcagactctgaaagtgtaaaagagaatttggaaattaacaaactgtccggcgtaatcactacaaaggagagcctcattggcttggaaaatgaattcttcactttctttgttagagctgtggataatgggtctccatcaaaagaatctgttgttcttgtctatgttaaaatccttccaccggaaatgcagcttccaaaattttcagaacctttctatacctttacagtgtcagaggacgtgcctgttggaacagagatagatctcatccgagcagaacatagtgggactgttctttacagcctggtcaaagggaatactccagaaagcaatagggatgagtcctttgtgattgacagacagagcgggagactgaagttggagaagagtcttgatcatgagacaactaagtggtatcagttttccatactggccaggtgcactcaagatgaccatgagatggtggcttctgtagatgttagtatccaagtgaaagatgcaaatgacaacagcccggtctttgaatctagtccatatgaggcattcattgttgaaaacctgccagggggaagtagagtaattcagatcagggcatctgatgctgactcaggaaccaacggccaagttatgtatagcctggatcagtcacaaagtgtggaagtcattgaatcctttgccattaacatggaaacaggctggattacaactttaaaggaacttgaccatgaaaagagagacaattaccagattaaagtggttgcatcagatcatggtgaaaagatccagctatcctccacagccattgtggatgttaccgtcaccgatgtcaacgatagtccaccacgattcacggccgagatctataaagggactgtgagtgaggatgacccccaaggtggggtgattgccatcttaagtaccacggatgctgattctgaagagatcaacagacaagttacatatttcataacaggaggggatcctttaggacagtttgccgttgaaactatacagaatgaatggaaggtatatgtgaagaaacctctagacagggaaaaaagggacaattaccttcttactatcacggcaactgatggcaccttctcatcaaaagcgatagttgaagtgaaagttctggatgcaaatgacaacagtccagtttgtgaaaagactttatattcagacactattcctgaagacgtccttcctggaaaattgatcatgcagatctctgctacagacgcagacatccgctctaacgctgaaattacttacacgttattgggttcaggtgcagaaaaattcaaactaaatccagacacaggtgaactgaaaacgtcaaccccccttgatcgtgaggagcaagctgtttatcatcttctcgtcagggccacagatggaggaggaagattctgccaagccagtattgtgctcacgctagaagatgtgaacgataacgcccccgaattctctgccgatccttatgccatcaccgtgtttgaaaacacagagccgggaacgctgctgacaagagtgcaggccacagatgccgacgcaggattaaatcggaagattttatactcactgattgactctgctgatgggcagttctccattaacgaattatctggaattattcagttagaaaaacctttggacagagaactccaggcagtatacaccctctctttgaaagctgtggatcaaggcttgccaaggaggctgactgccactggcactgtgattgtatcagttcttgacataaatgacaacccccctgtgtttgagtaccgtgaatatggtgccaccgtgtctgaggacattcttgttggaactgaagttcttcaagtgtatgcagcaagtcgggatattgaagcaaatgcagaaatcacctactcaataataagtggaaatgaacatgggaaattcagcatagattctaaaacaggggccgtatttatcattgagaatctggattatgagagctctcatgagtattacctaacagtagaggccactgatggaggcacgccttcactgagcgacgttgccactgtgaacgttaatgtaacagatatcaacgataatacccctgtgttcagccaagacacctacacgacagtcatcagtgaagatgccgttcttgagcagtctgtcatcacggttatggccgatgatgccgatggaccttccaacagccacatccactactcaattatagatggcaaccaaggaagctcgttcacaattgaccccgtcaggggagaagtcaaagtgaccaaacttctcgaccgagaaacgatttcaggttacacgctcacggttcaagcttctgataatggcagtccacccagagtcaacacgacgaccgtgaacatcgatgtgtccgatgtcaatgacaacgcgcccgtcttctccaggggaaactacagtgtcattatccaggaaaataagccagtgggcttcagcgtgctgcagctggtagtaacagatgaggattcttcccataacggtccacccttcttctttactattgtaactggaaatgatgagaaggcttttgaagttaacccgcaaggagtcctcctgacatcatctgccatcaagaggaaggagaaagatcattacttactgcaggtgaaggtggcagataatggaaagcctcagttgtcatctttgacatacattgacattagggtaattgaggagagcatctatccgcctgcgattttgcccctggagattttcatcacctcttctggagaagaatactcaggtggcgtcattgggaagatccatgccacagaccaggacgtgtatgatactctaacctacagtctcgaccctcagatggacaacctgttctctgtttccagcacagggggcaagctgatagcacacaaaaagctagacatagggcaataccttctcaatgtcagcgtaacagatgggaagttcacgacggtggccgacatcacagtgcatatcagacaagtcacacaggagatgttgaaccacaccatcgcgatccgctttgccaacctcactccggaagaattcgttggtgactactggcgcaacttccagcgagctttacggaacatcctgggtgtgaggaggaacgacatacagattgttagtttgcagtcctctgaacctcacccacatctggacgtcttactttttgtagagaaaccaggtagtgctcagatctcaacaaaacaacttctgcacaagattaactcttccgtgactgacattgaggaaatcattggagttaggatactgaatgtattccagaaactctgcgcgggactggactgcccctggaagttctgcgatgaaaaggtgtctgtggatgaaagtgtgatgtcaacacacagcacagccagactgagttttgtgactccccgccaccacagggcagcggtgtgtctctgcaaagagggaaggtgcccacctgtccaccatggctgtgaagatgatccgtgccctgagggatccgaatgtgtgtctgatccctgggaggagaaacacacctgtgtctgtcccagcggcaggtttggtcagtgcccagggagttcatctatgacactgactggaaacagctacgtgaaataccgtctgacggaaaatgaaaacaaattagagatgaaactgaccatgaggctcagaacatattccacgcatgcggttgtcatgtatgctcgaggaactgactatagcatcttggagattcatcatggaaggctgcagtacaagtttgactgtggaagtggccctggaattgtctctgttcagagcattcaggtcaatgatgggcagtggcacgcagtggccctggaagtgaatggaaactatgctcgcttggttctagaccaagttcatactgcatcgggcacagccccagggactctgaaaaccctgaacctggataactatgtgttttttggtggccacatccgtcagcagggaacaaggcatggaagaagtcctcaagttggtaatggtttcaggggttgtatggactccatttatttgaatgggcaggagctccctttaaacagcaaacccagaagctatgcacacatcgaagagtcggtggatgtatctccaggctgcttcctgacggccacggaagactgcgccagcaacccttgccagaatggaggcgtttgcaatccgtcacctgctggaggttattactgcaaatgcagtgccttgtacatagggacccactgtgagataagcgtcaatccgtgttcctccaacccatgcctctatgggggcacgtgtgttgtcgacaacggaggctttgtttgccagtgtagaggattatatactggtcagaggtgtcagcttagtccatactgcaaagatgaaccctgtaagaatggcggaacatgctttgacagtttggatggcgccgtttgtcagtgtgattcgggttttaggggagaaaggtgtcagagtgatatcgacgagtgctctggaaacccttgcctgcacggggccctctgtgagaacacgcacggctcctatcactgcaactgcagccacgagtacaggggacaactcctgctacactcggatggatgaatttcacatatacatataatattttcatctacagtccaatttaataatgtgaatgcccttataaacccctaattcttcaatttcca

SEQ ID NO: 432331 - DNA, 8085 bp, Homo sapiens
ccgaaggaggagggcgggcgtttcacccgcgccacagctgcggccggccagagagaccgcagaggccgggacccccgcagcctccacggccgctgctgccactgtcggggtggcgcgcccagccggagaatcccgtccgcgcccggggcggggggcgaggcggggcgctgacgtcacctcccctcccccaccgcctccaagggggagggagtggggaaagaggcagcgagtcgccgcagccggcggccgcaactcctcaactcggcggctggctgcctgggcacgtcctgacaaacttggctgctcccgggccctcgttccggccccgcgcactctcttttcgcctgcgtttggtgcttaagtttgccctggtcggaagcctccggagatgcggccgcctgggtcccggcggcacggacgttggcactctggttagggacatgctgaagatcccggggaggcaaagttggtacttcaaacccggctcttaacacatatctacaccgcgaggggatcacggagctgccgaggactttagagcccagggccgaggactcggctagactgattcccgacagttaagcaatggggagacatttggctttgctcctgcttctgctccttctcttccaacattttggagacagtgatggcagccaacgacttgaacagactcctctgcagtttacacacctcgagtacaacgtcaccgtgcaggagaactctgcagctaagacttatgtggggcatcctgtcaagatgggtgtttacattacacatccagcgtgggaagtaaggtacaaaattgtttccggagacagtgaaaacctgttcaaagctgaagagtacattctcggagacttttgctttctaagaataaggaccaaaggaggaaatacagctattcttaatagagaagtgaaggatcactacacattgatagtgaaagcacttgaaaaaaatactaatgtggaggcgcgaacaaaggtcagggtgcaggtgctggatacaaatgacttgagaccgttattctcacccacctcatacagcgtttctttacctgaaaacacagctataaggaccagtatcgcaagagtcagcgccacggatgcagacataggaaccaacggggaattttactacagttttaaagatcgaacagatatgtttgctattcacccaaccagtggtgtgatagtgttaactggtagacttgattacctagagaccaagctctatgagatggaaatcctcgctgcggaccgtggcatgaagttgtatgggagcagtggcatcagcagcatggccaagctaacggtgcacatcgaacaggccaatgaatgtgctccggtgataacagcagtgacattgtcaccatcagaactggacagggacccagcatatgcaattgtgacagtggatgactgcgatcagggtgccaatggtgacatagcatctttaagcatcgtggcaggtgaccttctccagcagtttagaacagtgaggtcctttccagggagtaaggagtataaagtcaaagccatcggtgacattgattgggacagtcatcctttcggctacaatctcacactacaggctaaagataaaggaactccgccccagttctcttctgttaaagtcattcacgtgacttctccacagttcaaagccgggccagtcaagtttgaaaaggatgtttacagagcagaaataagtgaatttgctcctcccaacacacctgtggtcatggtaaaggccattcctgcttattcccatttgaggtatgtttttaaaaggacacctggaaaagctaaattcagtttaaattacaacactggtctcatttctattttagaaccagttaaaagacagcaggcagcccattttgaacttgaagtaacaacaagtgacagaaaagcgtccaccaaggtcttggtgaaagtcttaggtgcaaatagcaatccccctgaatttacccagacagcgtacaaagctgcttttgatgagaacgtgcccattggtactactatcatgagcctgagtgccgtagaccctgatgagggtgagaatgggtacgtgacatacagtatcgcaaatttaaatcatgtgccgtttgcgattgaccatttcactggtgccgtgagtacgtcagaaaacctggactacgaactgatgcctcgggtttatactctgaggattcgtgcatcagactggggcttgccgtaccgccgggaagtcgaagtccttgctacaattactctcaataacttgaatgacaacacacctttgtttgagaaaataaattgtgaagggacaattcccagagatctaggcgtgggagagcaaataaccactgtttctgctattgatgcagatgaacttcagttggtacagtatcagattgaagctggaaatgaactggatttgtttagtttaaaccccaactcgggggtattgtcattaaagcgatcgctaatggatggcttaggtgcaaaggtgtctttccacagtctgagaatcacagctacagatggagaaaattttgccacaccattatatatcaacataacagtggctgccagtcacaagctggtaaacttgcagtgtgaagagactggtgttgccaaaatgctggcagagaagctcctgcaggcaaataaattacacaaccagggagaggtggaggatattttcttcgattctcactctgtcaatgctcacataccgcagtttagaagcactcttccgactggtattcaggtaaaggaaaaccagcctgtgggttccagtgtaattttcatgaactccactgaccttgacactggcttcaatggaaaactggtctatgctgtttctggaggaaatgaggatagttgcttcatgattgatatggaaacaggaatgctgaaaattttatctcctcttgaccgtgaaacaacagacaaatacaccctgaatattaccgtctatgaccttgggataccccagaaggctgcgtggcgtcttctacatgtcgtggttgtcgatgccaatgataatccacccgagtttttacaggagagctattttgtggaagtgagtgaagacaaggaggtacatagtgaaatcatgcaggttgaagccacagataaagacctggggcccaacggacacgtgacgtactcaattcttacagacacagacacattttcaattgacagcgtgacgggtgttgttaacatcgcacgccctctggatcgagagctgcagcatgagcactccttaaagattgaggccagggaccaagccagagaagagcctcagctgttctccactgtcgttgtgaacagtatcactagaagatgttaatgacaacccacctacatttattccacctaattatcgtgtgaaagtccgagaggatcttccagaaggaaccgtcatcatgtggttagaagcccacgatcctgatttaggtcagtctggtcaggtgagatacagccttctggaccacggagaaggaaacttcgatgtggataaactcagtggagcagttaggatcgtccagcagttggactttgagaagaagcaagtgtataatctcactgtgagggccaaagacaagggaaagccagtttctctgtcttctacttgctatgttgaagttgaggtggttgatgtgaatgagaacctgcacccacccgtgttttccagctttgtggaaaaggggacagtgaaagaagatgcacctgttggttcattggtaatgacggtgtcggctcatgatgaggacgccggaagagatggggagatccgatactccattagagatggctctggcgttggtgttttcaaaataggtgaagagacaggtgtcatagagacgtcagatcgactggaccgtgaatcgacctcccattattggctaacagtctttgcaaccgatcagggtgtcgtgcctctttcatcgttcatagagatctacatagaggttgaggatgtcaatgacaatgcaccacagacatcagagcctgtttattacccagaaatcatggaaaattctcctaaagatgtatctgtggtccagatcgaggcatttgatccagattcgagctctaatgacaagctcatgtacaaaattacaagtggaaatccacaaggattcttttcaatacatcctaaaacaggtctcatcacaactacgtcaaggaagctagaccgagaacagcaagatgaacacatattagaggttactgtgacagacaatggtagtccccccaaatcaaccattgcaagagtcattgtgaaaatccttgatgaaaatgacaacaaacctcagtttctgcaaaagttctacaaaatcagactccctgagcgggaaaagccagaccgagaaagaaatgccagacgggagccgctctatcgcgtcatagccaccgacaaggatgagggccccaatgcagaaatctcctacagcatcgaagacgggaatgagcatggcaaatttttcatcgaaccgaaaactggagtggtttcgtccaagaggttttcagcagctggagaatatgatattctttcaattaaggcagttgacaatggtcgccctcaaaagtcatcaaccaccagactccatattgaatggatctccaagcccaaacagtccctggagcccatttcatttgaagaatcattttttacctttactgtgatggaaagtgaccccgttgctcacatgattggagtaatatctgtggagcctcctggcatacccctttggtttgacatcactggtggcaactacgacagtcacttcgatgtggacaagggaactggaaccatcattgttgccaaacctcttgatgcagaacagaagtcaaactacaacctcacagtcgaggctacagatggaaccaccactatcctcactcaggtattcatcaaagtaatagacacaaatgaccatcgtcctcagttttctacatcaaagtatgaagttgttattcctgaagatacagcgccagaaacagaaattttgcaaatcagtgctgtggatcaggatgagaaaaacaaactaatctacactctgcagagcagtagagatccactgagtctcaagaaatttcgtcttgatcctgcaaccggctctctctatacttctgagaaactggatcatgaagctgtttcaccagcacacctcacggtcatggtacgagatcaagatgtgcctgtaaaacgcaactttgcaaggattgtggtcaatgtcagcgacacgaatgaccacgccccgtggttcaccgcttcctcctacaaagggcgggtttatgaatcggcagccgttggctcagttgtgttgcaggtgacggctctggacaaggacaaagggaaaaatgctgaagtgctgtactcgatcgagtcaggaaatattggaaatattggaaattcttttatgattgatcctgtcttgggctctattaaaactgccaaagaattagatcgaagtaaccaagcggagtatgatttaatggtaaaagctacagataagggcagtccaccaatgagtgaaataacttctgtgcgtatctttgtcacaattgctgacaacgcctctccgaagtttacatcaaaagaatattctgttgaacttagtgaaactgtcagcattgggagtttcgttgggatggttacagcccatagtcaatcatcagtggtgtatgaaataaaagatggaaatacaggtgatgcttttgatattaatccacattctggaactatcatcactcagaaagccctggactttgaaactttgcccatttacacattgataatacaaggaactaacatggctggtttgtccactaatacaacggttctagttcacttgcaggatgagaatgacaacgcgccagtttttatgcaggcagaatatacaggactcattagtgaatcagcctcaattaacagcgtggtcctaacagacaggaatgtcccactggtgattcgagcagctgatgctgataaagactcaaatgctttgcttgtatatcacattgttgaaccatctgtacacacatattttgctattgattctagcactggtgctattcatacagtactaagtctggactatgaagaaacaagtatttttcactttaccgtccaagtgcatgacatgggaaccccacgtttatttgctgagtatgcagcgaatgtaacagtacatgtaattgacattaatgactgcccccctgtgtttgccaagccattatatgaagcatctcttttgttaccaacatacaaaggagtaaaagtcatcacagtaaatgctacagatgctgattcaagtgcattctcacagttgatttactccatcaccgaaggcaacatcggggagaagttttctatggactacaagactggtgctctcactgtccaaaacacaactcagttaagaagccgctacgagctaaccgttagagcttccgatggcagatttgccggccttacctctgtcaaaattaatgtgaaagaaagcaaagaaagtcacctaaagtttacccaggatgtctactctgcggtagtgaaagagaattccaccgaggccgaaacattagctgtcattactgctattgggagtccaatcaatgagcctttgttttatcacatcctcaacccagatcgcagatttaaaataagccgcacttcaggggttctgtcaaccactggcacgcccttcgatcgtgagcagcaggaggcgtttgatgtggttgtagaagtgatagaggaacataagccttctgcagtggcccacgttgtcgtgaaggtcattgtagaagaccaaaatgataatgcgccggtgtttgtcaaccttccctactacgccgttgttaaagtggacactgaggtgggccatgtcattcgctatgtcactgctgtagacagagacagtggcagaaacggggaagtgcattactacctcaaggaacatcatgaacactttcaaattggacccttgggtgaaatttcactgaaaaagcaatttgagcttgacaccttaaataaagaatatcttgttacagtggttgcaaaagatggagggaacccggccttttcagcggaagttatcgttccgatcactgtcatgaataaagccatgcctgtgtttgaaaaacctttctacagtgcagagattgcagagagcatccaggtgcacagccctgtggtccacgtgcaggctaacagcccggaaggcctgaaagtgttctacagcatcacagacggagaccctttcagccagttcactattaacttcaatactggagttatcaatgtcatagctcctctggactttgaggcccacccggcatataagctgagcatacgcgcaactgactccttgacgggcgctcatgctgaagtatttgtggacatcatagtagacgacatcaatgataaccctcctgtgtttgctcagcagtcttatgcggtgaccctgtctgaggcatctgtaattggaacgtctgttgttcaagttagagccaccgattctgattcagaaccaaatagaggaatctcataccagatgtttgggaatcacagcaagagtcatgatcattttcatgtagacagcagcactggcctcatctcactactcagaaccctgaaataaaatcctggctggtgacaaaaaaaaaaaaaaaaaaaaaaaaaaaaaaaaaaaaaaaaaaaaaacaaaacaaaaaaaaaaaaaaaaaaaacaaaaaaaaaacacaacaaaaacaaacaaaaaaaaaaacaaaccacagacaacaaagccaggaagagaggcacaaaaaaacccgccgccggccaataaacataacaacacaacatacacccatcagccaacattcctcaccccccacccaacacccctattatcactattccctacaccacttattactacaatacacagccgctctatcccccgccaactatattcatacgtctctcaaaataacatacatatctgcctatctgtctaacacacctcactaacctctccatcaatttctgctgcgccgacccacactcctccactcaatcttacaaacccatacatatatt

SEQ ID NO: 432332 - DNA, 565 bp, Homo sapiens
taaataagaacatttactcagacataccaccccaggtgcctgtccggcctatttcctacaccccgagtattccaagtgactcaagaaacaatctggaccgaaattccttcgaaggatctgctatcccagagcatcccgaattcagcacttttaaccccgagtctgtgcacgggcaccgaaaagcagtggcggtctgcagcgtggcgccaaacctgcctcccccacccccttcaaactccccttctgacagcgactccatccagaagcctagctgggactttgactatgacagtaagagccactttttcatctcactaaagtgtcacttgagataaacagtgaggttacaaattctgtccagtcaaaatgtgtgtactcttcattagagacaagtatgctcagactgaaatccgtatgatgatttgaaacttttttggatgtcccgattgctgggttagcattgtggctttgatgttattttaattaagaaattgaatctagtcatgtttagttaatattctggagagatcatttcattttataattgataaaggttctcatctat

SEQ ID NO: 432333 - DNA, 432 bp, Homo sapiens
aattttatactgaacatttttatatttaatctttcattactttagaattcatttctctgtgatgcagtcgtcaaatttattctttccaaacagagagccagtcatgctgggcttttcattaagcaaatagacgttttcccacagaattggatagtaaaatgttatcatcttaaataaaaccctaaatcagtctcaaggggtgcaggggagtcatactttaaaaaatatgcttaaacttggttctggtttattttttcctctgtgtgattcacagggagttcatctatgacactgactggaaacagctacgtgaaataccgtctgacggaaaatgaaaacaaattagagatgaaactgaccatgaggctcagaacatattccacgcatgcggttgtcatgtatgctcgaggaactgactatagcatcttggag

SEQ ID NO: 432334 - DNA, 2444 bp, Homo sapiens
aaatttcgacggggtcttctcaccggtttcattcagttggccactgctgagcagctgagaaggtggcgacgtaggggccatggggctgggccgggtcctgctgtttctggccgtcgccttcccttttgcacccccggcagccgccgctgagccccacagtcttcgttacaacctcatggtgctgtcccaggatggatctgtgcagtcagggtttctcgctgagggacatctggatggtcagcccttcctgcgctatgacaggcagaaacgcagggcaaagccccagggacagtgggcagaagatgtcctgggagctaagacctgggacacagagaccgaggacttgacagagaatgggcaagacctcaggaggaccctgactcatatcaaggaccagaaaggaggcttgcattccctccaggagattagggtctgtgagatccatgaagacagcagcaccaggggctcccggcatttctactacgatggggagctcttcctctcccaaaacctggagactcaagaatcgacagtgccccagtcctccagagctcagaccttggctatgaacgtcacaaatttctggaaggaagatgccatgaagaccaagacacactatcgcgctatgcaggcagactgcctgcagaaactacagcgatatctgaaatccggggtggccatcaggagaacagtgccccccatggtgaatgtcacctgcagcgaggtctcagagggcaacatcaccgtgacatgcagggcttccagcttctatccccggaatatcacactgacctggcgtcaggatggggtatctttgagccacaacacccagcagtggggggatgtcctgcctgatgggaatggaacctaccagacctgggtggccaccaggattcgccaaggagaggagcagaggttcacctgctacatggaacacagcgggaatcacggcactcaccctgtgccctctgggaaggcgctggtgcttcagagtcaacggacagactttccatatgtttctgctgctatgccatgttttgttattattattattctctgtgtcccttgttgcaagaagaaaacatcagcggcagagggtccagagcttgtgagcctgcaggtcctggatcaacacccagttgggacaggagaccacagggatgcagcacagctgggatttcagcctctgatgtcagctactgggtccactggttccactgagggcgcctagactctacagccaggcggccaggattcaactccctgcctggatctcaccagcactttccctctgtttcctgacctatgaaacagaaaataacatcacttatttattgttgttggatgctgcaaagtgttagtaggtatgaggtgtttgctgctctgccacgtagagagccagcaaagggatcatgaccaactcaacattccattggaggctatatgatcaaacagcaaattgtttatcatgaatgcaggatgtgggcaaactcacgactgctcctgccaacagaaggtttgctgagggcattcactccatggtgctcattggagttatctactgggtcatctagagcctattgtttgaggaatgcagtcttacaagcctactctggacccagcagctgactccttcttccacccctcttcttgctatctcctataccaataaatacgaagggctgtggaagatcagagcccttgttcacgagaagcaagaagccccctgaccccttgttccaaatatactcttttgtctttctctttattcccacgttcgccctttgttcagtccaatacagggttgtggggcccttaacagtgccatattaattggtatcattatttctgttgtttttgtttttgtttttgtttttgtttttgagacagagtctcactctgtcacccaggctgcagttcactggtgtgatctcagctcactgcaacctctgcctcccaggttcaagcacttctcgtacctcagactcccgaatagctgggattacagacaggcaccaccacacccagctaatttttgtattttttgtagagacggggtttcgccaagttgaccagcccagtttcaaactcctgacctcaggtgatctgcctgccttggcatcccaaagtgctgggattacaagaatgagccaccgtgcctggcctattttattatattgtaatatattttattatattagccaccatgcctgtcctattttcttatgttttaatatattttaatatattacatgtgcagtaattagattatcatgggtgaactttatgagtgagtatcttggtgatgactcctcctgaccagcccaggaccagctttcttgtcaccttgaggtcccctcgccccgtcacaccgttatgcattactctgtgtctactattatgtgtgcataatttataccgtaaatgtttactctttaaataga

SEQ ID NO: 432335 - DNA, 2371 bp, Homo sapiens
  misc_feature (69)..(69): n is a, c, g, or t
ggaccctgcagtggcgcctaaagtctgcgaggaggaagtcctgcgaggacttagtccctgagtccaggnatctaagagccccacagtcttcgttacaacctcatggtgctgtcccaggatggatctgtgcagtcagggtttctcgctgagggacatctggatggtcagcccttcctgcgctatgacaggcagaaacgcagggcaaagccccagggacagtgggcagaagatgtcctgggagctaagacctgggacacagagaccgaggacttgacagagaatgggcaagacctcaggaggaccctgactcatatcaaggaccagaaaggaggcttgcattccctccaggagattagggtctgtgagatccatgaagacagcagcaccaggggctcccggcatttctactacgatggggagctcttcctctcccaaaacctggagactcaagaatcgacagtgccccagtcctccagagctcagaccttggctatgaacgtcacaaatttctggaaggaagatgccatgaagaccaagacacactatcgcgctatgcaggcagactgcctgcagaaactacagcgatatctgaaatccggggtggccatcaggagaacagtgccccccatggtgaatgtcacctgcagcgaggtctcagagggcaacatcaccgtgacatgcagggcttccagcttctatccccggaatatcacactgacctggcgtcaggatggggtatctttgagccacaacacccagcagtggggggatgtcctgcctgatgggaatggaacctaccagacctgggtggccaccaggattcgccaaggagaggagcagaggttcacctgctacatggaacacagcgggaatcacggcactcaccctgtgccctctgggaaggcgctggtgcttcagagtcaacggacagactttccatatgtttctgctgctatgccatgttttgttattattattattctctgtgtcccttgttgcaagaagaaaacatcagcggcagagggtccagagcttgtgagcctgcaggtcctggatcaacacccagttgggacaggagaccacagggatgcagcacagctgggatttcagcctctgatgtcagctactgggtccactggttccactgagggcgcctagactctacagccaggcggccaggattcaactccctgcctggatctcaccagcactttccctctgtttcctgacctatgaaacagaaaataacatcacttatttattgttgttggatgctgcaaagtgttagtaggtatgaggtgtttgctgctctgccacgtagagagccagcaaagggatcatgaccaactcaacattccattggaggctatatgatcaaacagcaaattgtttatcatgaatgcaggatgtgggcaaactcacgactgctcctgccaacagaaggtttgctgagggcattcactccatggtgctcattggagttatctactgggtcatctagagcctattgtttgaggaatgcagtcttacaagcctactctggacccagcagctgactccttcttccacccctcttcttgctatctcctataccaataaatacgaagggctgtggaagatcagagcccttgttcacgagaagcaagaagccccctgaccccttgttccaaatatactcttttgtctttctctttattcccacgttcgccctttgttcagtccaatacagggttgtggggcccttaacagtgccatattaattggtatcattatttctgttgtttttgtttttgtttttgtttttgtttttgagacagagtctcactctgtcacccaggctgcagttcactggtgtgatctcagctcactgcaacctctgcctcccaggttcaagcacttctcgtacctcagactcccgaatagctgggattacagacaggcaccaccacacccagctaatttttgtattttttgtagagacggggtttcgccaagttgaccagcccagtttcaaactcctgacctcaggtgatctgcctgccttggcatcccaaagtgctgggattacaagaatgagccaccgtgcctggcctattttattatattgtaatatattttattatattagccaccatgcctgtcctattttcttatgttttaatatattttaatatattacatgtgcagtaattagattatcatgggtgaactttatgagtgagtatcttggtgatgactcctcctgaccagcccaggaccagctttcttgtcaccttgaggtcccctcgccccgtcacaccgttatgcattactctgtgtctactattatgtgtgcataatttataccgtaaatgtttactctttaaataga

SEQ ID NO: 432336 - DNA, 2100 bp, Homo sapiens
gctgagcggagccgcgggcgggagggcggacggaccgactgacggtagggacgggaggcgagcaagatggcgcagacgcagggcacccggaggaaagtctgttactactacgacggggatgttggaaattactattatggacaaggccacccaatgaagcctcaccgaatccgcatgactcataatttgctgctcaactatggtctctaccgaaaaatggaaatctatcgccctcacaaagccaatgctgaggagatgaccaagtaccacagcgatgactacattaaattcttgcgctccatccgtccagataacatgtcggagtacagcaagcagatgcagagattcaacgttggtgaggactgtccagtattcgatggcctgtttgagttctgtcagttgtctactggtggttctgtggcaagtgctgtgaaacttaataagcagcagacggacatcgctgtgaattgggctgggggcctgcaccatgcaaagaagtccgaggcatctggcttctgttacgtcaatgatatcgtcttggccatcctggaactgctaaagtatcaccagagggtgctgtacattgacattgatattcaccatggtgacggcgtggaagaggccttctacaccacggaccgggtcatgactgtgtcctttcataagtatggagagtacttcccaggaactggggacctacgggatatcggggctggcaaaggcaagtattatgctgttaactacccgctccgagacgggattgatgacgagtcctatgaggccattttcaagccggtcatgtccaaagtaatggagatgttccagcctagtgcggtggtcttacagtgtggctcagactccctatctggggatcggttaggttgcttcaatctaactatcaaaggacacgccaagtgtgtggaatttgtcaagagctttaacctgcctatgctgatgctgggaggcggtggttacaccattcgtaacgttgcccggtgctggacatatgagacagctgtggccctggatacggagatccctaatgagcttccatacaatgactactttgaatactttggaccagatttcaagctccacatcagtccttccaatatgactaaccagaacacgaatgagtacctggagaagatcaaacagcgactgtttgagaaccttagaatgctgccgcacgcaccggggttcaaatgcaggcgattcctgaggacgccatccctgaggagagtggcgatgaggacgaagacgaccctgacaaggcgcatctcgatctgctcctctgacaaacgaattgcctgtgaggaagagttctccgattctgaagaggagggagaggggggccgcaagaactcttccaacttcaaaaaagccaagagagtcaaaacagaggatgaaaaagagaaagacccagaggagaagaaagaagtcaccgaagaggagaaaaccaaggaggagaagccagaagccaaaggggtcaaggaggaggtcaagttggcctgaatggacctctccagctctggcttcctgctgagtccctcacgtttcttccccaacccctcagattttatattttctatttctctgtgtatttatataaaaatttattaaatataaatatccccagggacagaaaccaaggccccgagctcagggcagctgtgctgggtgagctcttccaggagccaccttgccacccattcttcccgttcttaactttgaccaaccataaagggtgccaggtctgggtgaaagggatacttttatgcaaccataagacaaactcctgaaatgccaagtgcctgcttagtagctttggaaaggtgcccttattgaacattctagaaggggtggctgggtcttcaaggatctcctgtttttttcaggctcctaaagtaacatcagccatttttagattggttctgttttcgtaccttcccactggcctcaagtgagccaagaaacactgcctgccctctgtctgtcttctcctaattctgcaggtggaggttgctagtctagtttcctttttgagatactattttcatttttgtgagcctctttgtaataaaatggtacatttctata

SEQ ID NO: 432337 - DNA, 651 bp, Homo sapiens
  misc_feature (6)..(6): n is a, c, g, or t
  misc_feature (12)..(12): n is a, c, g, or t
gagtgntgctgnggtcgatctagaggatccccacgcgcaccggggttcaaatgcaggcgattcctgaggacgccatccctgaggagagtggcgatgaggacgaagacgaccctgacaaggcgcatctcgatctgctcctctgacaaacgaattgcctgtgaggaagagttctccgattctgaagaggagggagaggggggccgcaagaactcttccaacttcaaaaaagccaagagagtcaaaacagaggatgaaaaagagaaagacccagaggagaagaaagaagtcaccgaagaggagaaaaccaaggaggagaagccagaagccaaaggggtcaaggaggaggtcaagttggcctgaatggacctctccagctctggcttcctgctgagtccctcacgtttcttccccaacccctcagattttatattttctatttctctgtgtatttatataaaaatttattaaatataaatatccccagggacagaaaccaaggccccgagctcagggcagctgtgctgggtgagctcttccaggagccaccttgccacccattcttcccgttcttaactttgaccggcggtgcggcgtgacgactggtggaccatgacattgagaaaggtaatcactgcgcgaaatccataacca

SEQ ID NO: 432338 - DNA, 823 bp, Homo sapiens
  misc_feature (43)..(43): n is a, c, g, or t
  misc_feature (45)..(45): n is a, c, g, or t
acccacgcgtcgcggacgcgtgggtcgacccacgcgtcgggangngttctccgattctgaagaggagggagaggggggccgcaagaactcttccaacttcaaaaaagccaagagagtcaaaacagaggatgaaaaagagaaagacccagaggagaagaaagaagtcaccgaagaggagaaaaccaaggaggagaagccagaagccaaaggggtcaaggaggaggtcaagttggcctgaatggacctctccagctctggcttcctgctgagtccctcacgtttcttccccaacccctcagattttatattttctatttctctgtgtatttatataaaaatttattaaatataaatatccccagggacagaaaccaaggccccgagctcagggcagctgtgctgggtgagctcttccaggagccaccttgccacccattcttcccgttcttaactttgaccaaccataaagggtgccaggtctgggtgaaagggatacttttatgcaaccataagacaaactcctgaaatgccaagtgcctgcttagtagctttggaaaggtgcccttattgaacattctagaaggggtggctgggtcttcaaggatctcctgtttttttcaggctcctaaagtaacatcagccatttttagattggttctgttttcgtaccttcccactggcctcaagtgagccaagaaacactgcctgccctctgtctgtcttctcctaattctgcaggtggaggttgctagtctagtttcctttttgagatactattttcatttttgtgagcctctttgtaataaaatggtacatttctata

SEQ ID NO: 432339 - DNA, 284 bp, Homo sapiens
  misc_feature (257)..(258): n is a, c, g, or t
agagctaggagccccagcccccagtagtcacctaggatcctgtggaagtcactgtctgcacttttgccctgaggctctgggctgggtcatctcatgccagtctctgctctctccacagggtcaaggaggaggtcaagttggcctgaatggacctctccagctctggcttcctgctgagtccctcacgtttcttccccaacccctcagattttataaattttatataaatacacagagaaatagcaatataatctganncgttggggaagaacgtgaggatcgtc

SEQ ID NO: 432340 - DNA, 1776 bp, Homo sapiens
  misc_feature (1771)..(1771): n is a, c, g, or t
gctgagcggagccgcgggcgggagggcggacggaccgactgacggtagggacgggaggcgagcaagatggcgcagacgcagggcacccggaggaaagtctgttactactacgacggggatgttggaaattactattatggacaaggccacccaatgaagcctcaccgaatccgcatgactcataatttgctgctcaactatggtctctaccgaaaaatggaaatctatcgccctcacaaagccaatgctgaggagatgaccaagtaccacagcgatgactacattaaattcttgcgctccatccgtccagataacatgtcggagtacagcaagcagatgcagagattcaacgttggtgaggactgtccagtattcgatggcctgtttgagttctgtcagttgtctactggtggttctgtggcaagtgctgtgaaacttaataagcagcagacggacatcgctgtgaattgggctgggggcctgcaccatgcaaagaagtccgaggcatctggcttctgttacgtcaatgatatcgtcttggccatcctggaactgctaaagtatcaccagagggtgctgtacattgacattgatattcaccatggtgacggcgtggaagaggccttctacaccacggaccgggtcatgactgtgtcctttcataagtatggagagtacttcccaggaactggggacctacgggatatcggggctggcaaaggcaagtattatgctgttaactacccgctccgagacgggattgatgacgagtcctatgaggccattttcaagccggtcatgtccaaagtaatggagatgttccagcctagtgcggtggtcttacagtgtggctcagactccctatctggggatcggttaggttgcttcaatctaactatcaaaggacacgccaagtgtgtggaatttgtcaagagctttaacctgcctatgctgatgctgggaggcggtggttacaccattcgtaacgttgcccggtgctggacatatgagacagctgtggccctggatacggagatccctaatgagcttccatacaatgactactttgaatactttggaccagatttcaagctccacatcagtccttccaatatgactaaccagaacacgaatgagtacctggagaagatcaaacagcgactgtttgagaaccttagaatgctgccgcacgcaccggggttcaaatgcaggcgattcctgaggacgccatccctgaggagagtggcgatgaggacgaagacgaccctgacaaggcgcatctcgatctgctcctctgacaaacgaattgcctgtgaggaagagttctccgattctgaagaggagggagaggggggccgcaagaactcttccaacttcaaaaaagccaagagagtcaaaacagaggatgaaaaagagaaagacccagaggagaagaaagaagtcaccgaagaggagaaaaccaaggaggagaagccagaagccaaaggggtcaaggaggaggtcaagttggcctgaatggacctctccagctctggcttcctgctgagtccctcacgtttcttccccaacccctcagattttatattttctatttctctgtgtatttatataaaaatttattaaatataaatatccccagggacagaaaccaaggccccgagctcagggcagctgtgctgggtgagctcttccaggagccaccttgccacccattcttcccgttcttaactttgaccggcggtgcggcgtggggatcctctagagcagaccncagca

SEQ ID NO: 432341 - DNA, 2144 bp, Homo sapiens
atgtctggggtctctgcccgctggtgctgctgtctcccactcggtcatcctgagaacacagcctgagcgtctctgtcactcggggtagaccacgcggggaggcgagcaagatggcgcagacgcagggcacccggaggaaagtctgttactactacgacggggatgttggaaattactattatggacaaggccacccaatgaagcctcaccgaatccgcatgactcataatttgctgctcaactatggtctctaccgaaaaatggaaatctatcgccctcacaaagccaatgctgaggagatgaccaagtaccacagcgatgactacattaaattcttgcgctccatccgtccagataacatgtcggagtacagcaagcagatgcagagattcaacgttggtgaggactgtccagtattcgatggcctgtttgagttctgtcagttgtctactggtggttctgtggcaagtgctgtgaaacttaataagcagcagacggacatcgctgtgaattgggctgggggcctgcaccatgcaaagaagtccgaggcatctggcttctgttacgtcaatgatatcgtcttggccatcctggaactgctaaagtatcaccagagggtgctgtacattgacattgatattcaccatggtgacggcgtggaagaggccttctacaccacggaccgggtcatgactgtgtcctttcataagtatggagagtacttcccaggaactggggacctacgggatatcggggctggcaaaggcaagtattatgctgttaactacccgctccgagacgggattgatgacgagtcctatgaggccattttcaagccggtcatgtccaaagtaatggagatgttccagcctagtgcggtggtcttacagtgtggctcagactccctatctggggatcggttaggttgcttcaatctaactatcaaaggacacgccaagtgtgtggaatttgtcaagagctttaacctgcctatgctgatgctgggaggcggtggttacaccattcgtaacgttgcccggtgctggacatatgagacagctgtggccctggatacggagatccctaatgagcttccatacaatgactactttgaatactttggaccagatttcaagctccacatcagtccttccaatatgactaaccagaacacgaatgagtacctggagaagatcaaacagcgactgtttgagaaccttagaatgctgccgcacgcaccggggttcaaatgcaggcgattcctgaggacgccatccctgaggagagtggcgatgaggacgaagacgaccctgacaaggcgcatctcgatctgctcctctgacaaacgaattgcctgtgaggaagagttctccgattctgaagaggagggagaggggggccgcaagaactcttccaacttcaaaaaagccaagagagtcaaaacagaggatgaaaaagagaaagacccagaggagaagaaagaagtcaccgaagaggagaaaaccaaggaggagaagccagaagccaaaggggtcaaggaggaggtcaagttggcctgaatggacctctccagctctggcttcctgctgagtccctcacgtttcttccccaacccctcagattttatattttctatttctctgtgtatttatataaaaatttattaaatataaatatccccagggacagaaaccaaggccccgagctcagggcagctgtgctgggtgagctcttccaggagccaccttgccacccattcttcccgttcttaactttgaccaaccataaagggtgccaggtctgggtgaaagggatacttttatgcaaccataagacaaactcctgaaatgccaagtgcctgcttagtagctttggaaaggtgcccttattgaacattctagaaggggtggctgggtcttcaaggatctcctgtttttttcaggctcctaaagtaacatcagccatttttagattggttctgttttcgtaccttcccactggcctcaagtgagccaagaaacactgcctgccctctgtctgtcttctcctaattctgcaggtggaggttgctagtctagtttcctttttgagatactattttcatttttgtgagcctctttgtaataaaatggtacatttctata

SEQ ID NO: 432342 - DNA, 2379 bp, Homo sapiens
gctgagcggagccgcgggcgggagggcggacggaccgactgacggtagggacgggaggcgagcaagatggcgcagacgcagggcacccggaggaaagtctgttactactacgacggggatgttggaaattactattatggacaaggccacccaatgaagcctcaccgaatccgcatgactcataatttgctgctcaactatggtctctaccgaaaaatggaaatctatcgccctcacaaagccaatgctgaggagatgaccaagtaccacagcgatgactacattaaattcttgcgctccatccgtccagataacatgtcggagtacagcaagcagatgcagagattcaacgttggtgaggactgtccagtattcgatggcctgtttgagttctgtcagttgtctactggtggttctgtggcaagtgctgtgaaacttaataagcagcagacggacatcgctgtgaattgggctgggggcctgcaccatgcaaagaagtccgaggcatctggcttctgttacgtcaatgatatcgtcttggccatcctggaactgctaaagtatcaccagagggtgctgtacattgacattgatattcaccatggtgacggcgtggaagaggccttctacaccacggaccgggtcatgactgtgtcctttcataagtatggagagtacttcccaggaactggggacctacgggatatcggggctggcaaaggcaagtattatgctgttaactacccgctccgagacgggattgatgacgagtcctatgaggccattttcaagccggtcatgtccaaagtaatggagatgttccagcctagtgcggtggtcttacagtgtggctcagactccctatctggggatcggttaggttgcttcaatctaactatcaaaggacacgccaagtgtgtggaatttgtcaagagctttaacctgcctatgctgatgctgggaggcggtggttacaccattcgtaacgttgcccggtgctggacatatgagacagctgtggccctggatacggagatccctaatgagcttccatacaatgactactttgaatactttggaccagatttcaagctccacatcagtccttccaatatgactaaccagaacacgaatgagtacctggagaagatcaaacagcgactgtttgagaaccttagaatgctgccgcacgcaccggggttcaaatgcaggcgattcctgaggacgccatccctgaggagagtggcgatgaggacgaagacgaccctgacaaggcgcatctcgatctgctcctctgacaaacgaattgcctgtgaggaagagttctccgattctgaagaggagggagaggggggccgcaagaactcttccaacttcaaaaaagccaagagagtcaaaacagaggatgaaaaagagaaagacccagaggagaagaaagaagtcaccgaagaggagaaaaccaaggaggagaagccagaagccaaaggggtcaaggaggaggtcaagttggcctgaatggacctctccagctctggcttcctgctgagtccctcacgtttcttccccaacccctcagattttatattttctatttctctgtgtatttatataaaaatttattaaatataaatatccccagggacagaaaccaaggccccgagctcagggcagctgtgctgggtgagctcttccaggagccaccttgccacccattcttcccgttcttaactttgaccaaccataaagggtgccaggtctgggtgaaagggatacttttatgcaaccataagacaaactcctgaaatgccaagtgcctgcttagtagctttggaaaggtgcccttattgaacattctagaaggggtggctgggtcttcaaggatctcctgtttttttcaggctcctaaagtaacatcagccatttttagattggttctgttttcgtaccttcccactggcctcaagtgagccaagaaacactgcctgccctctgtctgtcttctcctaattctgcaggtggaggttgctagtctagtttcctttttgagatactattttcatttttgtgagcctctttgtaataaaatggtacatttctataaaaaaaaaaaaaaaaaaaaaaaaaaaaaaaaaaaaaaaaaaaaaaaaaaaaaaaaaaaaaacacacaagcactcaacactaaataagactattctcccatgataccacaccccccacacctcccctctatcataacctttactagaaccaacaactactgccctatatactgtcttcctcttatttcttacccaccctcagctgtctgctctcctacactccttccgtcaccacaacattctatacctcttttttttacaacctcctccttgtttactt

SEQ ID NO: 432343 - DNA, 1894 bp, Homo sapiens
  misc_feature (1869)..(1869): n is a, c, g, or t
gctgagcggagccgcgggcgggagggcggacggaccgactgacggtagggacgggaggcgagcaagatggcgcagacgcagggcacccggaggaaagtctgttactactacgacggggatgttggaaattactattatggacaaggccacccaatgaagcctcaccgaatccgcatgactcataatttgctgctcaactatggtctctaccgaaaaatggaaatctatcgccctcacaaagccaatgctgaggagatgaccaagtaccacagcgatgactacattaaattcttgcgctccatccgtccagataacatgtcggagtacagcaagcagatgcagagattcaacgttggtgaggactgtccagtattcgatggcctgtttgagttctgtcagttgtctactggtggttctgtggcaagtgctgtgaaacttaataagcagcagacggacatcgctgtgaattgggctgggggcctgcaccatgcaaagaagtccgaggcatctggcttctgttacgtcaatgatatcgtcttggccatcctggaactgctaaagtatcaccagagggtgctgtacattgacattgatattcaccatggtgacggcgtggaagaggccttctacaccacggaccgggtcatgactgtgtcctttcataagtatggagagtacttcccaggaactggggacctacgggatatcggggctggcaaaggcaagtattatgctgttaactacccgctccgagacgggattgatgacgagtcctatgaggccattttcaagccggtcatgtccaaagtaatggagatgttccagcctagtgcggtggtcttacagtgtggctcagactccctatctggggatcggttaggttgcttcaatctaactatcaaaggacacgccaagtgtgtggaatttgtcaagagctttaacctgcctatgctgatgctgggaggcggtggttacaccattcgtaacgttgcccggtgctggacatatgagacagctgtggccctggatacggagatccctaatgagcttccatacaatgactactttgaatactttggaccagatttcaagctccacatcagtccttccaatatgactaaccagaacacgaatgagtacctggagaagatcaaacagcgactgtttgagaaccttagaatgctgccgcacgcaccggggttcaaatgcaggcgattcctgaggacgccatccctgaggagagtggcgatgaggacgaagacgaccctgacaaggcgcatctcgatctgctcctctgacaaacgaattgcctgtgaggaagagttctccgattctgaagaggagggagaggggggccgcaagaactcttccaacttcaaaaaagccaagagagtcaaaacagaggatgaaaaagagaaagacccagaggagaagaaagaagtcaccgaagaggagaaaaccaaggaggagaagccagaagccaaaggggtcaaggaggaggtcaagttggcctgaatggacctctccagctctggcttcctgctgagtccctcacgtttcttccccaacccctcagattttatattttctatttctctgtgtatttatataaaaatttattaaatataaatatccccagggacagaaaccaaggccccgagctcagggcagctgtgctgggtgagctcttccaggagccaccttgccacccattcttcccgttcttaactttgaccaaccataaagggtgccaggtctgggtgaaagggatacttttatgcaaccataagacaaactcctgaaatgccaagtgcctgcttagtagctttggaaaggtgcccttattgaactcccgttcttaactttganccgcggtgcgcgtgaggaaccgagc

SEQ ID NO: 432344 - DNA, 1770 bp, Homo sapiens
  misc_feature (1759)..(1759): n is a, c, g, or t
gctgagcggagccgcgggcgggagggcggacggaccgactgacggtagggacgggaggcgagcaagatggcgcagacgcagggcacccggaggaaagtctgttactactacgacggggatgttggaaattactattatggacaaggccacccaatgaagcctcaccgaatccgcatgactcataatttgctgctcaactatggtctctaccgaaaaatggaaatctatcgccctcacaaagccaatgctgaggagatgaccaagtaccacagcgatgactacattaaattcttgcgctccatccgtccagataacatgtcggagtacagcaagcagatgcagagattcaacgttggtgaggactgtccagtattcgatggcctgtttgagttctgtcagttgtctactggtggttctgtggcaagtgctgtgaaacttaataagcagcagacggacatcgctgtgaattgggctgggggcctgcaccatgcaaagaagtccgaggcatctggcttctgttacgtcaatgatatcgtcttggccatcctggaactgctaaagtatcaccagagggtgctgtacattgacattgatattcaccatggtgacggcgtggaagaggccttctacaccacggaccgggtcatgactgtgtcctttcataagtatggagagtacttcccaggaactggggacctacgggatatcggggctggcaaaggcaagtattatgctgttaactacccgctccgagacgggattgatgacgagtcctatgaggccattttcaagccggtcatgtccaaagtaatggagatgttccagcctagtgcggtggtcttacagtgtggctcagactccctatctggggatcggttaggttgcttcaatctaactatcaaaggacacgccaagtgtgtggaatttgtcaagagctttaacctgcctatgctgatgctgggaggcggtggttacaccattcgtaacgttgcccggtgctggacatatgagacagctgtggccctggatacggagatccctaatgagcttccatacaatgactactttgaatactttggaccagatttcaagctccacatcagtccttccaatatgactaaccagaacacgaatgagtacctggagaagatcaaacagcgactgtttgagaaccttagaatgctgccgcacgcaccggggttcaaatgcaggcgattcctgaggacgccatccctgaggagagtggcgatgaggacgaagacgaccctgacaaggcgcatctcgatctgctcctctgacaaacgaattgcctgtgaggaagagttctccgattctgaagaggagggagaggggggccgcaagaactcttccaacttcaaaaaagccaagagagtcaaaacagaggatgaaaaagagaaagacccagaggagaagaaagaagtcaccgaagaggagaaaaccaaggaggagaagccagaagccaaaggggtcaaggaggaggtcaagttggcctgaatggacctctccagctctggcttcctgctgagtccctcacgtttcttccccaacccctcagattttatattttctatttctctgtgtatttatataaaaatttattaaatataaatatccccagggacagaaaccaaggccccgagctcagggcagctgtgctgggtgagctcttccaggagccaccttgccacccattcttcccgttcttaactttgaccccgctcgtgcagcatggggatcntcatagaataa

SEQ ID NO: 432345 - DNA, 1987 bp, Homo sapiens
gctgagcggagccgcgggcgggagggcggacggaccgactgacggtagggacgggaggcgagcaagatggcgcagacgcagggcacccggaggaaagtctgttactactacgacgcgccctcacaaagccaatgctgaggagatgaccaagtaccacagcgatgactacattaaattcttgcgctccatccgtccagataacatgtcggagtacagcaagcagatgcagagattcaacgttggtgaggactgtccagtattcgatggcctgtttgagttctgtcagttgtctactggtggttctgtggcaagtgctgtgaaacttaataagcagcagacggacatcgctgtgaattgggctgggggcctgcaccatgcaaagaagtccgaggcatctggcttctgttacgtcaatgatatcgtcttggccatcctggaactgctaaagtatcaccagagggtgctgtacattgacattgatattcaccatggtgacggcgtggaagaggccttctacaccacggaccgggtcatgactgtgtcctttcataagtatggagagtacttcccaggaactggggacctacgggatatcggggctggcaaaggcaagtattatgctgttaactacccgctccgagacgggattgatgacgagtcctatgaggccattttcaagccggtcatgtccaaagtaatggagatgttccagcctagtgcggtggtcttacagtgtggctcagactccctatctggggatcggttaggttgcttcaatctaactatcaaaggacacgccaagtgtgtggaatttgtcaagagctttaacctgcctatgctgatgctgggaggcggtggttacaccattcgtaacgttgcccggtgctggacatatgagacagctgtggccctggatacggagatccctaatgagcttccatacaatgactactttgaatactttggaccagatttcaagctccacatcagtccttccaatatgactaaccagaacacgaatgagtacctggagaagatcaaacagcgactgtttgagaaccttagaatgctgccgcacgcaccggggttcaaatgcaggcgattcctgaggacgccatccctgaggagagtggcgatgaggacgaagacgaccctgacaaggcgcatctcgatctgctcctctgacaaacgaattgcctgtgaggaagagttctccgattctgaagaggagggagaggggggccgcaagaactcttccaacttcaaaaaagccaagagagtcaaaacagaggatgaaaaagagaaagacccagaggagaagaaagaagtcaccgaagaggagaaaaccaaggaggagaagccagaagccaaaggggtcaaggaggaggtcaagttggcctgaatggacctctccagctctggcttcctgctgagtccctcacgtttcttccccaacccctcagattttatattttctatttctctgtgtatttatataaaaatttattaaatataaatatccccagggacagaaaccaaggccccgagctcagggcagctgtgctgggtgagctcttccaggagccaccttgccacccattcttcccgttcttaactttgaccaaccataaagggtgccaggtctgggtgaaagggatacttttatgcaaccataagacaaactcctgaaatgccaagtgcctgcttagtagctttggaaaggtgcccttattgaacattctagaaggggtggctgggtcttcaaggatctcctgtttttttcaggctcctaaagtaacatcagccatttttagattggttctgttttcgtaccttcccactggcctcaagtgagccaagaaacactgcctgccctctgtctgtcttctcctaattctgcaggtggaggttgctagtctagtttcctttttgagatactattttcatttttgtgagcctctttgtaataaaatggtacatttctata

SEQ ID NO: 432346 - DNA, 1806 bp, Homo sapiens
gctgagcggagccgcgggcgggagggcggacggaccgactgacggtagggacgggaggcgagcaagatggcgcagacgcagggcacccggaggaaagtctgttactactacgacggggatgttggaaattactattatggacaaggccacccaatgaagcctcaccgaatccgcatgactcataatttgctgctcaactatggtctctaccgaaaaatggaaatctatcgccctcacaaagccaatgctgaggagatgaccaagtaccacagcgatgactacattaaattcttgcgctccatccgtccagataacatgtcggagtacagcaagcagatgcagagattcaacgttggtgaggactgtccagtattcgatggcctgtttgagttctgtcagttgtctactggtggttctgtggcaagtgctgtgaaacttaataagcagcagacggacatcgctgtgaattgggctgggggcctgcaccatgcaaagaagtccgaggcatctggcttctgttacgtcaatgatatcgtcttggccatcctggaactgctaaagtatcaccagagggtgctgtacattgacattgatattcaccatggtgacggcgtggaagaggccttctacaccacggaccgggtcatgactgtgtcctttcataagtatggagagtacttcccaggaactggggacctacgggatatcggggctggcaaaggcaagtattatgctgttaactacccgctccgagacgggattgatgacgagtcctatgaggccattttcaagccggtcatgtccaaagtaatggagatgttccagcctagtgcggtggtcttacagtgtggctcagactccctatctggggatcggttaggttgcttcaatctaactatcaaaggacacgccaagtgtgtggaatttgtcaagagctttaacctgcctatgctgatgctgggaggcggtggttacaccattcgtaacgttgcccggtgctggacatatgagacagctgtggccctggatacggagatccctaatgagcttccatacaatgactactttgaatactttggaccagatttcaagctccacatcagtccttccaatatgactaaccagaacacgaatgagtacctggagaagatcaaacagcgactgtttgagaaccttagaatgctgccgcacgcaccggggttcaaatgcaggcgattcctgaggacgccatccctgaggagagtggcgatgaggacgaagacgaccctgacaaggcgcatctcgatctgctcctctgacaaacgaattgcctgtgaggaagagttctccgattctgaagaggagggagaggggggccgcaagaactcttccaacttcaaaaaagccaagagagtcaaaacagaggatgaaaaagagaaagacccagaggagaagaaagaagtcaccgaagaggagaaaaccaaggaggagaagccagaagccaaaggggtcaaggaggaggtcaagttggcctgaatggacctctccagctctggcttcctgctgagtccctcacgtttcttccccaacccctcagattttatattttctatttctctgtgtatttatataaaaatttattaaatataaatatccccagggacagaaaccaaggccccgagctcagggcagctgtgctgggtgagctcttccaggagccaccttgccacccattcttcccgttcttaactttgaccggcggtgcggcgtgacgactggtggaccatgacattgagaaaggtaatcactgcgcgaaatccataacca

SEQ ID NO: 432347 - DNA, 2481 bp, Homo sapiens
gctgagcggagccgcgggcgggagggcggacggaccgactgacggtagggacgggaggcgagcaagatggcgcagacgcagggcacccggaggaaagtctgttactactacgacggggatgttggaaattactattatggacaaggccacccaatgaagcctcaccgaatccgcatgactcataatttgctgctcaactatggtctctaccgaaaaatggaaatctatcgccctcacaaagccaatgctgaggagatgaccaagtaccacagcgatgactacattaaattcttgcgctccatccgtccagataacatgtcggagtacagcaagcagatgcagagattcaacgttggtgaggactgtccagtattcgatggcctgtttgagttctgtcagttgtctactggtggttctgtggcaagtgctgtgaaacttaataagcagcagacggacatcgctgtgaattgggctgggggcctgcaccatgcaaagaagtccgaggcatctggcttctgttacgtcaatgatatcgtcttggccatcctggaactgctaaagtatgcctgcctggccttgtctcttggaagagcaccttaggccaggttcccatttccctcttcccctgggcttgcctccctagtttgcttttcctaccgatgtgctggctaggatgtgctcggtgagtgtctctggccatcatctccttgatggggtcttggtttgatctgagccacggcatgatcaggggcagatgctgctcagatcctgcctccagagtgtccctgtgtggctggagttgaccctggctgtagagtaggaagatcggacttggtcggcttggtcaggcctctggagacacccggccgctcttccaccttccttcagccagtttccacgtctctggtgcttagagatacctgagggaggcagccagcccggtatcaccagagggtgctgtacattgacattgatattcaccatggtgacggcgtggaagaggccttctacaccacggaccgggtcatgactgtgtcctttcataagtatggagagtacttcccaggaactggggacctacgggatatcggggctggcaaaggcaagtattatgctgttaactacccgctccgagacgggattgatgacgagtcctatgaggccattttcaagccggtcatgtccaaagtaatggagatgttccagcctagtgcggtggtcttacagtgtggctcagactccctatctggggatcggttaggttgcttcaatctaactatcaaaggacacgccaagtgtgtggaatttgtcaagagctttaacctgcctatgctgatgctgggaggcggtggttacaccattcgtaacgttgcccggtgctggacatatgagacagctgtggccctggatacggagatccctaatgagcttccatacaatgactactttgaatactttggaccagatttcaagctccacatcagtccttccaatatgactaaccagaacacgaatgagtacctggagaagatcaaacagcgactgtttgagaaccttagaatgctgccgcacgcaccggggttcaaatgcaggcgattcctgaggacgccatccctgaggagagtggcgatgaggacgaagacgaccctgacaaggcgcatctcgatctgctcctctgacaaacgaattgcctgtgaggaagagttctccgattctgaagaggagggagaggggggccgcaagaactcttccaacttcaaaaaagccaagagagtcaaaacagaggatgaaaaagagaaagacccagaggagaagaaagaagtcaccgaagaggagaaaaccaaggaggagaagccagaagccaaaggggtcaaggaggaggtcaagttggcctgaatggacctctccagctctggcttcctgctgagtccctcacgtttcttccccaacccctcagattttatattttctatttctctgtgtatttatataaaaatttattaaatataaatatccccagggacagaaaccaaggccccgagctcagggcagctgtgctgggtgagctcttccaggagccaccttgccacccattcttcccgttcttaactttgaccaaccataaagggtgccaggtctgggtgaaagggatacttttatgcaaccataagacaaactcctgaaatgccaagtgcctgcttagtagctttggaaaggtgcccttattgaacattctagaaggggtggctgggtcttcaaggatctcctgtttttttcaggctcctaaagtaacatcagccatttttagattggttctgttttcgtaccttcccactggcctcaagtgagccaagaaacactgcctgccctctgtctgtcttctcctaattctgcaggtggaggttgctagtctagtttcctttttgagatactattttcatttttgtgagcctctttgtaataaaatggtacatttctata

SEQ ID NO: 432348 - DNA, 2025 bp, Homo sapiens
gctgagcggagccgcgggcgggagggcggacggaccgactgacggtagggacgggaggcgagcaagatggcgcagacgcagggcacccggaggaaagtctgttactactacgacggggatgttggaaattactattatggacaaggccacccaatgaagcctcaccgaatccgcatgactcataatttgctgctcaactatggtctctaccgaaaaatggaaatctatcgccctcacaaagccaatgctgaggagatgaccaagtaccacagcgatgactacattaaattcttgcgctccatccgtccagataacatgtcggagtacagcaagcagatgcagagatcaagtgctgtgaaacttaataagcagcagacggacatcgctgtgaattgggctgggggcctgcaccatgcaaagaagtccgaggcatctggcttctgttacgtcaatgatatcgtcttggccatcctggaactgctaaagtatcaccagagggtgctgtacattgacattgatattcaccatggtgacggcgtggaagaggccttctacaccacggaccgggtcatgactgtgtcctttcataagtatggagagtacttcccaggaactggggacctacgggatatcggggctggcaaaggcaagtattatgctgttaactacccgctccgagacgggattgatgacgagtcctatgaggccattttcaagccggtcatgtccaaagtaatggagatgttccagcctagtgcggtggtcttacagtgtggctcagactccctatctggggatcggttaggttgcttcaatctaactatcaaaggacacgccaagtgtgtggaatttgtcaagagctttaacctgcctatgctgatgctgggaggcggtggttacaccattcgtaacgttgcccggtgctggacatatgagacagctgtggccctggatacggagatccctaatgagcttccatacaatgactactttgaatactttggaccagatttcaagctccacatcagtccttccaatatgactaaccagaacacgaatgagtacctggagaagatcaaacagcgactgtttgagaaccttagaatgctgccgcacgcaccggggttcaaatgcaggcgattcctgaggacgccatccctgaggagagtggcgatgaggacgaagacgaccctgacaaggcgcatctcgatctgctcctctgacaaacgaattgcctgtgaggaagagttctccgattctgaagaggagggagaggggggccgcaagaactcttccaacttcaaaaaagccaagagagtcaaaacagaggatgaaaaagagaaagacccagaggagaagaaagaagtcaccgaagaggagaaaaccaaggaggagaagccagaagccaaaggggtcaaggaggaggtcaagttggcctgaatggacctctccagctctggcttcctgctgagtccctcacgtttcttccccaacccctcagattttatattttctatttctctgtgtatttatataaaaatttattaaatataaatatccccagggacagaaaccaaggccccgagctcagggcagctgtgctgggtgagctcttccaggagccaccttgccacccattcttcccgttcttaactttgaccaaccataaagggtgccaggtctgggtgaaagggatacttttatgcaaccataagacaaactcctgaaatgccaagtgcctgcttagtagctttggaaaggtgcccttattgaacattctagaaggggtggctgggtcttcaaggatctcctgtttttttcaggctcctaaagtaacatcagccatttttagattggttctgttttcgtaccttcccactggcctcaagtgagccaagaaacactgcctgccctctgtctgtcttctcctaattctgcaggtggaggttgctagtctagtttcctttttgagatactattttcatttttgtgagcctctttgtaataaaatggtacatttctata

SEQ ID NO: 432349 - DNA, 2153 bp, Homo sapiens
gctgagcggagccgcgggcgggagggcggacggaccgactgacggtagggacgggaggcgagcaagatggcgcagacgcagggcacccggaggaaagtctgttactactacgacggggatgttggaaattactattatggacaaggccacccaatgaagcctcaccgaatccgcatgactcataatttgctgctcaactatggtctctaccgaaaaatggaaatctatcgccctcacaaagccaatgctgaggagatgaccaagtaccacagcgatgactacattaaattcttgcgctccatccgtccagataacatgtcggagtacagcaagcagatgcagagattcaacgttggtgaggactgtccagtattcgatggcctgtttgagttctgtcagttgtctactggtggttctgtggcaagtgctgtgaaacttaataagcagcagacggacatcgctgtgaattgggctgggggcctgcaccatgcaaagaagtccgaggcatctggcttctgttacgtcaatgatatcgtcttggccatcctggaactgctaaaccagtttccacgtctctggtgcttagagatacctgagggaggcagccagcccggtatcaccagagggtgctgtacattgacattgatattcaccatggtgacggcgtggaagaggccttctacaccacggaccgggtcatgactgtgtcctttcataagtatggagagtacttcccaggaactggggacctacgggatatcggggctggcaaaggcaagtattatgctgttaactacccgctccgagacgggattgatgacgagtcctatgaggccattttcaagccggtcatgtccaaagtaatggagatgttccagcctagtgcggtggtcttacagtgtggctcagactccctatctggggatcggttaggttgcttcaatctaactatcaaaggacacgccaagtgtgtggaatttgtcaagagctttaacctgcctatgctgatgctgggaggcggtggttacaccattcgtaacgttgcccggtgctggacatatgagacagctgtggccctggatacggagatccctaatgagcttccatacaatgactactttgaatactttggaccagatttcaagctccacatcagtccttccaatatgactaaccagaacacgaatgagtacctggagaagatcaaacagcgactgtttgagaaccttagaatgctgccgcacgcaccggggttcaaatgcaggcgattcctgaggacgccatccctgaggagagtggcgatgaggacgaagacgaccctgacaaggcgcatctcgatctgctcctctgacaaacgaattgcctgtgaggaagagttctccgattctgaagaggagggagaggggggccgcaagaactcttccaacttcaaaaaagccaagagagtcaaaacagaggatgaaaaagagaaagacccagaggagaagaaagaagtcaccgaagaggagaaaaccaaggaggagaagccagaagccaaaggggtcaaggaggaggtcaagttggcctgaatggacctctccagctctggcttcctgctgagtccctcacgtttcttccccaacccctcagattttatattttctatttctctgtgtatttatataaaaatttattaaatataaatatccccagggacagaaaccaaggccccgagctcagggcagctgtgctgggtgagctcttccaggagccaccttgccacccattcttcccgttcttaactttgaccaaccataaagggtgccaggtctgggtgaaagggatacttttatgcaaccataagacaaactcctgaaatgccaagtgcctgcttagtagctttggaaaggtgcccttattgaacattctagaaggggtggctgggtcttcaaggatctcctgtttttttcaggctcctaaagtaacatcagccatttttagattggttctgttttcgtaccttcccactggcctcaagtgagccaagaaacactgcctgccctctgtctgtcttctcctaattctgcaggtggaggttgctagtctagtttcctttttgagatactattttcatttttgtgagcctctttgtaataaaatggtacatttctata

SEQ ID NO: 432350 - DNA, 1733 bp, Homo sapiens
aaaataggctagtacgaggccgggtgttgaatcggccgaggctggtctgtggcgcaagtgctgtgaaacttaataagcagcagacggacatcgctgtgaattgggctgggggcctgcaccatgcaaagaagtccgaggcatctggcttctgttacgtcaatgatatcgtcttggccatcctggaactgctaaagtatcaccagagggtgctgtacattgacattgatattcaccatggtgacggcgtggaagaggccttctacaccacggaccgggtcatgactgtgtcctttcataagtatggagagtacttcccaggaactggggacctacgggatatcggggctggcaaaggcaagtattatgctgttaactacccgctccgagacgggattgatgacgagtcctatgaggccattttcaagccggtcatgtccaaagtaatggagatgttccagcctagtgcggtggtcttacagtgtggctcagactccctatctggggatcggttaggttgcttcaatctaactatcaaaggacacgccaagtgtgtggaatttgtcaagagctttaacctgcctatgctgatgctgggaggcggtggttacaccattcgtaacgttgcccggtgctggacatatgagacagctgtggccctggatacggagatccctaatgagcttccatacaatgactactttgaatactttggaccagatttcaagctccacatcagtccttccaatatgactaaccagaacacgaatgagtacctggagaagatcaaacagcgactgtttgagaaccttagaatgctgccgcacgcaccggggttcaaatgcaggcgattcctgaggacgccatccctgaggagagtggcgatgaggacgaagacgaccctgacaaggcgcatctcgatctgctcctctgacaaacgaattgcctgtgaggaagagttctccgattctgaagaggagggagaggggggccgcaagaactcttccaacttcaaaaaagccaagagagtcaaaacagaggatgaaaaagagaaagacccagaggagaagaaagaagtcaccgaagaggagaaaaccaaggaggagaagccagaagccaaaggggtcaaggaggaggtcaagttggcctgaatggacctctccagctctggcttcctgctgagtccctcacgtttcttccccaacccctcagattttatattttctatttctctgtgtatttatataaaaatttattaaatataaatatccccagggacagaaaccaaggccccgagctcagggcagctgtgctgggtgagctcttccaggagccaccttgccacccattcttcccgttcttaactttgaccaaccataaagggtgccaggtctgggtgaaagggatacttttatgcaaccataagacaaactcctgaaatgccaagtgcctgcttagtagctttggaaaggtgcccttattgaacattctagaaggggtggctgggtcttcaaggatctcctgtttttttcaggctcctaaagtaacatcagccatttttagattggttctgttttcgtaccttcccactggcctcaagtgagccaagaaacactgcctgccctctgtctgtcttctcctaattctgcaggtggaggttgctagtctagtttcctttttgagatactattttcatttttgtgagcctctttgtaataaaatggtacatttctata

SEQ ID NO: 432351 - DNA, 1413 bp, Homo sapiens
  misc_feature (1408)..(1408): n is a, c, g, or t
gctgagcggagccgcgggcgggagggcggacggaccgactgacggtagggacgggaggcgagcaagatggcgcagacgcagggcacccggaggaaagtctgttactactacgacggggatgttggaaattactattatggacaaggccacccaatgaagcctcaccgaatccgcatgactcataatttgctgctcaactatggtctctaccgaaaaatggaaatctatcgccctcacaaagccaatgctgaggagatgaccaagtaccacagcgatgactacattaaattcttgcgctccatccgtccagataacatgtcggagtacagcaagcagatgcagagattcaacgttggtgaggactgtccagtattcgatggcctgtttgagttctgtcagttgtctactggtggttctgtggcaagtgctgtgaaacttaataagcagcagacggacatcgctgtgaattgggctgggggcctgcaccatgcaaagaagtccgaggcatctggcttctgttacgtcaatgatatcgtcttggccatcctggaactgctaaagtatcaccagagggtgctgtacattgacattgatattcaccatggtgacggcgtggaagaggccttctacaccacggaccgggtcatgactgtgtcctttcataagtatggagagtacttcccaggaactggggacctacgggatatcggggctggcaaagatttcaagctccacatcagtccttccaatatgactaaccagaacacgaatgagtacctggagaagatcaaacagcgactgtttgagaaccttagaatgctgccgcacgcaccggggttcaaatgcaggcgattcctgaggacgccatccctgaggagagtggcgatgaggacgaagacgaccctgacaaggcgcatctcgatctgctcctctgacaaacgaattgcctgtgaggaagagttctccgattctgaagaggagggagaggggggccgcaagaactcttccaacttcaaaaaagccaagagagtcaaaacagaggatgaaaaagagaaagacccagaggagaagaaagaagtcaccgaagaggagaaaaccaaggaggagaagccagaagccaaaggggtcaaggaggaggtcaagttggcctgaatggacctctccagctctggcttcctgctgagtccctcacgtttcttccccaacccctcagattttatattttctatttctctgtgtatttatataaaaatttattaaatataaatatccccagggacagaaaccaaggccccgagctcagggcagctgtgctgggtgagctcttccaggagccaccttgccacccattcttcccgttcttaactttgaccggcggtgcggcgtggggatcctctagagcagaccncagca

SEQ ID NO: 432352 - DNA, 1566 bp, Homo sapiens
aaaataggctagtacgaggccgggtgttgaatcggccgaggctggtctgtggcgattgatattcaccatggtgacggcgtggaagaggccttctacaccacggaccgggtcatgactgtgtcctttcataagtatggagagtacttcccaggaactggggacctacgggatatcggggctggcaaaggcaagtattatgctgttaactacccgctccgagacgggattgatgacgagtcctatgaggccattttcaagccggtcatgtccaaagtaatggagatgttccagcctagtgcggtggtcttacagtgtggctcagactccctatctggggatcggttaggttgcttcaatctaactatcaaaggacacgccaagtgtgtggaatttgtcaagagctttaacctgcctatgctgatgctgggaggcggtggttacaccattcgtaacgttgcccggtgctggacatatgagacagctgtggccctggatacggagatccctaatgagcttccatacaatgactactttgaatactttggaccagatttcaagctccacatcagtccttccaatatgactaaccagaacacgaatgagtacctggagaagatcaaacagcgactgtttgagaaccttagaatgctgccgcacgcaccggggttcaaatgcaggcgattcctgaggacgccatccctgaggagagtggcgatgaggacgaagacgaccctgacaaggcgcatctcgatctgctcctctgacaaacgaattgcctgtgaggaagagttctccgattctgaagaggagggagaggggggccgcaagaactcttccaacttcaaaaaagccaagagagtcaaaacagaggatgaaaaagagaaagacccagaggagaagaaagaagtcaccgaagaggagaaaaccaaggaggagaagccagaagccaaaggggtcaaggaggaggtcaagttggcctgaatggacctctccagctctggcttcctgctgagtccctcacgtttcttccccaacccctcagattttatattttctatttctctgtgtatttatataaaaatttattaaatataaatatccccagggacagaaaccaaggccccgagctcagggcagctgtgctgggtgagctcttccaggagccaccttgccacccattcttcccgttcttaactttgaccaaccataaagggtgccaggtctgggtgaaagggatacttttatgcaaccataagacaaactcctgaaatgccaagtgcctgcttagtagctttggaaaggtgcccttattgaacattctagaaggggtggctgggtcttcaaggatctcctgtttttttcaggctcctaaagtaacatcagccatttttagattggttctgttttcgtaccttcccactggcctcaagtgagccaagaaacactgcctgccctctgtctgtcttctcctaattctgcaggtggaggttgctagtctagtttcctttttgagatactattttcatttttgtgagcctctttgtaataaaatggtacatttctata

SEQ ID NO: 432353 - DNA, 1811 bp, Homo sapiens
agtcattcagcaaacactgactgcccactatgtgcctagtatttaataagggctacagaagtgggagttgtggtctcggtctcagtaacgttagactctgcttgtgagaataagataaactaaaagtgcttgctcataatgtaaggcttcaagtctgtaagaccgaatgagtagagtagatgcagctaaaggtcaggaaggcttcctggaggaagtggcactagagcttgggcaacagaagagacttagggagttgagagggaggccattctaggttcagtgttactagagtgttagaagggtcttagagaactttttaaattggaaaattgaaatcccaagtgggcaagcaagggctccagcctagcactcccttttctctcccacatagcatgagggagagtggaaaggtaggagtgggtgggaaagtgttgcacccagcctttccactccaaacctcgtattgctttcttgaggttggtggtgaccaggatgtatcattttaggtcatgtccaaagtaatggagatgttccagcctagtgcggtggtcttacagtgtggctcagactccctatctggggatcggttaggttgcttcaatctaactatcaaaggacacgccaagtgtgtggaatttgtcaagagctttaacctgcctatgctgatgctgggaggcggtggttacaccattcgtaacgttgcccggtgctggacatatgagacagctgtggccctggatacggagatccctaatgagcttccatacaatgactactttgaatactttggaccagatttcaagctccacatcagtccttccaatatgactaaccagaacacgaatgagtacctggagaagatcaaacagcgactgtttgagaaccttagaatgctgccgcacgcaccggggttcaaatgcaggcgattcctgaggacgccatccctgaggagagtggcgatgaggacgaagacgaccctgacaaggcgcatctcgatctgctcctctgacaaacgaattgcctgtgaggaagagttctccgattctgaagaggagggagaggggggccgcaagaactcttccaacttcaaaaaagccaagagagtcaaaacagaggatgaaaaagagaaagacccagaggagaagaaagaagtcaccgaagaggagaaaaccaaggaggagaagccagaagccaaaggggtcaaggaggaggtcaagttggcctgaatggacctctccagctctggcttcctgctgagtccctcacgtttcttccccaacccctcagattttatattttctatttctctgtgtatttatataaaaatttattaaatataaatatccccagggacagaaaccaaggccccgagctcagggcagctgtgctgggtgagctcttccaggagccaccttgccacccattcttcccgttcttaactttgaccaaccataaagggtgccaggtctgggtgaaagggatacttttatgcaaccataagacaaactcctgaaatgccaagtgcctgcttagtagctttggaaaggtgcccttattgaacattctagaaggggtggctgggtcttcaaggatctcctgtttttttcaggctcctaaagtaacatcagccatttttagattggttctgttttcgtaccttcccactggcctcaagtgagccaagaaacactgcctgccctctgtctgtcttctcctaattctgcaggtggaggttgctagtctagtttcctttttgagatactattttcatttttgtgagcctctttgtaataaaatggtacatttctata

SEQ ID NO: 432354 - DNA, 1137 bp, Homo sapiens
aaaataggctagtacgaggccgggtgttgaatcggccgaggctggtctgtggcgtgtggcctggatacggagatccctaatgagcttccatacaatgactactttgaatactttggaccagatttcaagctccacatcagtccttccaatatgactaaccagaacacgaatgagtacctggagaagatcaaacagcgactgtttgagaaccttagaatgctgccgcacgcaccggggttcaaatgcaggcgattcctgaggacgccatccctgaggagagtggcgatgaggacgaagacgaccctgacaaggcgcatctcgatctgctcctctgacaaacgaattgcctgtgaggaagagttctccgattctgaagaggagggagaggggggccgcaagaactcttccaacttcaaaaaagccaagagagtcaaaacagaggatgaaaaagagaaagacccagaggagaagaaagaagtcaccgaagaggagaaaaccaaggaggagaagccagaagccaaaggggtcaaggaggaggtcaagttggcctgaatggacctctccagctctggcttcctgctgagtccctcacgtttcttccccaacccctcagattttatattttctatttctctgtgtatttatataaaaatttattaaatataaatatccccagggacagaaaccaaggccccgagctcagggcagctgtgctgggtgagctcttccaggagccaccttgccacccattcttcccgttcttaactttgaccaaccataaagggtgccaggtctgggtgaaagggatacttttatgcaaccataagacaaactcctgaaatgccaagtgcctgcttagtagctttggaaaggtgcccttattgaacattctagaaggggtggctgggtcttcaaggatctcctgtttttttcaggctcctaaagtaacatcagccatttttagattggttctgttttcgtaccttcccactggcctcaagtgagccaagaaacactgcctgccctctgtctgtcttctcctaattctgcaggtggaggttgctagtctagtttcctttttgagatactattttcatttttgtgagcctctttgtaataaaatggtacatttctata

SEQ ID NO: 432355 - DNA, 621 bp, Homo sapiens
  misc_feature (6)..(6): n is a, c, g, or t
  misc_feature (12)..(12): n is a, c, g, or t
  misc_feature (616)..(616): n is a, c, g, or t
gagtgntgctgnggtcgatctagaggatccccacgcgcaccggggttcaaatgcaggcgattcctgaggacgccatccctgaggagagtggcgatgaggacgaagacgaccctgacaaggcgcatctcgatctgctcctctgacaaacgaattgcctgtgaggaagagttctccgattctgaagaggagggagaggggggccgcaagaactcttccaacttcaaaaaagccaagagagtcaaaacagaggatgaaaaagagaaagacccagaggagaagaaagaagtcaccgaagaggagaaaaccaaggaggagaagccagaagccaaaggggtcaaggaggaggtcaagttggcctgaatggacctctccagctctggcttcctgctgagtccctcacgtttcttccccaacccctcagattttatattttctatttctctgtgtatttatataaaaatttattaaatataaatatccccagggacagaaaccaaggccccgagctcagggcagctgtgctgggtgagctcttccaggagccaccttgccacccattcttcccgttcttaactttgaccggcggtgcggcgtggggatcctctagagcagaccncagca

SEQ ID NO: 432356 - DNA, 2383 bp, Homo sapiens
gctgagcggagccgcgggcgggagggcggacggaccgactgacggtagggacgggaggcgagcaagatggcgcagacgcagggcacccggaggaaagtctgttactactacgacggggatgttggaaattactattatggacaaggccacccaatgaagcctcaccgaatccgcatgactcataatttgctgctcaactatggtctctaccgaaaaatggaaatctatcgccctcacaaagccaatgctgaggagatgaccaagtaccacagcgatgactacattaaattcttgcgctccatccgtccagataacatgtcggagtacagcaagcagatgcagagattcaacgttggtgaggactgtccagtattcgatggcctgtttgagttctgtcagttgtctactggtggttctgtggcaagtgctgtgaaacttaataagcagcagacggacatcgctgtgaattgggctgggggcctgcaccatgcaaagaagtccgaggcatctggcttctgttacgtcaatgatatcgtcttggccatcctggaactgctaaagtatcaccagagggtgctgtacattgacattgatattcaccatggtgacggcgtggaagaggccttctacaccacggaccgggtcatgactgtgtcctttcataagtatggagagtacttcccaggaactggggacctacgggatatcggggctggcaaaggcaagtattatgctgttaactacccgctccgagacgggattgatgacgagtcctatgaggccattttcaagccggtcatgtccaaagtaatggagatgttccagcctagtgcggtggtcttacagtgtggctcagactccctatctggggatcggttaggttgcttcaatctaactatcaaaggacacgccaagtgtgtggaatttgtcaagagctttaacctgcctatgctgatgctgggaggcggtggttacaccattcgtaacgttgcccggtgctggacatatgagacagctgtggccctggatacggagatccctaatgagcttccatacaatgactactttgaatactttggaccagatttcaagctccacatcagtccttccaatatgactaaccagaacacgaatgagtacctggagaagatcaaacagcgactgtttgagaaccttagaatgctgccgcacgcaccggggttcaaatgcaggcgattcctgaggacgccatccctgaggagagtggcgatgaggacgaagacgaccctgacaaggcgcatctcgagtgagacccagacctagagccctatgccttccattcaataggcagctcacacttccaccaccattcctggctgcacactccctccaagctccccacctgtagagaaatctgttttcgagttccagtgcctgtaggaacaggttagggagcccgagttcctccctcttctggttccctttcccttggtgtctcttggaggacacgcagggaagcactgggcatagatgctgagctaaatcagcacccgcctgccctctcacccatgcttcccactccctcccagtctgctcctctgacaaacgaattgcctgtgaggaagagttctccgattctgaagaggagggagaggggggccgcaagaactcttccaacttcaaaaaagccaagagagtcaaaacagaggatgaaaaagagaaagacccagaggagaagaaagaagtcaccgaagaggagaaaaccaaggaggagaagccagaagccaaaggggtcaaggaggaggtcaagttggcctgaatggacctctccagctctggcttcctgctgagtccctcacgtttcttccccaacccctcagattttatattttctatttctctgtgtatttatataaaaatttattaaatataaatatccccagggacagaaaccaaggccccgagctcagggcagctgtgctgggtgagctcttccaggagccaccttgccacccattcttcccgttcttaactttgaccaaccataaagggtgccaggtctgggtgaaagggatacttttatgcaaccataagacaaactcctgaaatgccaagtgcctgcttagtagctttggaaaggtgcccttattgaacattctagaaggggtggctgggtcttcaaggatctcctgtttttttcaggctcctaaagtaacatcagccatttttagattggttctgttttcgtaccttcccactggcctcaagtgagccaagaaacactgcctgccctctgtctgtcttctcctaattctgcaggtggaggttgctagtctagtttcctttttgagatactattttcatttttgtgagcctctttgtaataaaatggtacatttctata

SEQ ID NO: 432357 - DNA, 2046 bp, Homo sapiens
gctgagcggagccgcgggcgggagggcggacggaccgactgacggtagggacgggaggcgagcaagatggcgcagacgcagggcacccggaggaaagtctgttactactacgacggggatgttggaaattactattatggacaaggccacccaatgaagcctcaccgaatccgcatgactcataatttgctgctcaactatggtctctaccgaaaaatggaaatctatcgccctcacaaagccaatgctgaggagatgaccaagtaccacagcgatgactacattaaattcttgcgctccatccgtccagataacatgtcggagtacagcaagcagatgcagagattcaacgttggtgaggactgtccagtattcgatggcctgtttgagttctgtcagttgtctactggtggttctgtggcaagtgctgtgaaacttaataagcagcagacggacatcgctgtgaattgggctgggggcctgcaccatgcaaagaagtccgaggcatctggcttctgttacgtcaatgatatcgtcttggccatcctggaactgctaaagtatcaccagagggtgctgtacattgacattgatattcaccatggtgacggcgtggaagaggccttctacaccacggaccgggtcatgactgtgtcctttcataagtatggagagtacttcccaggaactggggacctacgggatatcggggctggcaaaggcaagtattatgctgttaactacccgctccgagacgggattgatgacgagtcctatgaggccattttcaagccggtcatgtccaaagtaatggagatgttccagcctagtgcggtggtcttacagtgtggctcagactccctatctggggatcggttaggttgcttcaatctaactatcaaaggacacgccaagtgtgtggaatttgtcaagagctttaacctgcctatgctgatgctgggaggcggtggttacaccattcgtaacgttgcccggtgctggacatatgagacagctgtggccctggatacggagatccctaatgagcttccatacaatgactactttgaatactttggaccagatttcaagctccacatcagtccttccaatatgactaaccagaacacgaatgagtacctggagaagatcaaacagcgactgtttgagaaccttagaatgctgccgcacgcaccggggttcaaatgcaggcgattcctgaggacgccatccctgaggagagtggcgatgaggacgaagacgaccctgacaaggcgcatctcgatctgctcctctgacaaacgaattgcctgtgaggaagagttctccgattctgaagaggagggagaggggggccgcaagaactcttccaacttcaaaaaagccaagagagtcaaaacagaggatgaaaaagagaaagacccagaggagaagaaagaagtcaccgaagaggagaaaaccaaggaggagaagccagaagccaaaggggtcaaggaggaggtcaagttggcctgaatggacctctccagctctggcttcctgctgagtccctcacgtttcttccccaacccctcagattttatattttctatttctctgtgtatttatataaggcagctgtgctgggtgagctcttccaggagccaccttgccacccattcttcccgttcttaactttgaccaaccataaagggtgccaggtctgggtgaaagggatacttttatgcaaccataagacaaactcctgaaatgccaagtgcctgcttagtagctttggaaaggtgcccttattgaacattctagaaggggtggctgggtcttcaaggatctcctgtttttttcaggctcctaaagtaacatcagccatttttagattggttctgttttcgtaccttcccactggcctcaagtgagccaagaaacactgcctgccctctgtctgtcttctcctaattctgcaggtggaggttgctagtctagtttcctttttgagatactattttcatttttgtgagcctctttgtaataaaatggtacatttctata

SEQ ID NO: 432358 - DNA, 614 bp, Homo sapiens
  misc_feature (609)..(609): n is a, c, g, or t
cgggtctgactctagaggatccccacgctgcaccggggttcaaatgcaggcgattcctgaggacgccatccctgaggagagtggcgatgaggacgaagacgaccctgacaaggcgcatctcgatctgctcctctgacaaacgaattgcctgtgaggaagagttctccgattctgaagaggagggagaggggggccgcaagaactcttccaacttcaaaaaagccaagagagtcaaaacagaggatgaaaaagagaaagacccagaggagaagaaagaagtcaccgaagaggagaaaaccaaggaggagaagccagaagccaaaggggtcaaggaggaggtcaagttggcctgaatggacctctccagctctggcttcctgctgagtccctcacgtttcttccccaacccctcagattttatattttctatttctctgtgtatttatataaaaatttattaaatataaatatccccagggacagaaaccaaggccccgagctcagggcagctgtgctgggtgagctcttccaggagccaccttgccacccattcttcccgttcttaactttgaccggcggtgcggcgtggggatcctctagagcagaccncagca

SEQ ID NO: 432359 - DNA, 2051 bp, Homo sapiens
gctgagcggagccgcgggcgggagggcggacggaccgactgacggtagggacgggaggcgagcaagatggcgcagacgcagggcacccggaggaaagtctgttactactacgacggggatgttggaaattactattatggacaaggccacccaatgaagcctcaccgaatccgcatgactcataatttgctgctcaactatggtctctaccgaaaaatggaaatctatcgccctcacaaagccaatgctgaggagatgaccaagtaccacagcgatgactacattaaattcttgcgctccatccgtccagataacatgtcggagtacagcaagcagatgcagagattcaacgttggtgaggactgtccagtattcgatggcctgtttgagttctgtcagttgtctactggtggttctgtggcaagtgctgtgaaacttaataagcagcagacggacatcgctgtgaattgggctgggggcctgcaccatgcaaagaagtccgaggcatctggcttctgttacgtcaatgatatcgtcttggccatcctggaactgctaaagtatcaccagagggtgctgtacattgacattgatattcaccatggtgacggcgtggaagaggccttctacaccacggaccgggtcatgactgtgtcctttcataagtatggagagtacttcccaggaactggggacctacgggatatcggggctggcaaaggcaagtattatgctgttaactacccgctccgagacgggattgatgacgagtcctatgaggccattttcaagccggtcatgtccaaagtaatggagatgttccagcctagtgcggtggtcttacagtgtggctcagactccctatctggggatcggttaggttgcttcaatctaactatcaaaggacacgccaagtgtgtggaatttgtcaagagctttaacctgcctatgctgatgctgggaggcggtggttacaccattcgtaacgttgcccggtgctggacatatgagacagctgtggccctggatacggagatccctaatgagcttccatacaatgactactttgaatactttggaccagatttcaagctccacatcagtccttccaatatgactaaccagaacacgaatgagtacctggagaagatcaaacagcgactgtttgagaaccttagaatgctgccgcacgcaccggggttcaaatgcaggcgattcctgaggacgccatccctgaggagagtggcgatgaggacgaagacgaccctgacaaggcgcatctcgatctgctcctctgacaaacgaattgcctgtgaggaagagttctccgattctgaagaggagggagaggggggccgcaagaactcttccaacttcaaaaaagccaagagagtcaaaacagaggatgaaaaagagaaagacccagaggagaagaaagggtcaaggaggaggtcaagttggcctgaatggacctctccagctctggcttcctgctgagtccctcacgtttcttccccaacccctcagattttatattttctatttctctgtgtatttatataaaaatttattaaatataaatatccccagggacagaaaccaaggccccgagctcagggcagctgtgctgggtgagctcttccaggagccaccttgccacccattcttcccgttcttaactttgaccaaccataaagggtgccaggtctgggtgaaagggatacttttatgcaaccataagacaaactcctgaaatgccaagtgcctgcttagtagctttggaaaggtgcccttattgaacattctagaaggggtggctgggtcttcaaggatctcctgtttttttcaggctcctaaagtaacatcagccatttttagattggttctgttttcgtaccttcccactggcctcaagtgagccaagaaacactgcctgccctctgtctgtcttctcctaattctgcaggtggaggttgctagtctagtttcctttttgagatactattttcatttttgtgagcctctttgtaataaaatggtacatttctata

SEQ ID NO: 432360 - DNA, 618 bp, Homo sapiens
  misc_feature (613)..(613): n is a, c, g, or t
cgcatgattcgattcgagctcgtacctcacgccgcaccggggttcaaatgcaggcgattcctgaggacgccatccctgaggagagtggcgatgaggacgaagacgaccctgacaaggcgcatctcgatctgctcctctgacaaacgaattgcctgtgaggaagagttctccgattctgaagaggagggagaggggggccgcaagaactcttccaacttcaaaaaagccaagagagtcaaaacagaggatgaaaaagagaaagacccagaggagaagaaagaagtcaccgaagaggagaaaaccaaggaggagaagccagaagccaaaggggtcaaggaggaggtcaagttggcctgaatggacctctccagctctggcttcctgctgagtccctcacgtttcttccccaacccctcagattttatattttctatttctctgtgtatttatataaaaatttattaaatataaatatccccagggacagaaaccaaggccccgagctcagggcagctgtgctgggtgagctcttccaggagccaccttgccacccattcttcccgttcttaactttgaccggcggtgcggcgtggggatcctctagagcagaccncagca

SEQ ID NO: 432361 - DNA, 1682 bp, Homo sapiens
gctgagcggagccgcgggcgggagggcggacggaccgactgacggtagggacgggaggcgagcaagatggcgcagacgcagggcacccggaggaaagtctgttactactacgacggggatgttggaaattactattatggacaaggccacccaatgaagcctcaccgaatccgcatgactcataatttgctgctcaactatggtctctaccgaaaaatggaaatctatcgccctcacaaagccaatgctgaggagatgaccaagtaccacagcgatgactacattaaattcttgcgctccatccgtccagataacatgtcggagtacagcaagcagatgcagagattcaacgttggtgaggactgtccagtattcgatggcctgtttgagttctgtcagttgtctactggtggttctgtggcaagtgctgtgaaacttaataagcagcagacggacatcgctgtgaattgggctgggggcctgcaccatgcaaagaagtccgaggcatctggcttctgttacgtcaatgatatcgtcttggccatcctggaactgctaaagtatcaccagagggtgctgtacattgacattgatattcaccatggtgacggcgtggaagaggccttctacaccacggaccgggtcatgactgtgtcctttcataagtatggagagtacttcccaggaactggggacctacgggatatcggggctggcaaaggcaagtattatgctgttaactacccgctccgagacgggattgatgacgagtcctatgaggccattttcaagccggtcatgtccaaagtaatggagatgttccagcctagtgcggtggtcttacagtgtggctcagactccctatctggggatcggttaggttgcttcaatctaactatcaaaggacacgccaagtgtgtggaatttgtcaagagctttaacctgcctatgctgatgctgggaggcggtggttacaccattcgtaacgttgcccggtgctggacatatgagacagctgtggccctggatacggagatccctaatgagcttccatacaatgactactttgaatactttggaccagatttcaagctccacatcagtccttccaatatgactaaccagaacacgaatgagtacctggagaagatcaaacagcgactgtttgagaaccttagaatgctgccgcacgcaccggggttcaaatgcaggcgattcctgaggacgccatccctgaggagagtggcgggcagctgtgctgggtgagctcttccaggagccaccttgccacccattcttcccgttcttaactttgaccaaccataaagggtgccaggtctgggtgaaagggatacttttatgcaaccataagacaaactcctgaaatgccaagtgcctgcttagtagctttggaaaggtgcccttattgaacattctagaaggggtggctgggtcttcaaggatctcctgtttttttcaggctcctaaagtaacatcagccatttttagattggttctgttttcgtaccttcccactggcctcaagtgagccaagaaacactgcctgccctctgtctgtcttctcctaattctgcaggtggaggttgctagtctagtttcctttttgagatactattttcatttttgtgagcctctttgtaataaaatggtacatttctata

SEQ ID NO: 432362 - DNA, 1508 bp, Homo sapiens
gctgagcggagccgcgggcgggagggcggacggaccgactgacggtagggacgggaggcgagcaagatggcgcagacgcagggcacccggaggaaagtctgttactactacgacggggatgttggaaattactattatggacaaggccacccaatgaagcctcaccgaatccgcatgactcataatttgctgctcaactatggtctctaccgaaaaatggaaatctatcgccctcacaaagccaatgctgaggagatgaccaagtaccacagcgatgactacattaaattcttgcgctccatccgtccagataacatgtcggagtacagcaagcagatgcagagattcaacgttggtgaggactgtccagtattcgatggcctgtttgagttctgtcagttgtctactggtggttctgtggcaagtgctgtgaaacttaataagcagcagacggacatcgctgtgaattgggctgggggcctgcaccatgcaaagaagtccgaggcatctggcttctgttacgtcaatgatatcgtcttggccatcctggaactgctaaagtatcaccagagggtgctgtacattgacattgatattcaccatggtgacggcgtggaagaggccttctacaccacggaccgggtcatgactgtgtcctttcataagtatggagagtacttcccaggaactggggacctacgggatatcggggctggcaaaggcaagtattatgctgttaactacccgctccgagacgggattgatgacgagtcctatgaggccattttcaagccggtcatgtccaaagtaatggagatgttccagcctagtgcggtggtcttacagtgtggctcagactccctatctggggatcggttaggttgcttcaatctaactatcaaaggacacgccaagtgtgtggaatttgtcaagagctttaacctgcctatgctgatgctgggaggcggtggttacaccattcgtaacgttgcccggtgctggacatatgagacagctgtggccctggatacggagatccctaatgagcttccatacaatgactactttgaatactttggaccagatttcaagctccacatcagtccttccaatatgactaaccagaacacgaatgagtacctggagaagatcaaacagcgactgtttgagaaccttagaatgctgccgcacgcaccggggttcaaatgcaggcgattcctgaggacgccatccctgaggagagtggcgatgaggacgaagacgaccctgacaaggcgcatctcgatctgctcctctgacaaacgaattgcctgtgaggaagagttctccgattctgaagaggagggagaggggggccgcaagaactcttccaacttcaaaaaagccaagagagtcaaaacagaggatgaaaaagagaaagacccagaggagaagaaagaagtcaccgaagaggagaaaaccaaggaggagaagccagaagccaaagggtgaggaaggagctgcctgtg

SEQ ID NO: 432363 - DNA, 1426 bp, Homo sapiens
  misc_feature (1401)..(1401): n is a, c, g, or t
gctgagcggagccgcgggcgggagggcggacggaccgactgacggtagggacgggaggcgagcaagatggcgcagacgcagggcacccggaggaaagtctgttactactacgacggggatgttggaaattactattatggacaaggccacccaatgaagcctcaccgaatccgcatgactcataatttgctgctcaactatggtctctaccgaaaaatggaaatctatcgccctcacaaagccaatgctgaggagatgaccaagtaccacagcgatgactacattaaattcttgcgctccatccgtccagataacatgtcggagtacagcaagcagatgcagagattcaacgttggtgaggactgtccagtattcgatggcctgtttgagttctgtcagttgtctactggtggttctgtggcaagtgctgtgaaacttaataagcagcagacggacatcgctgtgaattgggctgggggcctgcaccatgcaaagaagtccgaggcatctggcttctgttacgtcaatgatatcgtcttggccatcctggaactgctaaagtatcaccagagggtgctgtacattgacattgatattcaccatggtgacggcgtggaagaggccttctacaccacggaccgggtcatgactgtgtcctttcataagtatggagagtacttcccaggaactggggacctacgggatatcggggctggcaaaggcaagtattatgctgttaactacccgctccgagacgggattgatgacgagtcctatgaggccattttcaagccggtcatgtccaaagtaatggagatgttccagcctagtgcggtggtcttacagtgtggctcagactccctatctggggatcggttaggttgcttcaatctaactatcaaaggacacgccaagtgtgtggaatttgtcaagagctttaacctgcctatgctgatgctgggaggcggtggttacaccattcgtaacgttgcccggtgctggacatatgagacagctgtggccctggatacggagatccctaatgagcttccatacaatgactactttgaatactttggaccagatttcaagctccacatcagtccttccaatatgactaaccagaacacgaatgagtacctggagaagatcaaacagcgactgtttgagaaccttagaatgctgccgcacgcaccggggttcaaatgcaggcgattcctgaggacgccatccctgaggagagtggcgatgaggacgaagacgaccctgacaaggcgcatctcgatctgctcctctgacaaacgaattgcctgtgaggaagaacaaactcctgaaatgccaagtgcctgcttagtagctttggaaaggtgcccttattgaactcccgttcttaactttganccgcggtgcgcgtgaggaaccgagc

SEQ ID NO: 432364 - DNA, 1669 bp, Homo sapiens
gctgagcggagccgcgggcgggagggcggacggaccgactgacggtagggacgggaggcgagcaagatggcgcagacgcagggcacccggaggaaagtctgttactactacgacggggatgttggaaattactattatggacaaggccacccaatgaagcctcaccgaatccgcatgactcataatttgctgctcaactatggtctctaccgaaaaatggaaatctatcgccctcacaaagccaatgctgaggagatgaccaagtaccacagcgatgactacattaaattcttgcgctccatccgtccagataacatgtcggagtacagcaagcagatgcagagattcaacgttggtgaggactgtccagtattcgatggcctgtttgagttctgtcagttgtctactggtggttctgtggcaagtgctgtgaaacttaataagcagcagacggacatcgctgtgaattgggctgggggcctgcaccatgcaaagaagtccgaggcatctggcttctgttacgtcaatgatatcgtcttggccatcctggaactgctaaagtatcaccagagggtgctgtacattgacattgatattcaccatggtgacggcgtggaagaggccttctacaccacggaccgggtcatgactgtgtcctttcataagtatggagagtacttcccaggaactggggacctacgggatatcggggctggcaaaggcaagtattatgctgttaactacccgctccgagacgggattgatgacgagtcctatgaggccattttcaagccggtcatgtccaaagtaatggagatgttccagcctagtgcggtggtcttacagtgtggctcagactccctatctggggatcggttaggttgcttcaatctaactatcaaaggacacgccaagtgtgtggaatttgtcaagagctttaacctgcctatgctgatgctgggaggcggtggttacaccattcgtaacgttgcccggtgctggacatatgagacagctgtggccctggatacggagatccctaatgagcttccatacaatgactactttgaatactttggaccagatttcaagctccacatcagtccttccaatatgactaaccagaacacgaatgagtacctggagaagatcaaacagcgactgtttgagaaccttagaatgctgccgcacgcaccggggttcaaatgcaggcgattcctgaggacgccatccctgaggagagtggcgatgaggacgaagacgaccctgacaaggcgcatctcgagcctgagaggatgaatctatgtagggcagtgggaggagggagtgactcaggccctgccagctcctgtggggctcttcctcagttccttgagcctttcagtggctcccagaagtggcagagcccacaaaacaatgaacctctactgcctgagcacggctctcacataccaccccagcccttttcccagcactgcaccccagtttcccagggggctgcctccgcccaccaggttctggctgtagcaggctgggaaaccagtccaacctgttctcaacagggctcactgggaggaccagggatgggcttttctctctttatgtccagtgagctgtagtgttggggaaggggtctcagggtaaatgaagacctcatgggtcttcccag

SEQ ID NO: 432365 - DNA, 1469 bp, Homo sapiens
gctgagcggagccgcgggcgggagggcggacggaccgactgacggtagggacgggaggcgagcaagatggcgcagacgcagggcacccggaggaaagtctgttactactacgacggggatgttggaaattactattatggacaaggccacccaatgaagcctcaccgaatccgcatgactcataatttgctgctcaactatggtctctaccgaaaaatggaaatctatcgccctcacaaagccaatgctgaggagatgaccaagtaccacagcgatgactacattaaattcttgcgctccatccgtccagataacatgtcggagtacagcaagcagatgcagagattcaacgttggtgaggactgtccagtattcgatggcctgtttgagttctgtcagttgtctactggtggttctgtggcaagtgctgtgaaacttaataagcagcagacggacatcgctgtgaattgggctgggggcctgcaccatgcaaagaagtccgaggcatctggcttctgttacgtcaatgatatcgtcttggccatcctggaactgctaaagtatcaccagagggtgctgtacattgacattgatattcaccatggtgacggcgtggaagaggccttctacaccacggaccgggtcatgactgtgtcctttcataagtatggagagtacttcccaggaactggggacctacgggatatcggggctggcaaaggcaagtattatgctgttaactacccgctccgagacgggattgatgacgagtcctatgaggccattttcaagccggtcatgtccaaagtaatggagatgttccagcctagtgcggtggtcttacagtgtggctcagactccctatctggggatcggttaggttgcttcaatctaactatcaaaggacacgccaagtgtgtggaatttgtcaagagctttaacctgcctatgctgatgctgggaggcggtggttacaccattcgtaacgttgcccggtgctggacatatgagacagctgtggccctggatacggagatccctaatgagcttccatacaatgactactttgaatactttggaccagatttcaagctccacatcagtccttccaatatgactaaccagaacacgaatgagtacctggagaagatcaaacagcgactgtttgagaaccttagaatgctgccgcacgcaccggggttcaaatgcaggcgattcctgaggacgccatccctgaggagagtggcggatctcctgtttttttcaggctcctaaagtaacatcagccatttttagattggttctgttttcgtaccttcccactggcctcaagtgagccaagaaacactgcctgccctctgtctgtcttctcctaattctgcaggtggaggttgctagtctagtttcctttttgagatactattttcatttttgtgagcctctttgtaataaaatggtacatttctata

SEQ ID NO: 432366 - DNA, 647 bp, Homo sapiens
tgactctagaggttaccgagaagacgacagaaggggtcaaggaggaggtcaagttggcctgaatggacctctccagctctggcttcctgctgagtccctcacgtttcttccccaacccctcagattttatattttctatttctctgtgtatttatataaaaatttattaaatataaatatccccagggacagaaaccaaggccccgagctcagggcagctgtgctgggtgagctcttccaggagccaccttgccacccattcttcccgttcttaactttgaccaaccataaagggtgccaggtctgggtgaaagggatacttttatgcaaccataagacaaactcctgaaatgccaagtgcctgcttagtagctttggaaaggtgcccttattgaacattctagaaggggtggctgggtcttcaaggatctcctgtttttttcaggctcctaaagtaacatcagccatttttagattggttctgttttcgtaccttcccactggcctcaagtgagccaagaaacactgcctgccctctgtctgtcttctcctaattctgcaggtggaggttgctagtctagtttcctttttgagatactattttcatttttgtgagcctctttgtaataaaatggtacatttctata

SEQ ID NO: 432367 - DNA, 731 bp, Homo sapiens
agagctaggagccccagcccccagtagtcacctaggatcctgtggaagtcactgtctgcacttttgccctgaggctctgggctgggtcatctcatgccagtctctgctctctccacagggtcaaggaggaggtcaagttggcctgaatggacctctccagctctggcttcctgctgagtccctcacgtttcttccccaacccctcagattttatattttctatttctctgtgtatttatataaaaatttattaaatataaatatccccagggacagaaaccaaggccccgagctcagggcagctgtgctgggtgagctcttccaggagccaccttgccacccattcttcccgttcttaactttgaccaaccataaagggtgccaggtctgggtgaaagggatacttttatgcaaccataagacaaactcctgaaatgccaagtgcctgcttagtagctttggaaaggtgcccttattgaacattctagaaggggtggctgggtcttcaaggatctcctgtttttttcaggctcctaaagtaacatcagccatttttagattggttctgttttcgtaccttcccactggcctcaagtgagccaagaaacactgcctgccctctgtctgtcttctcctaattctgcaggtggaggttgctagtctagtttcctttttgagatactattttcatttttgtgagcctctttgtaataaaatggtacatttctata

SEQ ID NO: 432368 - DNA, 789 bp, Homo sapiens
  misc_feature (26)..(26): n is a, c, g, or t
  misc_feature (32)..(32): n is a, c, g, or t
  misc_feature (45)..(45): n is a, c, g, or t
  misc_feature (197)..(197): n is a, c, g, or t
gactgtgacccatgacatggtacttngagtgnctttacaatcatngtggggatattcttgttgcatgcctttaaagacgtcagctttagtctagcaagtctgcctgtgtcttttcgaaaagacgagaaagcaatgaatggcaatctctctaatatgtatgaagttcttaataataatgaagaaagcttaacctgtgnaatcgaacaacacactggtgaaaatgtcatgggtcaccagtcgtcacgtttcttccccaacccctcagattttatattttctatttctctgtgtatttatataaaaatttattaaatataaatatccccagggacagaaaccaaggccccgagctcagggcagctgtgctgggtgagctcttccaggagccaccttgccacccattcttcccgttcttaactttgaccaaccataaagggtgccaggtctgggtgaaagggatacttttatgcaaccataagacaaactcctgaaatgccaagtgcctgcttagtagctttggaaaggtgcccttattgaacattctagaaggggtggctgggtcttcaaggatctcctgtttttttcaggctcctaaagtaacatcagccatttttagattggttctgttttcgtaccttcccactggcctcaagtgagccaagaaacactgcctgccctctgtctgtcttctcctaattctgcaggtggaggttgctagtctagtttcctttttgagatactattttcatttttgtgagcctctttgtaataaaatggtacatttctata

SEQ ID NO: 432369 - DNA, 822 bp, Homo sapiens
acgactggtgacccatgacattttaatcactgaacacatcaaagtgcacagagattttgttaagaggagagaaggctaaaaccccagtgcattgacagaagggagaggggcaagaggtgatactggaaaatgagtccagggacagatggtgaagagcatcaaacaccatgcttcagagtgcagacttaatcctaagccatgggaagcctgcaaaggttctctaatgaagacagtggtggcatgatcagaactgaattttgcaaaaataactattgcagcaatacagagaagatcgcatctgtgtaatttcaattaaaattaaaccaaacctttatggctgtgagaatggacatttcttcaaatgtcatgggtcaccagtcggcaccggggttcaaatgcaggcgattcctgaggacgccatccctgaggagagtggcgatgaggacgaagacgaccctgacaaggcgcatctcgatctgctcctctgacaaacgaattgcctgtgaggaagaacaaactcctgaaatgccaagtgcctgcttagtagctttggaaaggtgcccttattgaacattctagaaggggtggctgggtcttcaaggatctcctgtttttttcaggctcctaaagtaacatcagccatttttagattggttctgttttcgtaccttcccactggcctcaagtgagccaagaaacactgcctgccctctgtctgtcttctcctaattctgcaggtggaggttgctagtctagtttcctttttgagatactattttcatttttgtgagcctctttgtaataaaatggtacatttctata

SEQ ID NO: 432370 - DNA, 282 bp, Homo sapiens
tcctaaaccagggacatgggccttctcctagcgacatatacaccactggtacagacataggagagtgatgttaaaaagatggaaatcccataggtacccgtgtctcacagtgtcttggaggcattctcctctgtttggataaataggcccagagaaacctacaaatgctttagggtgcttacgtgcaaatggttagggtgcggtggccaggtctcttgacggtcttctctcctgccccaatcagagcttccatacaatgactactttgaatactttggacca

SEQ ID NO: 432371 - DNA, 516 bp, Homo sapiens
tttactttaatggcctttttaattaggatatcggggctggcaaaggcaagtattatgctgttaactacccgctccgagacgggattgatgacgagtcctatgaggccattttcaagccggtaagtggctttatccaccccttgggctacaaacaggggattggttggcggtggaggggagcaaagcacccccaccatacctcaggaatctctccttactaaagctggtggggagatagaagtgtttgaaccctggattgctgtgtggtcagttaggggaacaaacacccatatttattggttccttctatgggtcaggtcttctgctggatacaaaaatatctaagacatgatctttgccctcacggactatggtggggaaggcaggcacatacccagtagtctatgattagtactgtttttgtatctccatttctttgggctgctgggagattattgtgttcttttggtagtggtatgtctccttggttttttgtgttcctcattgccttacatt

SEQ ID NO: 432372 - DNA, 764 bp, Homo sapiens
ctccctccaagctccccacctgtagagaaatctgttttcgagttccagtgcctgtaggaacaggttagggagcccgagttcctccctcttctggttccctttcccttggtgtctcttggaggacacgcagggaagcactgggcatagatgctgagctaaatcagcacccgcctgccctctcacccatgcttcccactccctcccagtctgctcctctgacaaacgaattgcctgtgaggaagagttctccgattctgaagaggagggagaggggggccgcaagaactcttccaacttcaaaaaagccaagagagtcaaaacagaggatgaaaaagagaaagacccagaggagaagaaaggtgggtttgggttcagctgggacttgggtctcgaggcctgagaggatgaatctatgtagggcagtgggaggagggagtgactcaggccctgccagctcctgtggggctcttcctcagttccttgagcctttcagtggctcccagaagtggcagagcccacaaaacaatgaacctctactgcctgagcacggctctcacataccaccccagcccttttcccagcactgcaccccagtttcccagggggctgcctccgcccaccaggttctggctgtagcaggctgggaaaccagtccaacctgttctcaacagggctcactgggaggaccagggatgggcttttctctctttatgtccagtgagctgtagtgttggggaaggggtctcagggtaaatgaagacctc

SEQ ID NO: 432373 - DNA, 351 bp, Homo sapiens
ctgtccctaccttatcttagccatattttcattgcaactacatgtctccttattgtggccagatctgtttgcttactctcctgtggcataatatagaactcattatcttcttctgcctgccttcttccatgaacctcctctgaatacgctgactttcactagcctcccctttgaaactttgcactgaggcagcttcacatatttttgtatttagttgtgtcttaacaataattgtaagatttgtcacatcatctagattataaaggaaattgagagcagagatatggctgcgatcttccacagtgttgattctagcctggagcatcaggtgttcaatacatacaaactgat

SEQ ID NO: 432374 - DNA, 4666 bp, Homo sapiens
gcgatctctgcggggcaagatggcggcgcccagacaggcctggagcacggatgaataagagggaacccccacacggagacactgctggagagagtcgtactggggaggcagctggagcagcaagatgctgtcgagaccgaagccaggggagtccgaggtggacctgctgcacttccagagtcagtttctcgcagctggtgcagccccagcagtgcagttggtgaagaaaggaaataggggcggtggtgatgccaactcagaccggcctccgctccaggaccatcgggatgtggtgatgttggacaatctcccagatttgcccccagctttggtcccttctcctccaaagagagccaggcccagccctggccactgcctgcctgaggatgaggacccagaagagaggctgaggaggcatgatcagcacatcactgctgtcttgactaagattattgaacgagatacaagttcagtggccgtgaatctgcctgtgcccagtggtgttgctttccctgctgtgttccttcgctcgcgggacacacaggggaaatcagcaacatctggtaagagaagcatctttgcccaggaaattgcggcaaggaggatagctgaagccaagggcccatcagttggggaagttgtgcccaacgtgggcccaccagagggtgccgtgacctgtgagacacccactcctaggaaccagggctgccagcttcctgggagcagccacagctttcagggacccaatctggtcacagggaaggggctcagggatcaagaagctgagcaggaagcccagactatccatgaagagaacatagcaagactgcaggccatggctcctgaggagatcctgcaggaacagcagcggttgctggcccagcttgaccccagcttggttgctttcttgagatctcacagccacacgcaagagcaaacaggagagacagcctctgaggagcagaggccaggaggaccctctgctaatgtcaccaaggaggaacccctcatgtcagcttttgccagtgagcccaggaagagagacaagctggagccagaagccccagctctggcattgcccgtgacccctcagaaagaatggctgcacatggacactgtcgagctggagaagctccactggacccaggacttgccccctgtccggcggcagcagacacaggagaggatgcaggctcggttcagtcttcagggagaactactggcccctgacgtggacctgcccacccacctgggtctgcaccaccatggagaggaggcagagagagcggggtattccctacaggagctgttccacctgacccgcagccaggtttcccagcagagagcactggcactgcatgtgttagcccaggtcatcagcagggcccaggctggtgagtttggggaccggctagcaggcagtgtcttaagcctccttttggatgctggtttcctcttcctactgcgcttctccttggatgacagagtggatggggtcattgcaaccgccatccgtgctcttcgggctctgctggtggctcctggagatgaggagctcctcgacagcaccttctcttggtaccatggagctttgacgttccctctgatgcccagccaggaggacaaggaggatgaggacaaggatgaagaatgcccagcaggaaaagcaaaaaggaaaagccctgaagaagaaagccggcctccacctgacctggcccgacatgatgtcatcaaggggctcctggctaccagcctgctgcctcggctgcgctacgtgctggaggtgacatacccaggacctgcggtggtccttgacatcctggctgtgctcatccgcctggcccggcattccctggaatcagccacaagggtcctggagtgccctcggctgatagagactatagttcgagagttcttgcccaccagttggtctcctgtgggggcagggcctacccctagtctatacaaagtaccctgtgctactgccatgaaactacttcgtgtcctggcctcagctgggaggaatattgctgcccggctgttgagcagctttgatctccggagccgcctgtgccgcatcatagctgaggctccccaagaactggccttgcccccagaggaagctgagatgctgagcaccgaggccctccgtctgtgggctgtggctgcctcctatggccagggcggttacctttacagggagctctacccagtgctgatgcgggccttgcaggtggtgccgcgggagctcagcacccacccacctcaacccctgtccatgcagcggatagcctcactgctcactctcctcacccagctaaccctggcagccggcagtacccctgctgaaaccatcagtgattctgctgaggccagcctctcggccaccccttccttagtcacttggacacaggtgtctgggctccagcctcttgttgagccgtgtctaaggcagaccttgaagttgctgtccagacctgagatgtggagagccgtgggcccagtgcccgttgcctgcctgttgttcctgggagcctactaccaggcctggagccagcaaccaagctcatgcccggaggattggctccaggacatggagcgcctgtcagaggagctgctgctgccactgctgagtcagcccacactgggcagcctgtgggattcccttaggcactgctcccttctctgcaacccgctgtcctgtgtgccagcccttgaagctccccccagcctcgtgtcactgggctgctcgggaggctgcccccgtctcagtctggctggctcagcctcacccttcccattcctcactgccctcctctctcttcttaataccctggcccagatccacaaggggctgtgtggccagctggctgccatattggctgccccgggactccagaattacttcctccagtgtgtggctcctggggctgccccacacctcacacctttctctgcatgggccctgcgccatgagtaccacctgcagtacctggcactcgctctggcccagaaagcggcagcgctgcagccactgccagccacccatgctgccctctatcatggtatggccttggccctgctgagccggctgctgcccggaagtgagtacctcacccatgagctgctgctgagctgtgtattccggctggagttcctcccggaaagaacatcagggggtccagaggcagccgacttctctgaccagctgtcgttaggaagcagcagggtccctcggtgtgggcaagggactctgctggctcaggcctgccaggacctccccagcatccgcaactgctacctgactcattgctcgccagcccgagccagtctgctggcctcccaggctctgcaccgaggggagctacagcgagtcccaaccctgctactgcccatgcctacggagccgctgctgcccaccgactggcccttcctgccactgattcgcctctaccaccgggcttcagacaccccctcgggactctctcccacagacaccatgggcacagccatgcgggtcctgcagtgggtgctagttttggagagctggcgcccccaggctctctgggctgtgccccctgctgcccgcctggcacggctcatgtgtgtgttcctggtggacagtgagctgttccgggagtccccagtacagcatctggtggcagccctcctcgcccagctctgtcagcctcaagtcttgccaaacctcaacctggactgccgactccctggcctgacgtctttccctgacctctatgccaacttcctggatcattttgaggctgtctcttttggggaccacctctttggggccctggtcctcctgcccctgcagcgtcggttcagtgtcaccttgcgccttgccctctttggggaacacgtgggagccttgcgagctctgagcctgcctctgacccagttgcctgtgtccctggagtgttacacagtgcctcctgaagacaacctggccctccttcagctctacttccggaccctggttactggtgcgctccgcccacgttggtgccccgtgctctatgctgtggctgtggctcatgtcaatagcttcatcttctctcaggacccacagagctcagatgaggtcaaagctgcccgcaggagtatgctgcagaaaacatggctgctggcagatgagggtctccggcagcacctcctgcactataagcttcccaattccacgctcccagagggctttgagctctattctcagttgccccctctgcgtcagcactacctccagagactgacttcaacagtgctccaaaatggggtatcagagacctaggatagttgatatagatggaaagatgggtacgttgtcctgtatccagcctttcaacagatgtctggccagacgaagaacattgtgtcctaatggtaggcaggagaccaaggagcagaaggcttgccttcctgggagcaggttgtttgagctgttttagagcagtgagccctaccattacatcctgatatctggggcttctgaaggtctgtgctgggagtgaagagtggcttagctatttacccgctctttggggacagggcaaactaaatgcatcccttcttacctaactcccaacccctgccctgggctgaggcatatgaatgctatagttgtgcattaaaataaatgttttttatctcc

SEQ ID NO: 432375 - DNA, 5918 bp, Homo sapiens
  misc_feature (4177)..(4177): n is a, c, g, or t
  misc_feature (4194)..(4194): n is a, c, g, or t
  misc_feature (4207)..(4207): n is a, c, g, or t
  misc_feature (4248)..(4248): n is a, c, g, or t
  misc_feature (4271)..(4271): n is a, c, g, or t
  misc_feature (4280)..(4280): n is a, c, g, or t
  misc_feature (4298)..(4298): n is a, c, g, or t
gcgatctctgcggggcaagatggcggcgcccagacaggcctggagcacggatgaataagagggaacccccacacggagacactgctggagagagtcgtactggggaggcagctggagcagcaagatgctgtcgagaccgaagccaggggagtccgaggtggacctgctgcacttccagagtcagtttctcgcagctggtgcagccccagcagtgcagttggtgaagaaaggaaataggggcggtggtgatgccaactcagaccggcctccgctccaggaccatcgggatgtggtgatgttggacaatctcccagatttgcccccagctttggtcccttctcctccaaagagagccaggcccagccctggccactgcctgcctgaggatgaggacccagaagagaggctgaggaggcatgatcagcacatcactgctgtcttgactaagattattgaacgagatacaagttcagtggccgtgaatctgcctgtgcccagtggtgttgctttccctgctgtgttccttcgctcgcgggacacacaggggaaatcagcaacatctggtaagagaagcatctttgcccaggaaattgcggcaaggaggatagctgaagccaagggcccatcagttggggaagttgtgcccaacgtgggcccaccagagggtgccgtgacctgtgagacacccactcctaggaaccagggctgccagcttcctgggagcagccacagctttcagggacccaatctggtcacagggaaggggctcagggatcaagaagctgagcaggaagcccagactatccatgaagagaacatagcaagactgcaggccatggctcctgaggagatcctgcaggaacagcagcggttgctggcccagcttgaccccagcttggttgctttcttgagatctcacagccacacgcaagagcaaacaggagagacagcctctgaggagcagaggccaggaggaccctctgctaatgtcaccaaggaggaacccctcatgtcagcttttgccagtgagcccaggaagagagacaagctggagccagaagccccagctctggcattgcccgtgacccctcagaaagaatggctgcacatggacactgtcgagctggagaagctccactggacccaggacttgccccctgtccggcggcagcagacacaggagaggatgcaggctcggttcagtcttcagggagaactactggcccctgacgtggacctgcccacccacctgggtctgcaccaccatggagaggaggcagagagagcggggtattccctacaggagctgttccacctgacccgcagccaggtttcccagcagagagcactggcactgcatgtgttagcccaggtcatcagcagggcccaggctggtgagtttggggaccggctagcaggcagtgtcttaagcctccttttggatgctggtttcctcttcctactgcgcttctccttggatgacagagtggatggggtcattgcaaccgccatccgtgctcttcgggctctgctggtggctcctggagatgaggagctcctcgacagcaccttctcttggtaccatggagctttgacgttccctctgatgcccagccaggaggacaaggaggatgaggacaaggatgaagaatgcccagcaggaaaagcaaaaaggaaaagccctgaagaagaaagccggcctccacctgacctggcccgacatgatgtcatcaaggggctcctggctaccagcctgctgcctcggctgcgctacgtgctggaggtgacatacccaggacctgcggtggtccttgacatcctggctgtgctcatccgcctggcccggcattccctggaatcagccacaagggtcctggagtgccctcggctgatagagactatagttcgagagttcttgcccaccagttggtctcctgtgggggcagggcctacccctagtctatacaaagtaccctgtgctactgccatgaaactacttcgtgtcctggcctcagctgggaggaatattgctgcccggctgttgagcagctttgatctccggagccgcctgtgccgcatcatagctgaggctccccaagaactggccttgcccccagaggaagctgagatgctgagcaccgaggccctccgtctgtgggctgtggctgcctcctatggccagggcggttacctttacagggagctctacccagtgctgatgcgggccttgcaggtggtgccgcgggagctcagcacccacccacctcaacccctgtccatgcagcggatagcctcactgctcactctcctcacccagctaaccctggcagccggcagtacccctgctgaaaccatcagtgattctgctgaggccagcctctcggccaccccttccttagtcacttggacacaggtgtctgggctccagcctcttgttgagccgtgtctaaggcagaccttgaagttgctgtccagacctgagatgtggagagccgtgggcccagtgcccgttgcctgcctgttgttcctgggagcctactaccaggcctggagccagcaaccaagctcatgcccggaggattggctccaggacatggagcgcctgtcagaggagctgctgctgccactgctgagtcagcccacactgggcagcctgtgggattcccttaggcactgctcccttctctgcaacccgctgtcctgtgtgccagcccttgaagctccccccagcctcgtgtcactgggctgctcgggaggctgcccccgtctcagtctggctggctcagcctcacccttcccattcctcactgccctcctctctcttcttaataccctggcccagatccacaaggggctgtgtggccagctggctgccatattggctgccccgggactccagaattacttcctccagtgtgtggctcctggggctgccccacacctcacacctttctctgcatgggccctgcgccatgagtaccacctgcagtacctggcactcgctctggcccagaaagcggcagcgctgcagccactgccagccacccatgctgccctctatcatggtatggccttggccctgctgagccggctgctgcccggaagtgagtacctcacccatgagctgctgctgagctgtgtattccggctggagttcctcccggaaagaacatcagggggtccagaggcagccgacttctctgaccagctgtcgttaggaagcagcagggtccctcggtgtgggcaagggactctgctggctcaggcctgccaggacctccccagcatccgcaactgctacctgactcattgctcgccagcccgagccagtctgctggcctcccaggctctgcaccgaggggagctacagcgagtcccaaccctgctactgcccatgcctacggagccgctgctgcccaccgactggcccttcctgccactgattcgcctctaccaccgggcttcagacaccccctcgggactctctcccacagacaccatgggcacagccatgcgggtcctgcagtgggtgctagttttggagagctggcgcccccaggctctctgggctgtgccccctgctgcccgcctggcacggctcatgtgtgtgttcctggtggacagtgagctgttccgggagtccccagtacagcatctggtggcagccctcctcgcccagctctgtcagcctcaagtcttgccaaacctcaacctggactgccgactccctggcctgacgtctttccctgacctctatgccaacttcctggatcattttgaggctgtctcttttggggaccacctctttggggccctggtcctcctgcccctgcagcgtcggttcagtgtcaccttgcgccttgccctctttggggaacacgtgggagccttgcgagctctgagcctgcctctgacccaggtactttctcagcccagcaggacctgcaagggtaccctgcactgggcctcgggggcagtcctgagccttgaggagctttggaagacctcagcttcctcatcttacctcttgggggctttgaggggattaagagaatcaatgaaaagggcttaacatgggctgggtgtggtggctcacgcctgtaattccatcactctgggaagctgaggtgggtggatcacttaaggtcaggagtttgagaccagcctgggcaacatngtgaaaccccatttctnctaaaaatacaanacttagctgggcgtggttgcgggtgcctgtagtcccagctnctcaggaggctgaggcaggagantcgcttgancccgggaagcggaggctncagtgagccgagatcgcgccactgcaccccagcccagtgacagagcaagaccctgtctcaaaaaagaaaaaaggaaagggtttaacctggtgtctggcatatagtgggtattcattactattaataaggcatagctccttgcttatcagtgctacaatctagataagaagagatttactgaaaacctacatagttgtgaattattcagatgctaggtggtatcaggattcagagaagggaaagatcaaattgggctttgtggaagaagtggggattgacccaggcactgtaggttgggtagaatttgaattggtgaggaggtagaaaggcaggagattcctaacagaataacataagcaaaaggagcatgacaaagggcagaaggagggaggagagatttctgttgggaacttaaggctggtcttgaattcctaatttcgtgtgatccgcctgcctcagcctcccaagtgctgagattacaggcgtggcccactacacatggccaatttcatgctttttaatggctgcttctcagttcccagttttccccaacatctgctctgtagtctttaaccctgatccttgtgctagaaggacagatgtttgtctaggacctgatctctgccctcatgatttggtttcatgtgatcgttatccacacaccttatgtatgtatatacattcctaccctccccctcagcacgtcatttcccctgtcacagttgcctgtgtccctggagtgttacacagtgcctcctgaagacaacctggccctccttcagctctacttccggaccctggttactggtgcgctccgcccacgttggtgccccgtgctctatgctgtggctgtggctcatgtcaatagcttcatcttctctcaggacccacagagctcatcagtaagttacatctccatcttcagaggaaggaagggagctagcaattgagctgcctctgggccagctggggaagaggtaagtgtcaagcaaggccagtggtgggtaccagccctcggctcagtgccacctctccctgttctgcttctaggatgaggtcaaagctgcccgcaggagtatgctgcagaaaacatggctgctggcagatgagggtctccggcagcacctcctgcactataagcttcccaattccacgctcccagagggctttgagctctattctcagttgccccctctgcgtcagcactacctccagagactgacttcaacagtgctccaaaatggggtatcagagacctaggatagttgatatagatggaaagatgggtacgttgtcctgtatccagcctttcaacagatgtctggccagacgaagaacattgtgtcctaatggtaggcaggagaccaaggagcagaaggcttgccttcctgggagcaggttgtttgagctgttttagagcagtgagccctaccattacatcctgatatctggggcttctgaaggtctgtgctgggagtgaagagtggcttagctatttacccgctctttggggacagggcaaactaaatgcatcccttcttacctaactcccaacccctgccctgggctgaggcatatgaatgctatagttgtgcattaaaataaatgttttttatctcc

SEQ ID NO: 432376 - DNA, 712 bp, Homo sapiens
gagaagggaaagatcaaatgggcatagctccttgcttatcagtgctacaatctagataagaagagatttactgaaaacctacatagttgtgaattattcagatgctaggtggtatcaggattcagagaagggaaagatcaaattgggctttgtggaagaagtggggattgacccaggcactgtaggttgggtagaatttgaattggtgaggaggtagaaaggcaggagattcctaacagaataacataagcaaaaggagcatgacaaagggcagaaggagggaggagagatttctgttgggaacttaaggctaaaaataagaagtgaagtctgagagggcctcaaatattaggctaaggacttaaatttataagctgtaaagagttactatgtttgccaggtgcggtggctcatgcctgtaatcccagcactttgggaggccgaggtgggcggatcatttgaggtcaagagtttgagaccagcctggccaacatggtgaaaccgtctctactaaaaaaaaatacaaaaaattagccgggtgtcgtggtgcatgcctgtaatcccagctactccggaggctgaggcaggagaatcgcttgaacccaggaggcagaggttgccatgagccgagatcataccactgcactccagcctgggcaacaagagtgaaactccatctcaaaaaagaaaaataaaaaagagttactgtgtt

SEQ ID NO: 432377 - DNA, 397 bp, Homo sapiens
gctcctgaactctgggtggccagctcttgccatcttcttcctctctgatccagttgcttagaaatgcaacagaaatcaccaggcatgaacctgtttactggagcctgtttattggagcctggtgcatcatataggtatactgtggtctcatgatgtaataggaggtctccctgttccctagacccagatcagaagggcttcatgcacataggcattcatcatctatagccaagtagccctagagaaggtgcccagcaagccttgctataaagagggagggctgggtgtagtggctcaggcctgtaatcccagcactttgggaggccaaggcaggaggatcacttggggccaagagttcaggggccagcctggacaacatagcaagactctgtctcta

SEQ ID NO: 432378 - DNA, 4804 bp, Homo sapiens
ggcctcctctgtgcatagatctcgggcacggcccttcaacgggcggcgaaagctgcgactcgatgattcctcattgtagagttgggtggtccaggaggcttaactggagcccttgacctgagcggtaagggcagtcacgcgtcccgactcgggattggatcctggctctggaggataggctgcaatggatgaataagagggaacccccacacggagacactgctggagagagtcgtactggggaggcagctggagcagcaagatgctgtcgagaccgaagccaggggagtccgaggtggacctgctgcacttccagagtcagtttctcgcagctggtgcagccccagcagtgcagttggtgaagaaaggaaataggggcggtggtgatgccaactcagaccggcctccgctccaggaccatcgggatgtggtgatgttggacaatctcccagatttgcccccagctttggtcccttctcctccaaagagagccaggcccagccctggccactgcctgcctgaggatgaggacccagaagagaggctgaggaggcatgatcagcacatcactgctgtcttgactaagattattgaacgagatacaagttcagtggccgtgaatctgcctgtgcccagtggtgttgctttccctgctgtgttccttcgctcgcgggacacacaggggaaatcagcaacatctggtaagagaagcatctttgcccaggaaattgcggcaaggaggatagctgaagccaagggcccatcagttggggaagttgtgcccaacgtgggcccaccagagggtgccgtgacctgtgagacacccactcctaggaaccagggctgccagcttcctgggagcagccacagctttcagggacccaatctggtcacagggaaggggctcagggatcaagaagctgagcaggaagcccagactatccatgaagagaacatagcaagactgcaggccatggctcctgaggagatcctgcaggaacagcagcggttgctggcccagcttgaccccagcttggttgctttcttgagatctcacagccacacgcaagagcaaacaggagagacagcctctgaggagcagaggccaggaggaccctctgctaatgtcaccaaggaggaacccctcatgtcagcttttgccagtgagcccaggaagagagacaagctggagccagaagccccagctctggcattgcccgtgacccctcagaaagaatggctgcacatggacactgtcgagctggagaagctccactggacccaggacttgccccctgtccggcggcagcagacacaggagaggatgcaggctcggttcagtcttcagggagaactactggcccctgacgtggacctgcccacccacctgggtctgcaccaccatggagaggaggcagagagagcggggtattccctacaggagctgttccacctgacccgcagccaggtttcccagcagagagcactggcactgcatgtgttagcccaggtcatcagcagggcccaggctggtgagtttggggaccggctagcaggcagtgtcttaagcctccttttggatgctggtttcctcttcctactgcgcttctccttggatgacagagtggatggggtcattgcaaccgccatccgtgctcttcgggctctgctggtggctcctggagatgaggagctcctcgacagcaccttctcttggtaccatggagctttgacgttccctctgatgcccagccaggaggacaaggaggatgaggacaaggatgaagaatgcccagcaggaaaagcaaaaaggaaaagccctgaagaagaaagccggcctccacctgacctggcccgacatgatgtcatcaaggggctcctggctaccagcctgctgcctcggctgcgctacgtgctggaggtgacatacccaggacctgcggtggtccttgacatcctggctgtgctcatccgcctggcccggcattccctggaatcagccacaagggtcctggagtgccctcggctgatagagactatagttcgagagttcttgcccaccagttggtctcctgtgggggcagggcctacccctagtctatacaaagtaccctgtgctactgccatgaaactacttcgtgtcctggcctcagctgggaggaatattgctgcccggctgttgagcagctttgatctccggagccgcctgtgccgcatcatagctgaggctccccaagaactggccttgcccccagaggaagctgagatgctgagcaccgaggccctccgtctgtgggctgtggctgcctcctatggccagggcggttacctttacagggagctctacccagtgctgatgcgggccttgcaggtggtgccgcgggagctcagcacccacccacctcaacccctgtccatgcagcggatagcctcactgctcactctcctcacccagctaaccctggcagccggcagtacccctgctgaaaccatcagtgattctgctgaggccagcctctcggccaccccttccttagtcacttggacacaggtgtctgggctccagcctcttgttgagccgtgtctaaggcagaccttgaagttgctgtccagacctgagatgtggagagccgtgggcccagtgcccgttgcctgcctgttgttcctgggagcctactaccaggcctggagccagcaaccaagctcatgcccggaggattggctccaggacatggagcgcctgtcagaggagctgctgctgccactgctgagtcagcccacactgggcagcctgtgggattcccttaggcactgctcccttctctgcaacccgctgtcctgtgtgccagcccttgaagctccccccagcctcgtgtcactgggctgctcgggaggctgcccccgtctcagtctggctggctcagcctcacccttcccattcctcactgccctcctctctcttcttaataccctggcccagatccacaaggggctgtgtggccagctggctgccatattggctgccccgggactccagaattacttcctccagtgtgtggctcctggggctgccccacacctcacacctttctctgcatgggccctgcgccatgagtaccacctgcagtacctggcactcgctctggcccagaaagcggcagcgctgcagccactgccagccacccatgctgccctctatcatggtatggccttggccctgctgagccggctgctgcccggaagtgagtacctcacccatgagctgctgctgagctgtgtattccggctggagttcctcccggaaagaacatcagggggtccagaggcagccgacttctctgaccagctgtcgttaggaagcagcagggtccctcggtgtgggcaagggactctgctggctcaggcctgccaggacctccccagcatccgcaactgctacctgactcattgctcgccagcccgagccagtctgctggcctcccaggctctgcaccgaggggagctacagcgagtcccaaccctgctactgcccatgcctacggagccgctgctgcccaccgactggcccttcctgccactgattcgcctctaccaccgggcttcagacaccccctcgggactctctcccacagacaccatgggcacagccatgcgggtcctgcagtgggtgctagttttggagagctggcgcccccaggctctctgggctgtgccccctgctgcccgcctggcacggctcatgtgtgtgttcctggtggacagtgagctgttccgggagtccccagtacagcatctggtggcagccctcctcgcccagctctgtcagcctcaagtcttgccaaacctcaacctggactgccgactccctggcctgacgtctttccctgacctctatgccaacttcctggatcattttgaggctgtctcttttggggaccacctctttggggccctggtcctcctgcccctgcagcgtcggttcagtgtcaccttgcgccttgccctctttggggaacacgtgggagccttgcgagctctgagcctgcctctgacccagttgcctgtgtccctggagtgttacacagtgcctcctgaagacaacctggccctccttcagctctacttccggaccctggttactggtgcgctccgcccacgttggtgccccgtgctctatgctgtggctgtggctcatgtcaatagcttcatcttctctcaggacccacagagctcagatgaggtcaaagctgcccgcaggagtatgctgcagaaaacatggctgctggcagatgagggtctccggcagcacctcctgcactataagcttcccaattccacgctcccagagggctttgagctctattctcagttgccccctctgcgtcagcactacctccagagactgacttcaacagtgctccaaaatggggtatcagagacctaggatagttgatatagatggaaagatgggtacgttgtcctgtatccagcctttcaacagatgtctggccagacgaagaacattgtgtcctaatggtaggcaggagaccaaggagcagaaggcttgccttcctgggagcaggttgtttgagctgttttagagcagtgagccctaccattacatcctgatatctggggcttctgaaggtctgtgctgggagtgaagagtggcttagctatttacccgctctttggggacagggcaaactaaatgcatcccttcttacctaactcccaacccctgccctgggctgaggcatatgaatgctatagttgtgcattaaaataaatgttttttatctcc

SEQ ID NO: 432379 - DNA, 2684 bp, Homo sapiens
gagtagctggacttgagactcacagctgaccctgatcctcagactgtgcccatttccagttgagcagctttgatctccggagccgcctgtgccgcatcatagctgaggctccccaagaactggccttgcccccagaggaagctgagatgctgagcaccgaggccctccgtctgtgggctgtggctgcctcctatggccagggcggttacctttacagggagctctacccagtgctgatgcgggccttgcaggtggtgccgcgggagctcagcacccacccacctcaacccctgtccatgcagcggatagcctcactgctcactctcctcacccagctaaccctggcagccggcagtacccctgctgaaaccatcagtgattctgctgaggccagcctctcggccaccccttccttagtcacttggacacaggtgtctgggctccagcctcttgttgagccgtgtctaaggcagaccttgaagttgctgtccagacctgagatgtggagagccgtgggcccagtgcccgttgcctgcctgttgttcctgggagcctactaccaggcctggagccagcaaccaagctcatgcccggaggattggctccaggacatggagcgcctgtcagaggagctgctgctgccactgctgagtcagcccacactgggcagcctgtgggattcccttaggcactgctcccttctctgcaacccgctgtcctgtgtgccagcccttgaagctccccccagcctcgtgtcactgggctgctcgggaggctgcccccgtctcagtctggctggctcagcctcacccttcccattcctcactgccctcctctctcttcttaataccctggcccagatccacaaggggctgtgtggccagctggctgccatattggctgccccgggactccagaattacttcctccagtgtgtggctcctggggctgccccacacctcacacctttctctgcatgggccctgcgccatgagtaccacctgcagtacctggcactcgctctggcccagaaagcggcagcgctgcagccactgccagccacccatgctgccctctatcatggtatggccttggccctgctgagccggctgctgcccggaagtgagtacctcacccatgagctgctgctgagctgtgtattccggctggagttcctcccggaaagaacatcagggggtccagaggcagccgacttctctgaccagctgtcgttaggaagcagcagggtccctcggtgtgggcaagggactctgctggctcaggcctgccaggacctccccagcatccgcaactgctacctgactcattgctcgccagcccgagccagtctgctggcctcccaggctctgcaccgaggggagctacagcgagtcccaaccctgctactgcccatgcctacggagccgctgctgcccaccgactggcccttcctgccactgattcgcctctaccaccgggcttcagacaccccctcgggactctctcccacagacaccatgggcacagccatgcgggtcctgcagtgggtgctagttttggagagctggcgcccccaggctctctgggctgtgccccctgctgcccgcctggcacggctcatgtgtgtgttcctggtggacagtgagctgttccgggagtccccagtacagcatctggtggcagccctcctcgcccagctctgtcagcctcaagtcttgccaaacctcaacctggactgccgactccctggcctgacgtctttccctgacctctatgccaacttcctggatcattttgaggctgtctcttttggggaccacctctttggggccctggtcctcctgcccctgcagcgtcggttcagtgtcaccttgcgccttgccctctttggggaacacgtgggagccttgcgagctctgagcctgcctctgacccagttgcctgtgtccctggagtgttacacagtgcctcctgaagacaacctggccctccttcagctctacttccggaccctggttactggtgcgctccgcccacgttggtgccccgtgctctatgctgtggctgtggctcatgtcaatagcttcatcttctctcaggacccacagagctcagatgaggtcaaagctgcccgcaggagtatgctgcagaaaacatggctgctggcagatgagggtctccggcagcacctcctgcactataagcttcccaattccacgctcccagagggctttgagctctattctcagttgccccctctgcgtcagcactacctccagagactgacttcaacagtgctccaaaatggggtatcagagacctaggatagttgatatagatggaaagatgggtacgttgtcctgtatccagcctttcaacagatgtctggccagacgaagaacattgtgtcctaatggtaggcaggagaccaaggagcagaaggcttgccttcctgggagcaggttgtttgagctgttttagagcagtgagccctaccattacatcctgatatctggggcttctgaaggtctgtgctgggagtgaagagtggcttagctatttacccgctctttggggacagggcaaactaaatgcatcccttcttacctaactcccaacccctgccctgggctgaggcatatgaatgctatagttgtgcattaaaataaatgttttttatctcc

SEQ ID NO: 432380 - DNA, 4612 bp, Homo sapiens
gcgatctctgcggggcaagatggcggcgcccagacaggcctggagcacggatgaataagagggaacccccacacggagacactgctggagagagtcgtactggggaggcagctggagcagcaagatgctgtcgagaccgaagccaggggagtccgaggtggacctgctgcacttccagagtcagtttctcgcagctggtgcagccccagcagtgcagttggtgaagaaaggaaataggggcggtggtgatgccaactcagaccggcctccgctccaggaccatcgggatgtggtgatgttggacaatctcccagatttgcccccagctttggtcccttctcctccaaagagagccaggcccagccctggccactgcctgcctgaggatgaggacccagaagagaggctgaggaggcatgatcagcacatcactgctgtcttgactaagattattgaacgagatacaagttcagtggccgtgaatctgcctgtgcccagtggtgttgctttccctgctgtgttccttcgctcgcgggacacacaggggaaatcagcaacatctggtaagagaagcatctttgcccaggaaattgcggcaaggaggatagctgaagccaagggcccatcagttggggaagttgtgcccaacgtgggcccaccagagggtgccgtgacctgtgagacacccactcctaggaaccagggctgccagcttcctgggagcagccacagctttcagggacccaatctggtcacagggaaggggctcagggatcaagaagctgagcaggaagcccagactatccatgaagagaacatagcaagactgcaggccatggctcctgaggagatcctgcaggaacagcagcggttgctggcccagcttgaccccagcttggttgctttcttgagatctcacagccacacgcaagagcaaacaggagagacagcctctgaggagcagaggccaggaggaccctctgctaatgtcaccaaggaggaacccctcatgtcagcttttgccagtgagcccaggaagagagacaagctggagccagaagccccagctctggcattgcccgtgacccctcagaaagaatggctgcacatggacactgtcgagctggagaagctccactggacccaggacttgccccctgtccggcggcagcagacacaggagaggatgcaggctcggttcagtcttcagggagaactactggcccctgacgtggacctgcccacccacctgggtctgcaccaccatggagaggaggcagagagagcggggtattccctacaggagctgttccacctgacccgcagccaggtttcccagcagagagcactggcactgcatgtgttagcccaggtcatcagcagggcccaggctggtgagtttggggaccggctagcaggcagtgtcttaagcctccttttggatgctggtttcctcttcctactgcgcttctccttggatgacagagtggatggggtcattgcaaccgccatccgtgctcttcgggctctgctggtggctcctggagatgaggagctcctcgacagcaccttctcttggtaccatggagctttgacgttccctctgatgcccagccaggaggacaaggaggatgaggacaaggatgaagaatgcccagcaggaaaagcaaaaaggaaaagccctgaagaagaaagccggcctccacctgacctggcccgacatgatgtcatcaaggggctcctggctaccagcctgctgcctcggctgcgctacgtgctggaggtgacatacccaggacctgcggtggtccttgacatcctggctgtgctcatccgcctggcccggcattccctggaatcagccacaagggtcctggagtgccctcggctgatagagactatagttcgagagttcttgcccaccagttggtctcctgtgggggcagggcctacccctagtctatacaaagtaccctgtgctactgccatgaaactacttcgtgtcctggcctcagctgggaggaatattgctgcccggctgttgagcagctttgatctccggagccgcctgtgccgcatcatagctgaggctccccaagaactggccttgcccccagaggaagctgagatgctgagcaccgaggccctccgtctgtgggctgtggctgcctcctatggccagggcggttacctttacagggagctctacccagtgctgatgcgggccttgcaggtggtgccgcgggagctcagcacccacccacctcaacccctgtccatgcagcggatagcctcactgctcactctcctcacccagctaaccctggcagccggcagtacccctgctgaaaccatcagtgattctgctgaggccagcctctcggccaccccttccttagtcacttggacacaggtgtctgggctccagcctcttgttgagccgtgtctaaggcagaccttgaagttgctgtccagacctgagatgtggagagccgtgggcccagtgcccgttgcctgcctgttgttcctgggagcctactaccaggcctggagccagcaaccaagctcatgcccggaggattggctccaggacatggagcgcctgtcagaggagctgctgctgccactgctgagtcagcccacactgggcagcctgtgggattcccttaggcactgctcccttctctgcaacccgctgtcctgtgtgccagcccttgaagctccccccagcctcgtgtcactgggctgctcgggaggctgcccccgtctcagtctggctggctcagcctcacccttcccattcctcactgccctcctctctcttcttaataccctggcccagatccacaaggggctgtgtggccagctggctgccatattggctgccccgggactccagaattacttcctccagtgtgtggctcctggggctgccccacacctcacacctttctctgcatgggccctgcgccatgagtaccacctgcagtacctggcactcgctctggcccagaaagcggcagcgctgcagccactgccagccacccatgctgccctctatcatggtatggccttggccctgctgagccggctgctgcccggaagtgagtacctcacccatgagctgctgctgagctgtgtattccggctggagttcctcccggaaagaacatcagggggtccagaggcagccgacttctctgaccagctgtcgttaggaagcagcagggtccctcggtgtgggcaagggactctgctggctcaggcctgccaggacctccccagcatccgcaactgctacctgactcattgctcgccagcccgagccagtctgctggcctcccaggctctgcaccgaggggagctacagcgagtcccaaccctgctactgcccatgcctacggagccgctgctgcccaccgactggcccttcctgccactgattcgcctctaccaccgggcttcagacaccccctcgggactctctcccacagacaccatgggcacagccatgcgggtcctgcagtgggtgctagttttggagagctggcgcccccaggctctctgggctgtgccccctgctgcccgcctggcacggctcatgtgtgtgttcctggtggacagtgagctgttccgggagtccccagtacagcatctggtggcagccctcctcgcccagctctgtcagcctcaagtcttgccaaacctcaacctggactgccgactccctggcctgacgtctttccctgacctctatgccaacttcctggatcattttgaggctgtctcttttggggaccacctctttggggccctggtcctcctgcccctgcagcgtcggttcagtgtcaccttgcgccttgccctctttggggaacacgtgggagccttgcgagctctgagcctgcctctgacccagttgcctgtgtccctggagtgttacacagtgcctcctgaagacaacctggccctccttcagctctacttccggaccctggttactggtgcgctccgcccacgttggtgccccgtgctctatgctgtggctgtggctcatgtcaatagcttcatcttctctcaggacccacagagctcagatgaggtcaaagctgcccgcaggagtatgctgcagcttcccaattccacgctcccagagggctttgagctctattctcagttgccccctctgcgtcagcactacctccagagactgacttcaacagtgctccaaaatggggtatcagagacctaggatagttgatatagatggaaagatgggtacgttgtcctgtatccagcctttcaacagatgtctggccagacgaagaacattgtgtcctaatggtaggcaggagaccaaggagcagaaggcttgccttcctgggagcaggttgtttgagctgttttagagcagtgagccctaccattacatcctgatatctggggcttctgaaggtctgtgctgggagtgaagagtggcttagctatttacccgctctttggggacagggcaaactaaatgcatcccttcttacctaactcccaacccctgccctgggctgaggcatatgaatgctatagttgtgcattaaaataaatgttttttatctcc

SEQ ID NO: 432381 - DNA, 884 bp, Homo sapiens
tgcaattaggctggtacgagccgggtgaatcggcagaggctctgcccatacatcgtcggttcagtgtcaccttgcgccttgccctctttggggaacacgtgggagccttgcgagctctgagcctgcctctgacccagttgcctgtgtccctggagtgttacacagtgcctcctgaagacaacctggccctccttcagctctacttccggaccctggttactggtgcgctccgcccacgttggtgccccgtgctctatgctgtggctgtggctcatgtcaatagcttcatcttctctcaggacccacagagctcagatgaggtcaaagctgcccgcaggagtatgctgcagaaaacatggctgctggcagatgagggtctccggcagcacctcctgcactataagcttcccaattccacgctcccagagggctttgagctctattctcagttgccccctctgcgtcagcactacctccagagactgacttcaacagtgctccaaaatggggtatcagagacctaggatagttgatatagatggaaagatgggtacgttgtcctgtatccagcctttcaacagatgtctggccagacgaagaacattgtgtcctaatggtaggcaggagaccaaggagcagaaggcttgccttcctgggagcaggttgtttgagctgttttagagcagtgagccctaccattacatcctgatatctggggcttctgaaggtctgtgctgggagtgaagagtggcttagctatttacccgctctttggggacagggcaaactaaatgcatcccttcttacctaactcccaacccctgccctgggctgaggcatatgaatgctatagttgtgcattaaaataaatgttttttatctcc

SEQ ID NO: 432382 - DNA, 731 bp, Homo sapiens
tgaggcgctctagaggacccatcactcaactggccctccttcagctctacttccggaccctggttactggtgcgctccgcccacgttggtgccccgtgctctatgctgtggctgtggctcatgtcaatagcttcatcttctctcaggacccacagagctcagatgaggtcaaagctgcccgcaggagtatgctgcagaaaacatggctgctggcagatgagggtctccggcagcacctcctgcactataagcttcccaattccacgctcccagagggctttgagctctattctcagttgccccctctgcgtcagcactacctccagagactgacttcaacagtgctccaaaatggggtatcagagacctaggatagttgatatagatggaaagatgggtacgttgtcctgtatccagcctttcaacagatgtctggccagacgaagaacattgtgtcctaatggtaggcaggagaccaaggagcagaaggcttgccttcctgggagcaggttgtttgagctgttttagagcagtgagccctaccattacatcctgatatctggggcttctgaaggtctgtgctgggagtgaagagtggcttagctatttacccgctctttggggacagggcaaactaaatgcatcccttcttacctaactcccaacccctgccctgggctgaggcatatgaatgctatagttgtgcattaaaataaatgttttttatctcc

SEQ ID NO: 432383 - DNA, 225 bp, Homo sapiens
ctgccatattggctgccccgggactccagaattacttcctccagtgtgtggctcctggggctgccccacacctcacacctttctctgcatgggccctgcgccatgagtaccacctgcagtacctggcactcgctctggcccagaaagcggtaggtccccctgtctgacaggttctcctgtcatcccattatctccttcctgtttctgtggaacccagcctgcttc

SEQ ID NO: 432384 - DNA, 2892 bp, Homo sapiens
gcgatctctgcggggcaagatggcggcgcccagacaggcctggagcacggatgaataagagggaacccccacacggagacactgctggagagagtcgtcctggagtgccctcggctgatagagactatagttcgagagttcttgcccaccagttggtctcctgtgggggcagggcctacccctagtctatacaaagtaccctgtgctactgccatgaaactacttcgtgtcctggcctcagctgggaggaatattgctgcccggctgttgagcagctttgatctccggagccgcctgtgccgcatcatagctgaggctccccaagaactggccttgcccccagaggaagctgagatgctgagcaccgaggccctccgtctgtgggctgtggctgcctcctatggccagggcggttacctttacagggagctctacccagtgctgatgcgggccttgcaggtggtgccgcgggagctcagcacccacccacctcaacccctgtccatgcagcggatagcctcactgctcactctcctcacccagctaaccctggcagccggcagtacccctgctgaaaccatcagtgattctgctgaggccagcctctcggccaccccttccttagtcacttggacacaggtgtctgggctccagcctcttgttgagccgtgtctaaggcagaccttgaagttgctgtccagacctgagatgtggagagccgtgggcccagtgcccgttgcctgcctgttgttcctgggagcctactaccaggcctggagccagcaaccaagctcatgcccggaggattggctccaggacatggagcgcctgtcagaggagctgctgctgccactgctgagtcagcccacactgggcagcctgtgggattcccttaggcactgctcccttctctgcaacccgctgtcctgtgtgccagcccttgaagctccccccagcctcgtgtcactgggctgctcgggaggctgcccccgtctcagtctggctggctcagcctcacccttcccattcctcactgccctcctctctcttcttaataccctggcccagatccacaaggggctgtgtggccagctggctgccatattggctgccccgggactccagaattacttcctccagtgtgtggctcctggggctgccccacacctcacacctttctctgcatgggccctgcgccatgagtaccacctgcagtacctggcactcgctctggcccagaaagcggcagcgctgcagccactgccagccacccatgctgccctctatcatggtatggccttggccctgctgagccggctgctgcccggaagtgagtacctcacccatgagctgctgctgagctgtgtattccggctggagttcctcccggaaagaacatcagggggtccagaggcagccgacttctctgaccagctgtcgttaggaagcagcagggtccctcggtgtgggcaagggactctgctggctcaggcctgccaggacctccccagcatccgcaactgctacctgactcattgctcgccagcccgagccagtctgctggcctcccaggctctgcaccgaggggagctacagcgagtcccaaccctgctactgcccatgcctacggagccgctgctgcccaccgactggcccttcctgccactgattcgcctctaccaccgggcttcagacaccccctcgggactctctcccacagacaccatgggcacagccatgcgggtcctgcagtgggtgctagttttggagagctggcgcccccaggctctctgggctgtgccccctgctgcccgcctggcacggctcatgtgtgtgttcctggtggacagtgagctgttccgggagtccccagtacagcatctggtggcagccctcctcgcccagctctgtcagcctcaagtcttgccaaacctcaacctggactgccgactccctggcctgacgtctttccctgacctctatgccaacttcctggatcattttgaggctgtctcttttggggaccacctctttggggccctggtcctcctgcccctgcagcgtcggttcagtgtcaccttgcgccttgccctctttggggaacacgtgggagccttgcgagctctgagcctgcctctgacccagttgcctgtgtccctggagtgttacacagtgcctcctgaagacaacctggccctccttcagctctacttccggaccctggttactggtgcgctccgcccacgttggtgccccgtgctctatgctgtggctgtggctcatgtcaatagcttcatcttctctcaggacccacagagctcagatgaggtcaaagctgcccgcaggagtatgctgcagaaaacatggctgctggcagatgagggtctccggcagcacctcctgcactataagcttcccaattccacgctcccagagggctttgagctctattctcagttgccccctctgcgtcagcactacctccagagactgacttcaacagtgctccaaaatggggtatcagagacctaggatagttgatatagatggaaagatgggtacgttgtcctgtatccagcctttcaacagatgtctggccagacgaagaacattgtgtcctaatggtaggcaggagaccaaggagcagaaggcttgccttcctgggagcaggttgtttgagctgttttagagcagtgagccctaccattacatcctgatatctggggcttctgaaggtctgtgctgggagtgaagagtggcttagctatttacccgctctttggggacagggcaaactaaatgcatcccttcttacctaactcccaacccctgccctgggctgaggcatatgaatgctatagttgtgcattaaaataaatgttttttatctcc

SEQ ID NO: 432385 - DNA, 4817 bp, Homo sapiens
gcgatctctgcggggcaagatggcggcgcccagacaggcctggagcacggatgaataagagggaacccccacacggagacactgctggagagagtcgtactggggaggcagctggagcagcaagatgctgtcgagaccgaagccaggggagtccgaggtggacctgctgcacttccagagtcagtttctcgcagctggtgcagccccagcagtgcagttggtgaagaaaggaaataggggcggtggtgatgccaactcagaccggcctccgctccaggaccatcgggatgtggtgatgttggacaatctcccagatttgcccccagctttggtcccttctcctccaaagagagccaggcccagccctggccactgcctgcctgaggatgaggacccagaagagaggctgaggaggcatgatcagcacatcactgctgtcttgactaagattattgaacgagatacaagttcagtggccgtgaatctgcctgtgcccagtggtgttgctttccctgctgtgttccttcgctcgcgggacacacaggggaaatcagcaacatctggtaagagaagcatctttgcccaggaaattgcggcaaggaggatagctgaagccaagggcccatcagttggggaagttgtgcccaacgtgggcccaccagagggtgccgtgacctgtgagacacccactcctaggaaccagggctgccagcttcctgggagcagccacagctttcagggacccaatctggtcacagggaaggggctcagggatcaagaagctgagcaggaagcccagactatccatgaagagaacatagcaagactgcaggccatggctcctgaggagatcctgcaggaacagcagcggttgctggcccagcttgaccccagcttggttgctttcttgagatctcacagccacacgcaagagcaaacaggagagacagcctctgaggagcagaggccaggaggaccctctgctaatgtcaccaaggaggaacccctcatgtcagcttttgccagtgagcccaggaagagagacaagctggagccagaagccccagctctggcattgcccgtgacccctcagaaagaatggctgcacatggacactgtcgagctggagaagctccactggacccaggacttgccccctgtccggcggcagcagacacaggagaggatgcaggctcggttcagtcttcagggagaactactggcccctgacgtggacctgcccacccacctgggtctgcaccaccatggagaggaggcagagagagcggggtattccctacaggagctgttccacctgacccgcagccaggtttcccagcagagagcactggcactgcatgtgttagcccaggtcatcagcagggcccaggctggtgagtttggggaccggctagcaggcagtgtcttaagcctccttttggatgctggtttcctcttcctactgcgcttctccttggatgacagagtggatggggtcattgcaaccgccatccgtgctcttcgggctctgctggtggctcctggagatgaggagctcctcgacagcaccttctcttggtaccatggagctttgacgttccctctgatgcccagccaggaggacaaggaggatgaggacaaggatgaagaatgcccagcaggaaaagcaaaaaggaaaagccctgaagaagaaagccggcctccacctgacctggcccgacatgatgtcatcaaggggctcctggctaccagcctgctgcctcggctgcgctacgtgctggaggtgacatacccaggacctgcggtggtccttgacatcctggctgtgctcatccgcctggcccggcattccctggaatcagccacaagggtcctggagtgccctcggctgatagagactatagttcgagagttcttgcccaccagttggtctcctgtgggggcagggcctacccctagtctatacaaagtaccctgtgctactgccatgaaactacttcgtgtcctggcctcagctgggaggaatattgctgcccggctgttgagcagctttgatctccggagccgcctgtgccgcatcatagctgaggctccccaagaactggccttgcccccagaggaagctgagatgctgagcaccgaggccctccgtctgtgggctgtggctgcctcctatggccagggcggttacctttacagggagctctacccagtgctgatgcgggccttgcaggtggtgccgcgggagctcagcacccacccacctcaacccctgtccatgcagcggatagcctcactgctcactctcctcacccagctaaccctggcagccggcagtacccctgctgaaaccatcagtgattctgctgaggccagcctctcggccaccccttccttagtcacttggacacaggtgtctgggctccagcctcttgttgagccgtgtctaaggcagaccttgaagttgctgtccagacctgagatgtggagagccgtgggcccagtgcccgttgcctgcctgttgttcctgggagcctactaccaggcctggagccagcaaccaagctcatgcccggaggattggctccaggacatggagcgcctgtcagaggagctgctgctgccactgctgagtcagcccacactgggcagcctgtgggattcccttaggcactgctcccttctctgcaacccgctgtcctgtgtgccagcccttgaagctccccccagcctcgtgtcactgggctgctcgggaggctgcccccgtctcagtctggctggctcagcctcacccttcccattcctcactgccctcctctctcttcttaataccctggcccagatccacaaggggctgtgtggccagctggctgccatattggctgccccgggactccagaattacttcctccagtgtgtggctcctggggctgccccacacctcacacctttctctgcatgggccctgcgccatgagtaccacctgcagtacctggcactcgctctggcccagaaagcggcagcgctgcagccactgccagccacccatgctgccctctatcatggtatggccttggccctgctgagccggctgctgcccggaagtgagtacctcacccatgagctgctgctgagctgtgtattccggctggagttcctcccggaaagaacatcagggggtccagaggcagccgacttctctgaccagctgtcgttaggaagcagcagggtccctcggtgtgggcaagggactctgctggctcaggcctgccaggacctccccagcatccgcaactgctacctgactcattgctcgccagcccgagccagtctgctggcctcccaggctctgcaccgaggggagctacagcgagtcccaaccctgctactgcccatgcctacggagccgctgctgcccaccgactggcccttcctgccactgattcgcctctaccaccgggcttcagacaccccctcgggactctctcccacagacaccatgggcacagccatgcgggtcctgcagtgggtgctagttttggagagctggcgcccccaggctctctgggctgtgccccctgctgcccgcctggcacggctcatgtgtgtgttcctggtggacagtgagctgttccgggagtccccagtacagcatctggtggcagccctcctcgcccagctctgtcagcctcaagtcttgccaaacctcaacctggactgccgactccctggcctgacgtctttccctgacctctatgccaacttcctggatcattttgaggctgtctcttttggggaccacctctttggggccctggtcctcctgcccctgcagcgtcggttcagtgtcaccttgcgccttgccctctttggggaacacgtgggagccttgcgagctctgagcctgcctctgacccagttgcctgtgtccctggagtgttacacagtgcctcctgaagacaacctggccctccttcagctctacttccggaccctggttactggtgcgctccgcccacgttggtgccccgtgctctatgctgtggctgtggctcatgtcaatagcttcatcttctctcaggacccacagagctcatcagtaagttacatctccatcttcagaggaaggaagggagctagcaattgagctgcctctgggccagctggggaagaggtaagtgtcaagcaaggccagtggtgggtaccagccctcggctcagtgccacctctccctgttctgcttctaggatgaggtcaaagctgcccgcaggagtatgctgcagaaaacatggctgctggcagatgagggtctccggcagcacctcctgcactataagcttcccaattccacgctcccagagggctttgagctctattctcagttgccccctctgcgtcagcactacctccagagactgacttcaacagtgctccaaaatggggtatcagagacctaggatagttgatatagatggaaagatgggtacgttgtcctgtatccagcctttcaacagatgtctggccagacgaagaacattgtgtcctaatggtaggcaggagaccaaggagcagaaggcttgccttcctgggagcaggttgtttgagctgttttagagcagtgagccctaccattacatcctgatatctggggcttctgaaggtctgtgctgggagtgaagagtggcttagctatttacccgctctttggggacagggcaaactaaatgcatcccttcttacctaactcccaacccctgccctgggctgaggcatatgaatgctatagttgtgcattaaaataaatgttttttatctcc

SEQ ID NO: 432386 - DNA, 4472 bp, Homo sapiens
gcgatctctgcggggcaagatggcggcgcccagacaggcctggagcacggatgaataagagggaacccccacacggagacactgctggagagagtcgtactggggaggcagctggagcagcaagatgctgtcgagaccgaagccaggggagtccgaggtggacctgctgcacttccagagtcagtttctcgcagctggtgcagccccagcagtgcagttggtgaagaaaggaaataggggcggtggtgatgccaactcagaccggcctccgctccaggaccatcgggatgtggtgatgttggacaatctcccagatttgcccccagctttggtcccttctcctccaaagagagccaggcccagccctggccactgcctgcctgaggatgaggacccagaagagaggctgaggaggcatgatcagcacatcactgctgtcttgactaagattattgaacgagatacaagttcagtggccgtgaatctgcctgtgcccagtggtgttgctttccctgctgtgttccttcgctcgcgggacacacaggggaaatcagcaacatctggtaagagaagcatctttgcccaggaaattgcggcaaggaggatagctgaagccaagggcccatcagttggggaagttgtgcccaacgtgggcccaccagagggtgccgtgacctgtgagacacccactcctaggaaccagggctgccagcttcctgggagcagccacagctttcagggacccaatctggtcacagggaaggggctcagggatcaagaagctgagcaggaagcccagactatccatgaagagaacatagcaagactgcaggccatggctcctgaggagatcctgcaggaacagcagcggttgctggcccagcttgaccccagcttggttgctttcttgagatctcacagccacacgcaagagcaaacaggagagacagcctctgaggagcagaggccaggaggaccctctgctaatgtcaccaaggaggaacccctcatgtcagcttttgccagtgagcccaggaagagagacaagctggagccagaagccccagctctggcattgcccgtgacccctcagaaagaatggctgcacatggacactgtcgagctggagaagctccactggacccaggacttgccccctgtccggcggcagcagacacaggagaggatgcaggctcggttcagtcttcagggagaactactggcccctgacgtggacctgcccacccacctgggtctgcaccaccatggagaggaggcagagagagcggggtattccctacaggagctgttccacctgacccgcagccaggtttcccagcagagagcactggcactgcatgtgttagcccaggtcatcagcagggcccaggctggtgagtttggggaccggctagcaggcagtgtcttaagcctccttttggatgctggtttcctcttcctactgcgcttctccttggatgacagagtggatggggtcattgcaaccgccatccgtgctcttcgggctctgctggtggctcctggagatgaggagctcctcgacagcaccttctcttggtaccatggagctttgacgttccctctgatgcccagccaggaggacaaggaggatgaggacaaggatgaagaatgcccagcaggaaaagcaaaaaggaaaagccctgaagaagaaagccggcctccacctgacctggcccgacatgatgtcatcaaggggctcctggctaccagcctgctgcctcggctgcgctacgtgctggaggtgacatacccaggacctgcggtggtccttgacatcctggctgtgctcatccgcctggcccggcattccctggaatcagccacaagggtcctggagtgccctcggctgatagagactatagttcgagagttcttgcccaccagttggtctcctgtgggggcagggcctacccctagtctatacaaagtaccctgtgctactgccatgaaactacttcgtgtcctggcctcagctgggaggaatattgctgcccggctgttgagcagctttgatctccggagccgcctgtgccgcatcatagctgaggctccccaagaactggccttgcccccagaggaagctgagatgctgagcaccgaggccctccgtctgtgggctgtggctgcctcctatggccagggcggttacctttacagggagctctacccagtgctgatgcgggccttgcaggtggtgccgcgggagctcagcacccacccacctcaacccctgtccatgcagcggatagcctcactgctcactctcctcacccagctaaccctggcagccggcagtacccctgctgaaaccatcagtgattctgctgaggccagcctctcggccaccccttccttagtcacttggacacaggtgtctgggctccagcctcttgttgagccgtgtctaaggcagaccttgaagttgctgtccagacctgagatgtggagagccgtgggcccagtgcccgttgcctgcctgttgttcctgggagcctactaccaggcctggagccagcaaccaagctcatgcccggaggattggctccaggacatggagcgcctgtcagaggagctgctgctgccactgctgagtcagcccacactgggcagcctgtgggattcccttaggcactgctcccttctctgcaacccgctgtcctgtgtgccagcccttgaagctccccccagcctcgtgtcactgggctgctcgggaggctgcccccgtctcagtctggctggctcagcctcacccttcccattcctcactgccctcctctctcttcttaataccctggcccagatccacaaggggctgtgtggccagctggctgccatattggctgccccgggactccagaattacttcctccagtgtgtggctcctggggctgccccacacctcacacctttctctgcatgggccctgcgccatgagtaccacctgcagtacctggcactcgctctggcccagaaagcggcagcgctgcagccactgccagccacccatgctgccctctatcatggtatggccttggccctgctgagccggctgctgcccggaagtgagtacctcacccatgagctgctgctgagctgtgtattccggctggagttcctcccggaaagaacatcagggggtccagaggcagccgacttctctgaccagctgtcgttaggaagcagcagggtccctcggtgtgggcaagggactctgctggctcaggcctgccaggacctccccagcatccgcaactgctacctgactcattgctcgccagcccgagccagtctgctggcctcccaggctctgcaccgaggggagctacagcgagtcccaaccctgctactgcccatgcctacggagccgctgctgcccaccgactggcccttcctgccactgattcgcctctaccaccgggcttcagacaccccctcgggactctctcccacagacaccatgggcacagccatgcgggtcctgcagtgggtgctagttttggagagctggcgcccccaggctctctgggctgtgccccctgctgcccgcctggcacggctcatgtgtgtgttcctggtggacagtgagctgttccgggagtccccagtacagcatctggtggcagccctcctcgcccagctctgtcagcctcaagtcttgccaaacctcaacctggactgccgactccctggcctgacgtctttccctgacctctatgccaacttcctggatcattttgaggctgtctcttttggggaccacctctttggggccctggtcctcctgcccctgcagcgtcggttcagtgtcaccttgcgccttgccctctttggggaacacgtgggagccttgcgagctctgagcctgcctctgacccagttgcctgtgtccctggagtgttacacagtgcctcctgaagacaacctggccctccttcagctctacttccggaccctggttactggtgcgctccgcccacgttggtgccccgtgctctatgctgtggctgtggctcatgtcaatagcttcatcttctctcaggacccacagagctcaggtatcagagacctaggatagttgatatagatggaaagatgggtacgttgtcctgtatccagcctttcaacagatgtctggccagacgaagaacattgtgtcctaatggtaggcaggagaccaaggagcagaaggcttgccttcctgggagcaggttgtttgagctgttttagagcagtgagccctaccattacatcctgatatctggggcttctgaaggtctgtgctgggagtgaagagtggcttagctatttacccgctctttggggacagggcaaactaaatgcatcccttcttacctaactcccaacccctgccctgggctgaggcatatgaatgctatagttgtgcattaaaataaatgttttttatctcc

SEQ ID NO: 432387 - DNA, 1399 bp, Homo sapiens
tttttgagacggagtcttgctctgttgcccaggctggagtgcagtggcgcgctcggctcactgcaacctccgcccctgggttcaagcgactcccctgcttcagcctcccaagtagctgggactacaagcacccaccaccatgtccagctaatttttgtattttcggtagagatggggtttcaccatgttggccaggctggtcttgaattcctaatttcgtgtgatccgcctgcctcagcctcccaagtgctgagattacaggcgtggcccactacacatggccaatttcatgctttttaatggctgcttctcagttcccagttttccccaacatctgctctgtagtctttaaccctgatccttgtgctagaaggacagatgtttgtctaggacctgatctctgccctcatgatttggtttcatgtgatcgttatccacacaccttatgtatgtatatacattcctaccctccccctcagcacgtcatttcccctgtcacagttgcctgtgtccctggagtgttacacagtgcctcctgaagacaacctggccctccttcagctctacttccggaccctggttactggtgcgctccgcccacgttggtgccccgtgctctatgctgtggctgtggctcatgtcaatagcttcatcttctctcaggacccacagagctcatcagtaagttacatctccatcttcagaggaaggaagggagctagcaattgagctgcctctgggccagctggggaagaggtaagtgtcaagcaaggccagtggtgggtaccagccctcggctcagtgccacctctccctgttctgcttctaggatgaggtcaaagctgcccgcaggagtatgctgcagaaaacatggctgctggcagatgagggtctccggcagcacctcctgcactataagcttcccaattccacgctcccagagggctttgagctctattctcagttgccccctctgcgtcagcactacctccagagactgacttcaacagtgctccaaaatggggtatcagagacctaggatagttgatatagatggaaagatgggtacgttgtcctgtatccagcctttcaacagatgtctggccagacgaagaacattgtgtcctaatggtaggcaggagaccaaggagcagaaggcttgccttcctgggagcaggttgtttgagctgttttagagcagtgagccctaccattacatcctgatatctggggcttctgaaggtctgtgctgggagtgaagagtggcttagctatttacccgctctttggggacagggcaaactaaatgcatcccttcttacctaactcccaacccctgccctgggctgaggcatatgaatgctatagttgtgcattaaaataaatgttttttatctcc

SEQ ID NO: 432388 - DNA, 1906 bp, Homo sapiens
cacggccggagagacgcggaggaggagacatgagccggcgggcgcccagacggagcggccgtgacgctttcgcgctgcagccgcgcgccccgaccccggagcgctgacccctggccccacgcagctccgcgcccgggccggagagcgcaactcggcttccagacccgccgcgcatgctgtccccggactgagccgggcagccagcctcccacggacgcccggacggccggccggccagcagtgagcgagcttccccgcaccggccaggcgcctcctgcacagcggctgccgccccgcagcccctgcgccagcccggagggcgcagcgctcgggaggagccgcgcggggcgctgatgccgcagggcgcgccgcggagcgccccggagcagcagagtctgcagcagcagcagccggcgaggagggagcagcagcagcggcggcggcggcggcggcggcggcggaggcgcccggtcccggccgcgcggagcggacatgtgcaggctgggctaggagccgccgcctccctcccgcccagcgatgtattcagcgccctccgcctgcacttgcctgtgtttacacttcctgctgctgtgcttccaggtacaggtgctggttgccgaggagaacgtggacttccgcatccacgtggagaaccagacgcgggctcgggacgatgtgagccgtaagcagctgcggctgtaccagctctacagccggaccagtgggaaacacatccaggtcctgggccgcaggatcagtgcccgcggcgaggatggggacaagtatgcccagctcctagtggagacagacaccttcggtagtcaagtccggatcaagggcaaggagacggaattctacctgtgcatgaaccgcaaaggcaagctcgtggggaagcccgatggcaccagcaaggagtgtgtgttcatcgagaaggttctggagaacaactacacggccctgatgtcggctaagtactccggctggtacgtgggcttcaccaagaaggggcggccgcggaagggccccaagacccgggagaaccagcaggacgtgcatttcatgaagcgctaccccaaggggcagccggagcttcagaagcccttcaagtacacgacggtgaccaagaggtcccgtcggatccggcccacacaccctgcctaggccaccccgccgcggcccctcaggtcgccctggccacactcacactcccagaaaactgcatcagaggaatatttttacatgaaaaataaggattttattgttgacttgaaacccccgatgacaaaagactcacgcaaagggactgtagtcaacccacaggtgcttgtctctctctaggaacagacaactctaaactcgtccccagaggaggacttgaatgaggaaaccaacactttgagaaaccaaagtcctttttcccaaaggttctgaaaggaaaaaaaaaaaaaacaaaaaaaaagaaaaacaaagagaaagtagtactccgcccaccaacaaactccccctaactttcccaatcctctgttcctgccccaaactccaacaaaaatcgctctctggtttgcagtcatttatttattgtccgctgcaagctgccccgagacaccgcgcagggaaggcgtgcccctgggaattctccgcgcctcgacctcccgacgacagacgcctcgtccaatcatggtgaccctgccttgctcgcagttctggaggatgctgctatcgaccttccgtgactcacgtgacctagtacaccaatgataagggaatattttaaaaccagctatattatatatattatatatatataagctatttatttcacctctctgtatattgcagtttcatgaaccaagtattactgcctcaacaattaaaaacaacagacaaattatttaaaaaaccatga

SEQ ID NO: 432389 - DNA, 1447 bp, Homo sapiens
aaggatcccccactcttgatatatgatcagggtcctcatcctcctccatccctcaggtgatgtctggtcaccctggcctgtcctcagcaaagtctctgttaggtggctttagccagaatcccctacaccctcgatgtttcctcttagtcattttccactctgctccttggctataaacccccacctgcctgtgccatattcagagttaagctcaatctctctcccccactgcaaaacttcattacagttgtccctacaacaatcgcaatggtcctgaataaaaccttcctcgctgtgctttggcaagcataactgagtcatttttttcttgaacactccccctctctcccctgcagcccgatggcaccagcaaggagtgtgtgttcatcgagaaggttctggagaacaactacacggccctgatgtcggctaagtactccggctggtacgtgggcttcaccaagaaggggcggccgcggaagggccccaagacccgggagaaccagcaggacgtgcatttcatgaagcgctaccccaaggggcagccggagcttcagaagcccttcaagtacacgacggtgaccaagaggtcccgtcggatccggcccacacaccctgcctaggccaccccgccgcggcccctcaggtcgccctggccacactcacactcccagaaaactgcatcagaggaatatttttacatgaaaaataaggaagaagctctatttttgtacattgtgtttaaaagaagacaaaaactgaaccaaaactcttggggggaggggtgataaggattttattgttgacttgaaacccccgatgacaaaagactcacgcaaagggactgtagtcaacccacaggtgcttgtctctctctaggaacagacaactctaaactcgtccccagaggaggacttgaatgaggaaaccaacactttgagaaaccaaagtcctttttcccaaaggttctgaaaggaaaaaaaaaaaaaacaaaaaaaaagaaaaacaaagagaaagtagtactccgcccaccaacaaactccccctaactttcccaatcctctgttcctgccccaaactccaacaaaaatcgctctctggtttgcagtcatttatttattgtccgctgcaagctgccccgagacaccgcgcagggaaggcgtgcccctgggaattctccgcgcctcgacctcccgacgacagacgcctcgtccaatcatggtgaccctgccttgctcgcagttctggaggatgctgctatcgaccttccgtgactcacgtgacctagtacaccaatgataagggaatattttaaaaccagctatattatatatattatatatatataagctatttatttcacctctctgtatattgcagtttcatgaaccaagtattactgcctcaacaattaaaaacaacagacaaattatttaaaaaaccatga

SEQ ID NO: 432390 - DNA, 1985 bp, Homo sapiens
cacggccggagagacgcggaggaggagacatgagccggcgggcgcccagacggagcggccgtgacgctttcgcgctgcagccgcgcgccccgaccccggagcgctgacccctggccccacgcagctccgcgcccgggccggagagcgcaactcggcttccagacccgccgcgcatgctgtccccggactgagccgggcagccagcctcccacggacgcccggacggccggccggccagcagtgagcgagcttccccgcaccggccaggcgcctcctgcacagcggctgccgccccgcagcccctgcgccagcccggagggcgcagcgctcgggaggagccgcgcggggcgctgatgccgcagggcgcgccgcggagcgccccggagcagcagagtctgcagcagcagcagccggcgaggagggagcagcagcagcggcggcggcggcggcggcggcggcggaggcgcccggtcccggccgcgcggagcggacatgtgcaggctgggctaggagccgccgcctccctcccgcccagcgatgtattcagcgccctccgcctgcacttgcctgtgtttacacttcctgctgctgtgcttccaggtacaggtgctggttgccgaggagaacgtggacttccgcatccacgtggagaaccagacgcgggctcgggacgatgtgagccgtaagcagctgcggctgtaccagctctacagccggaccagtgggaaacacatccaggtcctgggccgcaggatcagtgcccgcggcgaggatggggacaagtatgcccagctcctagtggagacagacaccttcggtagtcaagtccggatcaagggcaaggagacggaattctacctgtgcatgaaccgcaaaggcaagctcgtggggaagcccgatggcaccagcaaggagtgtgtgttcatcgagaaggttctggagaacaactacacggccctgatgtcggctaagtactccggctggtacgtgggcttcaccaagaaggggcggccgcggaagggccccaagacccgggagaaccagcaggacgtgcatttcatgaagcgctaccccaaggggcagccggagcttcagaagcccttcaagtacacgacggtgaccaagaggtcccgtcggatccggcccacacaccctgcctaggccaccccgccgcggcccctcaggtcgccctggccacactcacactcccagaaaactgcatcagaggaatatttttacatgaaaaataaggaagaagctctatttttgtacattgtgtttaaaagaagacaaaaactgaaccaaaactcttggggggaggggtgataaggattttattgttgacttgaaacccccgatgacaaaagactcacgcaaagggactgtagtcaacccacaggtgcttgtctctctctaggaacagacaactctaaactcgtccccagaggaggacttgaatgaggaaaccaacactttgagaaaccaaagtcctttttcccaaaggttctgaaaggaaaaaaaaaaaaaacaaaaaaaaagaaaaacaaagagaaagtagtactccgcccaccaacaaactccccctaactttcccaatcctctgttcctgccccaaactccaacaaaaatcgctctctggtttgcagtcatttatttattgtccgctgcaagctgccccgagacaccgcgcagggaaggcgtgcccctgggaattctccgcgcctcgacctcccgacgacagacgcctcgtccaatcatggtgaccctgccttgctcgcagttctggaggatgctgctatcgaccttccgtgactcacgtgacctagtacaccaatgataagggaatattttaaaaccagctatattatatatattatatatatataagctatttatttcacctctctgtatattgcagtttcatgaaccaagtattactgcctcaacaattaaaaacaacagacaaattatttaaaaaaccatga

SEQ ID NO: 432391 - DNA, 2239 bp, Homo sapiens
  misc_feature (729)..(729): n is a, c, g, or t
  misc_feature (738)..(738): n is a, c, g, or t
  misc_feature (1440)..(1440): n is a, c, g, or t
  misc_feature (1589)..(1589): n is a, c, g, or t
  misc_feature (2087)..(2087): n is a, c, g, or t
  misc_feature (2158)..(2158): n is a, c, g, or t
aacttcttttccttcccttcccctctgctagagttcttcaagttcaagggctttgggagtctctccaacctccctcggtccttcactctgagacgatcctcagcttccatcagtaggcagtcccatttggagcctgacacctttgaagccacgcaggatgacatggtgacggtgcccaagagtcccccagcctatgcccgctccagtgacatgtacagccacatgggcaccatgcctcgccccagcatcaagaaagcacagaactcacaggctgcccggcaggcccaggaggcgggtcccaagcccaacttggtacccggaggtgtacccgaccccccaggcttggaggcagccaaagaggtgatggtgaaggccactggccctctagaggacaccccagcaatggaacccaacccttcagcagtggaggtagaccccatcagaaagcctgaggtccccacaggagacgtagaagaggagagacctcccagggacgtgcactcagaaaggtaggtgcccaggggctggttgggacctgcagggatggcttctgtttttttctttttcttttttttttttttgacacagagtgtcgctctgtctctcaggctggagtgcagtggtgtgatcccggttcactgcaacctctgcctcccgggtccaagcaattctcctacctcagccccccgagtagctgggactacaggcgcccaacaccactcttggctnatttttgtntttttagtagagacaggatttcaccatgttgtccaggctggcctcgaactcctgacctcaggtgatctgcctgcctcggcctcccaaagtgctggccggggcttctttttaacccagtacacatctgggttaaaaagaaaaaaacctacacattgaccaggtgcttactgtagaccaggtactgtgctaaaccctttacttgtaattagcaaaagaaaactggcaaggagagactgttactgtttccacaggacagatgaggaagctgagattcacagagtgacatcatctgcctcagtcagggtgcatatttgctaatgacaaagccagcatgtgaaccgagaccccctgccttcaaagtcccagttagcctctagcatgggccctcagctgctggatgggtcctaaacccagtcactagacccctgccctgaaccccctcacgcaaatcatcaccattagttctgctggacaatacctccacctagtctagaaaaccatttgtcagcttaatttggttatagggtgagttgagttcatgtaaaaatacaaattgtgatgataggacaatagctcccatttagtaagcatttttactgggtatcaaaacaagtatctcactgaaaactccatagaagattcaatcattaaggctgggtgcagtggctcatgcctgtaatcccagtattttgggaggctagnagtttgaaaacagcctggctaacatggtaaaaccccgtctctactaaaaatacaaaaactagcagggcgtggtggtgcgtgcctgtagtcccagttactcaggaggtggaggcacgagaattgcttgaacttgggagatggaggttgcngtgagctgagatcacaccactgtactccagactgggcaacagagcaagactcagtcttgaaaaaaaaaaaaaagattcaattattagccccacttacagattgggaaactgagactcagccaaggttacacagaactgggatttgagcaggaatctgcttgcttccagaggctgcacacttatgtaccacattagactcaccaccttctcaatcctagggccatgcctttcacaccccgggagacccctcaatcccagccaaaggagtccccggcttttcaatccttagaacctttgtctcaaccacaccagtcacatgtgcctgttgaaataaagaaaaaaagtcagctggccgggcgcagtggctcacgcctgtaatcccaacactttgggtggccgaggtaggcagatcacaaggtcaggagttcgagaccagcctggccaaagagaccagcctgaccaacatggtgaagccctatctctactaaaaatacaaanattagccgggtgtggcggcgggcacctgtaatcccagctactgaggaggctgaggcatcagaattgcttgnacctgggaggcagaggttgcagtgacccaagatcgcgccattgcacactccagcctgggcgacaaagcgagactccaactc

SEQ ID NO: 432392 - DNA, 2753 bp, Homo sapiens
ttcgaggcggagagcgtccttccctgccggtggagtaggcggtggagtggggccgggcaaggagcgcaggggcgtgtctgggggcgtggtctacaggtcagtctccgcccccggagtccggcactgagctctgcagctcagtggcccgagaaaggcaggagccgctgggtttaggaggtccccgggttgccggcggcgacagcgggggaagcatgactgctgtgggccgaaggtgccccgcgctggggtcccgaggggctgctggagagccagaggctggcagcgactatgtgaagttctccaaggagaagtacatcctggactcatcgccagagaaactccacaaggaattggaggaggagctcaaactcagcagcacggatctccgcagccatgcctggtaccatggccgcatcccccgagaggtctcggagaccttggtacaacgcaacggcgacttcctcatccgggactcactcaccagcctgggcgactatgtgctcacgtgccgctggcgcaaccaggccttgcacttcaagatcaacaaggtggtggtgaaggcaggcgagagctacacacacatccagtacctgtttgagcaggagagctttgaccacgtgcccgccctcgtgcgctatcatgtgggcagccgcaaggctgtgtcagagcagagtggtgccatcatctactgcccggtgaaccgcaccttcccactgcgctacctcgaggccagctatggcctgggacaggggagtagcaagcctgctagccccgtcagcccctcaggccccaagggcagccacatgaagcggcgcagcgtcaccatgaccgatgggctcactgctgacaaggtcacccgcagcgatggctgccccaccagtacgtcgctgccccgccctcgggactccatccgcagctgtgccctcagcatggaccagatcccagacctgcactcacccatgtcgcccatctccgagagccctagctcccctgcctacagcactgtaacccgtgtccatgccgcccctgcagccccttctgccacagcattgcctgcctcccctgtcgcccgccgttccagtgagccccagctgtgtcccggaagtgccccaaagacccatggggagtcagacaagggcccccacaccagcccctcccacacccttggcaaggcctccccgtcaccatcactcagcagctacagtgacccggactctggccactactgccagctccagcctcccgtgcgtggcagccgagagtgggcagcgactgagacctccagccagcaggccaggagctatggggagaggctaaaggaactgtcagaaaatggggcccctgaaggggactggggcaagaccttcacagtccccatcgtggaagtcacttcttccttcaacccggccaccttccagtcactactgatccccagggataaccggccactggaggtgggccttctgcgcaaggtcaaggagctgctggcagaagtggatgcccggacgctggcccggcatgtcaccaaggtggactgcctggttgctaggatactgggcgttaccaaggagatgcagaccctaatgggagtccgctggggcatggaactgctcaccctcccccatggccggcagctacgcctagacctgctggaaaggttccacaccatgtccatcatgctggccgtggacatcctgggctgcaccggctctgcggaggagcgggcagcgctgctgcacaagaccattcagctggcggccgagctgcgggggactatgggcaacatgttcagcttcgcggcggtcatgggtgccctggacatggctcagatttctcggctggagcagacatgggtgaccctgcggcagcgacacacagagggtgccatcctgtacgagaagaagctcaagccttttctcaagagcctcaacgagggcaaagaaggcccgccgctgagcaacaccacgtttcctcatgtgctgcccctcatcaccctgctggagtgtgactcggccccaccagagggccctgagccctggggcagcacggagcacggcgtggaggtggtgctggctcacctggaggccgcccgcacagtggcacaccacggaggcctgtaccacaccaatgctgaagtcaagctgcaggggttccaggcccggccggagctcctggaggtgttcagcacggagttccagatgcgccttctctggggcagtcagggtgccagcagcagccaggcccggcgctatgagaagttcgacaaggtcctcactgccctgtcccacaagctggaacctgctgtccgctccagcgagctgtgaccccagggacatttcccctctgcagctgcggacagcgtcaggggcagaggggcacacaactttccccagagcaccccaaggacactgtgatcaacccgagaatgttctgggttcaactcaagcatctcccttgcacctccagggtcctgcgtggactctgggttccatcccacctgctacatgctcaccaggtctccattgaggaagaacaggaacgccggttcccccaccagcttttgctgctccccttcctgctggggttccctgttttcgagccatgggaggcaggctgctcacgcctcctcactctctgtctgtccctcaccaacaccaaggcctccatctcactgtaaataagtctctgttctgtaaatagatgtacagaagccatgttatttctttcatataataaacttttatgactcttta

SEQ ID NO: 432393 - DNA, 3593 bp, Homo sapiens
tgggagaggcacctcaactttgatgtcccgagccttgagtggccactcgcaagctggccaagggcttcacacaatttgccaagatgacagaggggaccaagaagaccagcaaaaagttcaagttcttcaagttcaagggctttgggagtctctccaacctccctcggtccttcactctgagacgatcctcagcttccatcagtaggcagtcccatttggagcctgacacctttgaagccacgcaggatgacatggtgacggtgcccaagagtcccccagcctatgcccgctccagtgacatgtacagccacatgggcaccatgcctcgccccagcatcaagaaagcacagaactcacaggctgcccggcaggcccaggaggcgggtcccaagcccaacttggtacccggaggtgtacccgaccccccaggcttggaggcagccaaagaggtgatggtgaaggccactggccctctagaggacaccccagcaatggaacccaacccttcagcagtggaggtagaccccatcagaaagcctgaggtccccacaggagacgtagaagaggagagacctcccagggacgtgcactcagaaagggctgctggagagccagaggctggcagcgactatgtgaagttctccaaggagaagtacatcctggactcatcgccagagaaactccacaaggaattggaggaggagctcaaactcagcagcacggatctccgcagccatgcctggtaccatggccgcatcccccgagaggtctcggagaccttggtacaacgcaacggcgacttcctcatccgggactcactcaccagcctgggcgactatgtgctcacgtgccgctggcgcaaccaggccttgcacttcaagatcaacaaggtggtggtgaaggcaggcgagagctacacacacatccagtacctgtttgagcaggagagctttgaccacgtgcccgccctcgtgcgctatcatgtgggcagccgcaaggctgtgtcagagcagagtggtgccatcatctactgcccggtgaaccgcaccttcccactgcgctacctcgaggccagctatggcctgggacaggggagtagcaagcctgctagccccgtcagcccctcaggccccaagggcagccacatgaagcggcgcagcgtcaccatgaccgatgggctcactgctgacaaggtcacccgcagcgatggctgccccaccagtacgtcgctgccccgccctcgggactccatccgcagctgtgccctcagcatggaccagatcccagacctgcactcacccatgtcgcccatctccgagagccctagctcccctgcctacagcactgtaacccgtgtccatgccgcccctgcagccccttctgccacagcattgcctgcctcccctgtcgcccgccgttccagtgagccccagctgtgtcccggaagtgccccaaagacccatggggagtcagacaagggcccccacaccagcccctcccacacccttggcaaggcctccccgtcaccatcactcagcagctacagtgacccggactctggccactactgccagctccagcctcccgtgcgtggcagccgagagtgggcagcgactgagacctccagccagcaggccaggagctatggggagaggctaaaggaactgtcagaaaatggggcccctgaaggggactggggcaagaccttcacagtccccatcgtggaagtcacttcttccttcaacccggccaccttccagtcactactgatccccagggataaccggccactggaggtgggccttctgcgcaaggtcaaggagctgctggcagaagtggatgcccggacgctggcccggcatgtcaccaaggtggactgcctggttgctaggatactgggcgttaccaaggagatgcagaccctaatgggagtccgctggggcatggaactgctcaccctcccccatggccggcagctacgcctagacctgctggaaaggttccacaccatgtccatcatgctggccgtggacatcctgggctgcaccggctctgcggaggagcgggcagcgctgctgcacaagaccattcagctggcggccgagctgcgggggactatgggcaacatgttcagcttcgcggcggtcatgggtgccctggacatggctcagatttctcggctggagcagacatgggtgaccctgcggcagcgacacacagagggtgccatcctgtacgagaagaagctcaagccttttctcaagagcctcaacgagggcaaagaaggcccgccgctgagcaacaccacgtttcctcatgtgctgcccctcatcaccctgctggagtgtgactcggccccaccagagggccctgagccctggggcagcacggagcacggcgtggaggtggtgctggctcacctggaggccgcccgcacagtggcacaccacggaggcctgtaccacaccaatgctgaagtcaagctgcaggggttccaggcccggccggagctcctggaggtgttcagcacggagttccagatgcgccttctctggggcagtcagggtgccagcagcagccaggcccggcgctatgagaagttcgacaaggtcctcactgccctgtcccacaagctggaacctgctgtccgctccagcgagctgtgaccccagggacatttcccctctgcagctgcggacagcgtcaggggcagaggggcacacaactttccccagagcaccccaaggacactgtgatcaacccgagaatgttctgggttcaactcaagcatctcccttgcacctccagggtcctgcgtggactctgggttccatcccacctgctacatgctcaccaggtctccattgaggaagaacaggaacgccggttcccccaccagcttttgctgctccccttcctgctggggttccctgttttcgagccatgggaggcaggctgctcacgcctcctcactctctgtctgtccctcaccaacaccaaggcctccatctcactgtaaataagtctctgttctgtaaatagatgtacagaagccatgttatttctttcatataataaacttttatgactctttaaaaaaaaaaaaaaaaaaaaaacacacaaacaactaaaaaaaaaaaaaaaaaaaaaaaaagaaaaaaaaaaaaaaggggggggcgccccaaaacaccccagcagggggggccccgacgaaagaacgaaggagagcagcccgtgtatctggcagacaagaaaacagcggcccacgcaaaaaggacgacgcagctaacgacagcacgagagaggcagggggccacgagacaaacaacaccgccacatacgcgcgaagaaacacggcgaagtgagtaagcagttgatgcgaagggcaagccccacacacctgcgggcgcgagcaaaccaacaacgcgggccgagcagcccccacacacaggcaaatagacgccccacacagagcaaaaaacaagacaacggagatcctatacggcgggcacacacaaacacgaccacagcaccgcgcccagagaaaaaccgtgcccgcggggcacaatgcgagcgggaaggataacacaagg

SEQ ID NO: 432394 - DNA, 1848 bp, Homo sapiens
ttcgaggcggagagcgtccttccctgccggtggagtaggcggtggagtggggccgggcaaggagcgcaggggcgtgtctgggggcgtggtctacaggtcagtctccgcccccggagtccggcactgagctctgcagctcagtggcccgagaaaggcaggagccgctgggtttaggaggtccccgggttgccggcggcgacagcgggggaagcatgactgctgtgggccgaaggtgccccgcgctggggtcccgaggggctgctggagagccagaggctggcagcgactatgtgaagttctccaaggagaagtacatcctggactcatcgccagagaaactccacaaggaattggaggaggagctcaaactcagcagcacggatctccgcagccatgcctggtaccatggccgcatcccccgagaggtctcggagaccttggtacaacgcaacggcgacttcctcatccgggactcactcaccagcctgggcgactatgtgctcacgtgccgctggcgcaaccaggccttgcacttcaagatcaacaaggtggtggtgaaggcaggcgagagctacacacacatccagtacctgtttgagcaggagagctttgaccacgtgcccgccctcgtgcgctatcatgtgggcagccgcaaggctgtgtcagagcagagtggtgccatcatctactgcccggtgaaccgcaccttcccactgcgctacctcgaggccagctatggcctgggacaggggagtagcaagcctgctagccccgtcagcccctcaggccccaagggcagccacatgaagcggcgcagcgtcaccatgaccgatgggctcactgctgacaaggtcacccgcagcgatggctgccccaccagtacgtcgctgccccgccctcgggactccatccgcagctgtgccctcagcatggaccagatcccagacctgcactcacccatgtcgcccatctccgagagccctagctcccctgcctacagcactgtaacccgtgtccatgccgcccctgcagccccttctgccacagcattgcctgcctcccctgtcgcccgccgttccagtgagccccagctgtgtcccggaagtgccccaaagacccatggggagtcagacaagggcccccacaccagcccctcccacacccttggcaaggcctccccgtcaccatcactcagcagctacagtgacccggactctggccactactgccagctccagcctcccgtgcgtggcagccgagagtgggcagcgactgagacctccagccagcaggccaggagctatggggagaggctaaaggaactgtcagaaaatggggcccctgaaggggactggggcaagaccttcacagtccccatcgtggaagtcacttcttccttcaacccggccaccttccagtcactactgatccccagggataaccggccactggaggtgggccttctgcgcaaggtcaaggagctgctggcagaagtggatgcccggacgctggcccggcatgtcaccaaggtggactgcctggttgctaggatactgggcgttaccaaggagatgcagaccctaatgggagtccgctggggcatggaactgctcaccctcccccatggccggcagctacgcctagacctgctggaaaggtgagacagcgccggcacccggggactcgcggggaacccccggctaccgcactccccgctggacggggcgggttggccaatcacagcctcagctcggctcccagggggctctggccacgcctcccatcccattgaccaatcgcaagccctgataacccgctctaaacaggctgatttcccaaagactgaat

SEQ ID NO: 432395 - DNA, 399 bp, Homo sapiens
aaggggtgcgggaatctcactttggtggggagctgctataacggggcctctctctctacctttctgcagtaacccgtgtccatgccgcccctgcagccccttctgccacagcattgcctgcctcccctgtcgcccgccgttccagtgagccccagctgtgtcccggaagtgccccaaagacccatggggagtcagacaagggcccccacaccagcccctcccacacccttggcaaggcctccccgtcaccatcactcagcagctacagtgacccggactctggccactactgccagctccagcctcccgtgcgtggcagccgagagtgggcagcgactgagacctccagccagcaggccaggagctatggggagaggctaaaggaactgtcagaaaatg

SEQ ID NO: 432396 - DNA, 3251 bp, Homo sapiens
ttcgaggcggagagcgtccttccctgccggtggagtaggcggtggagtggggccgggcaaggagcgcaggggcgtgtctgggggcgtggtctacaggtcagtctccgcccccggagtccggcactgagctctgcagctcagtggcccgagaaaggcaggagccgctgggtttaggaggtccccgggttgccggcggcgacagcgggggaagcatgactgctgtgggccgaaggtgccccgcgctggggtcccgaggggctgctggagagccagaggctggcagcgactatgtgaagttctccaaggagaagtacatcctggactcatcgccagagaaactccacaaggaattggaggaggagctcaaactcagcagcacggatctccgcagccatgcctggtaccatggccgcatcccccgagaggtctcggagaccttggtacaacgcaacggcgacttcctcatccgggactcactcaccagcctgggcgactatgtgctcacgtgccgctggcgcaaccaggccttgcacttcaagatcaacaaggtggtggtgaaggcaggcgagagctacacacacatccagtacctgtttgagcaggagagctttgaccacgtgcccgccctcgtgcgctatcatgtgggcagccgcaaggctgtgtcagagcagagtggtgccatcatctactgcccggtgaaccgcaccttcccactgcgctacctcgaggccagctatggcctgggacaggggagtagcaagcctgctagccccgtcagcccctcaggccccaagggcagccacatgaagcggcgcagcgtcaccatgaccgatgggctcactgctgacaaggtcacccgcagcgatggctgccccaccagtacgtcgctgccccgccctcgggactccatccgcagctgtgccctcagcatggaccagatcccagacctgcactcacccatgtcgcccatctccgagagccctagctcccctgcctacagcactgtaacccgtgtccatgccgcccctgcagccccttctgccacagcattgcctgcctcccctgtcgcccgccgttccagtgagccccagctgtgtcccggaagtgccccaaagacccatggggagtcagacaagggcccccacaccagcccctcccacacccttggcaaggcctccccgtcaccatcactcagcagctacagtgacccggactctggccactactgccagctccagcctcccgtgcgtggcagccgagagtgggcagcgactgagacctccagccagcaggccaggagctatggggagaggctaaaggaactgtcagaaaatggggcccctgaaggggactggggcaagaccttcacagtccccatcgtggaagtcacttcttccttcaacccggccaccttccagtcactactgatccccagggataaccggccactggaggtgggccttctgcgcaaggtcaaggagctgctggcagaagtggatgcccggacgctggcccggcatgtcaccaaggtggactgcctggttgctaggatactgggcgttaccaaggagatgcagaccctaatgggagtccgctggggcatggaactgctcaccctcccccatggccggcagctacgcctagacctgctggaaaggttccacaccatgtccatcatgctggccgtggacatcctgggctgcaccggctctgcggaggagcgggcagcgctgctgcacaagaccattcagctggcggccgagctgcgggggactatgggcaacatgttcagcttcgcggcggtcatgggtgccctggacatggctcagatttctcggctggagcagacatgggtgaccctgcggcagcgacacacagagggtgccatcctgtacgagaagaagctcaagccttttctcaagagcctcaacgagggcaaagaaggcccgccgctgagcaacaccacgtttcctcatgtgctgcccctcatcaccctgctggagtgtgactcggccccaccagagggccctgagccctggggcagcacggagcacggcgtggaggtggtgctggctcacctggaggccgcccgcacagtggcacaccacggaggcctgtaccacaccaatgctgaagtcaagctgcaggggttccaggcccggccggagctcctggaggtgttcagcacggagttccagatgcgccttctctggggcagtcagggtgccagcagcagccaggcccggcgctatgagaagttcgacaaggtcctcactgccctgtcccacaagctggaacctgctgtccgctccagcgagctgtgaccccagggacatttcccctctgcagctgcggacagcgtcaggggcagaggggcacacaactttccccagagcaccccaaggacactgtgatcaacccgagaatgttctgggttcaactcaagcatctcccttgcacctccagggtcctgcgtggactctgggttccatcccacctgctacatgctcaccaggtctccattgaggaagaacaggaacgccggttcccccaccagcttttgctgctccccttcctgctggggttccctgttttcgagccatgggaggcaggctgctcacgcctcctcactctctgtctgtccctcaccaacaccaaggcctccatctcactgtaaataagtctctgttctgtaaatagatgtacagaagccatgttatttctttcatataataaacttttatgactctttaaaaaaaaaaaaaaaaaaaaaacacacaaacaactaaaaaaaaaaaaaaaaaaaaaaaaagaaaaaaaaaaaaaaggggggggcgccccaaaacaccccagcagggggggccccgacgaaagaacgaaggagagcagcccgtgtatctggcagacaagaaaacagcggcccacgcaaaaaggacgacgcagctaacgacagcacgagagaggcagggggccacgagacaaacaacaccgccacatacgcgcgaagaaacacggcgaagtgagtaagcagttgatgcgaagggcaagccccacacacctgcgggcgcgagcaaaccaacaacgcgggccgagcagcccccacacacaggcaaatagacgccccacacagagcaaaaaacaagacaacggagatcctatacggcgggcacacacaaacacgaccacagcaccgcgcccagagaaaaaccgtgcccgcggggcacaatgcgagcgggaaggataacacaagg

SEQ ID NO: 432397 - DNA, 3162 bp, Homo sapiens
ctcaggaggaaggaaggaaaaacagccgtctctggcctctggcctctccaggctctccaccctgggggcagaatcaattctgtagccctctagcaccggcagtggctccgcagtcagctgggcagtggccgtgactgggtcactctaccctaggaagtgagtgcaggggctgctggagagccagaggctggcagcgactatgtgaagttctccaaggagaagtacatcctggactcatcgccagagaaactccacaaggaattggaggaggagctcaaactcagcagcacggatctccgcagccatgcctggtaccatggccgcatcccccgagaggtctcggagaccttggtacaacgcaacggcgacttcctcatccgggactcactcaccagcctgggcgactatgtgctcacgtgccgctggcgcaaccaggccttgcacttcaagatcaacaaggtggtggtgaaggcaggcgagagctacacacacatccagtacctgtttgagcaggagagctttgaccacgtgcccgccctcgtgcgctatcatgtgggcagccgcaaggctgtgtcagagcagagtggtgccatcatctactgcccggtgaaccgcaccttcccactgcgctacctcgaggccagctatggcctgggacaggggagtagcaagcctgctagccccgtcagcccctcaggccccaagggcagccacatgaagcggcgcagcgtcaccatgaccgatgggctcactgctgacaaggtcacccgcagcgatggctgccccaccagtacgtcgctgccccgccctcgggactccatccgcagctgtgccctcagcatggaccagatcccagacctgcactcacccatgtcgcccatctccgagagccctagctcccctgcctacagcactgtaacccgtgtccatgccgcccctgcagccccttctgccacagcattgcctgcctcccctgtcgcccgccgttccagtgagccccagctgtgtcccggaagtgccccaaagacccatggggagtcagacaagggcccccacaccagcccctcccacacccttggcaaggcctccccgtcaccatcactcagcagctacagtgacccggactctggccactactgccagctccagcctcccgtgcgtggcagccgagagtgggcagcgactgagacctccagccagcaggccaggagctatggggagaggctaaaggaactgtcagaaaatggggcccctgaaggggactggggcaagaccttcacagtccccatcgtggaagtcacttcttccttcaacccggccaccttccagtcactactgatccccagggataaccggccactggaggtgggccttctgcgcaaggtcaaggagctgctggcagaagtggatgcccggacgctggcccggcatgtcaccaaggtggactgcctggttgctaggatactgggcgttaccaaggagatgcagaccctaatgggagtccgctggggcatggaactgctcaccctcccccatggccggcagctacgcctagacctgctggaaaggttccacaccatgtccatcatgctggccgtggacatcctgggctgcaccggctctgcggaggagcgggcagcgctgctgcacaagaccattcagctggcggccgagctgcgggggactatgggcaacatgttcagcttcgcggcggtcatgggtgccctggacatggctcagatttctcggctggagcagacatgggtgaccctgcggcagcgacacacagagggtgccatcctgtacgagaagaagctcaagccttttctcaagagcctcaacgagggcaaagaaggcccgccgctgagcaacaccacgtttcctcatgtgctgcccctcatcaccctgctggagtgtgactcggccccaccagagggccctgagccctggggcagcacggagcacggcgtggaggtggtgctggctcacctggaggccgcccgcacagtggcacaccacggaggcctgtaccacaccaatgctgaagtcaagctgcaggggttccaggcccggccggagctcctggaggtgttcagcacggagttccagatgcgccttctctggggcagtcagggtgccagcagcagccaggcccggcgctatgagaagttcgacaaggtcctcactgccctgtcccacaagctggaacctgctgtccgctccagcgagctgtgaccccagggacatttcccctctgcagctgcggacagcgtcaggggcagaggggcacacaactttccccagagcaccccaaggacactgtgatcaacccgagaatgttctgggttcaactcaagcatctcccttgcacctccagggtcctgcgtggactctgggttccatcccacctgctacatgctcaccaggtctccattgaggaagaacaggaacgccggttcccccaccagcttttgctgctccccttcctgctggggttccctgttttcgagccatgggaggcaggctgctcacgcctcctcactctctgtctgtccctcaccaacaccaaggcctccatctcactgtaaataagtctctgttctgtaaatagatgtacagaagccatgttatttctttcatataataaacttttatgactctttaaaaaaaaaaaaaaaaaaaaaacacacaaacaactaaaaaaaaaaaaaaaaaaaaaaaaagaaaaaaaaaaaaaaggggggggcgccccaaaacaccccagcagggggggccccgacgaaagaacgaaggagagcagcccgtgtatctggcagacaagaaaacagcggcccacgcaaaaaggacgacgcagctaacgacagcacgagagaggcagggggccacgagacaaacaacaccgccacatacgcgcgaagaaacacggcgaagtgagtaagcagttgatgcgaagggcaagccccacacacctgcgggcgcgagcaaaccaacaacgcgggccgagcagcccccacacacaggcaaatagacgccccacacagagcaaaaaacaagacaacggagatcctatacggcgggcacacacaaacacgaccacagcaccgcgcccagagaaaaaccgtgcccgcggggcacaatgcgagcgggaaggataacacaagg

SEQ ID NO: 432398 - DNA, 1909 bp, Homo sapiens
  misc_feature (13)..(13): n is a, c, g, or t
  misc_feature (34)..(34): n is a, c, g, or t
tccatgtcacaangtgactgcctggttgctaggntacgggcgttaccaaggagatgcagaccctaatgggagtccgctggggcatggaactgctcaccctcccccactggaggtgggccttctgcgcaaggtcaaggagctgctggcagaagtggatgcccggacgctggcccggcatgtcaccaaggtggactgcctggttgctaggatactgggcgttaccaaggagatgcagaccctaatgggagtccgctggggcatggaactgctcaccctcccccatggccggcagctacgcctagacctgctggaaaggttccacaccatgtccatcatgctggccgtggacatcctgggctgcaccggctctgcggaggagcgggcagcgctgctgcacaagaccattcagctggcggccgagctgcgggggactatgggcaacatgttcagcttcgcggcggtcatgggtgccctggacatggctcagatttctcggctggagcagacatgggtgaccctgcggcagcgacacacagagggtgccatcctgtacgagaagaagctcaagccttttctcaagagcctcaacgagggcaaagaaggcccgccgctgagcaacaccacgtttcctcatgtgctgcccctcatcaccctgctggagtgtgactcggccccaccagagggccctgagccctggggcagcacggagcacggcgtggaggtggtgctggctcacctggaggccgcccgcacagtggcacaccacggaggcctgtaccacaccaatgctgaagtcaagctgcaggggttccaggcccggccggagctcctggaggtgttcagcacggagttccagatgcgccttctctggggcagtcagggtgccagcagcagccaggcccggcgctatgagaagttcgacaaggtcctcactgccctgtcccacaagctggaacctgctgtccgctccagcgagctgtgaccccagggacatttcccctctgcagctgcggacagcgtcaggggcagaggggcacacaactttccccagagcaccccaaggacactgtgatcaacccgagaatgttctgggttcaactcaagcatctcccttgcacctccagggtcctgcgtggactctgggttccatcccacctgctacatgctcaccaggtctccattgaggaagaacaggaacgccggttcccccaccagcttttgctgctccccttcctgctggggttccctgttttcgagccatgggaggcaggctgctcacgcctcctcactctctgtctgtccctcaccaacaccaaggcctccatctcactgtaaataagtctctgttctgtaaatagatgtacagaagccatgttatttctttcatataataaacttttatgactctttaaaaaaaaaaaaaaaaaaaaaacacacaaacaactaaaaaaaaaaaaaaaaaaaaaaaaagaaaaaaaaaaaaaaggggggggcgccccaaaacaccccagcagggggggccccgacgaaagaacgaaggagagcagcccgtgtatctggcagacaagaaaacagcggcccacgcaaaaaggacgacgcagctaacgacagcacgagagaggcagggggccacgagacaaacaacaccgccacatacgcgcgaagaaacacggcgaagtgagtaagcagttgatgcgaagggcaagccccacacacctgcgggcgcgagcaaaccaacaacgcgggccgagcagcccccacacacaggcaaatagacgccccacacagagcaaaaaacaagacaacggagatcctatacggcgggcacacacaaacacgaccacagcaccgcgcccagagaaaaaccgtgcccgcggggcacaatgcgagcgggaaggataacacaagg

SEQ ID NO: 432399 - DNA, 469 bp, Homo sapiens
aacaaaacaaaaaactactctgcgtgatgcatttccctgctgacccacagctctggccccgcccctgatttatgctgaccaatcagaagcccgaggccttgctttccacgctctggccgcgcccccttatcccattgacccttacaacctctcacgttggctccgccctccgcctctcccggcccaaccacaggcagcgccccaggcccgcacccctcacccctgtccccgagcccgccgcctctgaccccgccgctctgacaggttccacaccatgtccatcatgctggccgtggacatcctgggctgcaccggctctgcggaggagcgggcagcgctgctgcacaagaccattcagctggcggccgagctgcgggggactatgggcaacatgttcagcttcgcggcggtcatgggtgccctggacatggctcaggtactgagagccgcgcagagctggcacccggta

SEQ ID NO: 432400 - DNA, 2385 bp, Homo sapiens
aagtgcttctcttttccttggcggaggagggagaccacagagccctgggttgtggaagaggtggctgttccctgtcatcagtatgcagcgattgctctttccgccgttgagggccttgaaggggaggcagtatctgccgctcctggctcctagggcagcgcctagagcacagtgtgattgcatcaggcgccctttgaggccagggcaatacagcaccatctctgaagtagctttgcaatctggaaggggtacagtgtcccttccctcaaaggctgctgagcgggtggtgggccgatggctcctggtctgcagtggaacagtggctggagcagttattcttggtggagtaactaggttgacagagtctggcctctcgatggtagattggcatttaataaaggagatgaagccacctacaagccaagaggaatgggaagcagaattccaaagataccagcaatttccagaatttaaaatcttgaatcatgatatgacactgacagaattcaagttcatctggtacatggagtactcacaccgaatgtggggtcgccttgtaggccttgtgtacatcctgcctgctgcctacttttggagaaagggctggctcagccgtggcatgaaaggacgtgttcttgccctctgtggcctcgtctgcttccagggtctgttgggatggtatatggtgaaaagtggactagaagaaaaatcagactcccatgacatccctcgggtcagtcagtaccgccttgctgcccacctgggatcagccctggttctttattgtgccagcttgtggacctcactgtcactgctactccctccgcacaagttgcctgaaacccaccaactcctacagttgagacgatttgctcatggaacagcaggtctggtgttccttacggccctctcaggggcttttgtggcagggctagatgctgggcttgtttataactcctttcccaaaatgggagaatcctggatcccggaggacctctttaccttctcccccatcctgaggaatgtttttgagaatcccaccatggtgcagtttgatcaccggattctgggaatcacttcagtcactgccattacagtgctctacttcctctctcggagaattccccttcctagaaggaccaagatggcagcagtgactctgctggctttggcgtatacacaggtgggcttgggcatcagcacgctgctgatgtatgtcccaactcctctggccgccactcaccagtcaggctccttggctttgctcactggtgctctttggctgatgaatgaactccgaagagtcccaaaatgattcttagaggaccagcctcctgggactgtgactgcttttgagagctcttcagagatcataagaacttgggcttttctacgagatgaccttgacataccaagtggtttccaaatggtcaacttacttaaaaatcttttcctgttttgagatagtcactggatcaagaatgcattaagtgtggttaccctaaatgttcccttttaaatctgcttttcatgttgaaaatcagttttaatgtagagaaagaaatgtctgccatttgctgcttaacaggctttgtgtcaggtttttcagtgttggcaagctcttggttctacgtggatgatttctacgtggatgttctcctgagtccttaattctgcctaaatagaatttctttatgatcttaacttcacttccattaggtgaagattgaaaggataggattgacatacccaaagtagccagctggtcttcagcaaaaaaaaaaaagctaatgtcttctaatatcctgattttcagaaatggggaaattgcagattttgacaagcttaatgtgtatatgtagcaaaatggtttttaagtacttggaaaaggaggtaatcgccaaatagttccatttttttttttttttttgagacagagtttcactcttgttgcccaggctggagtacaatggcgtgatctcagctcactctgcaacctccacttcccaggttcaagcgattctcatgcctcagcctcccgagtagctgggactacaggcacaagtcaccatgcctggctaattttgtatttttagtagagaaggggtttcaccacattggccaggctggtcttgaactcctgacctcaggtaatccgcccatctcggcttcccaaagtgctgagattacaggcatgggccaccacgcccagctagttcctcttttgataaggctgttaacattacaaggtcagagagaggaatggaatcgacagtataaattggttcctgagagggtttcctaacagctttgtaataagaaaaatatggccttgatggtgtagtgcatggacatctacccagataaacaaattgttgactgctg

SEQ ID NO: 432401 - DNA, 2819 bp, Homo sapiens
aagtgcttctcttttccttggcggaggagggagaccacagagccctgggttgtggaagaggtggctgttccctgtcatcagtatgcagcgattgctctttccgccgttgagggccttgaaggggaggcagtatctgccgctcctggctcctagggcagcgcctagagcacagtgtgattgcatcaggcgccctttgaggccagggcaatacagcaccatctctgaagtagctttgcaatctggaaggggtacagtgtcccttccctcaaaggctgctgagcgggtggtgggccgatggctcctggtctgcagtggaacagtggctggagcagttattcttggtggagtaactaggttgacagagtctggcctctcgatggtagattggcatttaataaaggagatgaagccacctacaagccaagaggaatgggaagcagaattccaaagataccagcaatttccagaatttaaaatcttgaatcatgatatgacactgacagaattcaagttcatctggtacatggagtactcacaccgaatgtggggtcgccttgtaggccttgtgtacatcctgcctgctgcctacttttggagaaagggctggctcagccgtggcatgaaaggacgtgttcttgccctctgtggcctcgtctgcttccagggtctgttgggatggtatatggtgaaaagtggactagaagaaaaatcagactcccatgacatccctcgggtcagtcagtaccgccttgctgcccacctgggatcagccctggttctttattgtgccagcttgtggacctcactgtcactgctactccctccgcacaagttgcctgaaacccaccaactcctacagttgagacgatttgctcatggaacagcaggtctggtgttccttacggccctctcaggggcttttgtggcagggctagatgctgggcttgtttataactcctttcccaaaatgggagaatcctggatcccggaggacctctttaccttctcccccatcctgaggaatgtttttgagaatcccaccatggtgcagtttgatcaccggattctgggaatcacttcagtcactgccattacagtgctctacttcctctctcggagaattccccttcctagaaggaccaagatggcagcagtgactctgctggctttggcgtatacacagggccctgtcttattcaaccttacttttaaaatcagtgatttggatgaaggcatcagaaacatctgatttgaggatggagcaacccaatattgctaatataatagatgacagtggcaactgaaaacagtcccagaatgaccccatcgagatgaaattaaacagattagaaatgtaacatactcatttaaattaaataagttgtataagtttgggctgaagaaacctggccttatatcatttcatataaaaaagacgggattttagttgtcctcaggttcaatatgaaccaagtagtattcatgttgttattatatgataacagaaaaattagtggtacttcaggttttatcagtagaagtgtcacagccatagtcaaaatacccctaacatactgcatttcactctgggtaccaaatttaagcaagatattgatggccactaagtgtgtatccagaagaagagatcagaatgatgagtccagaacccctgtcacacagggaataggtgaaggaactagggatatttaactggagcagagaacatctggagagagagcaagattcctgtccttgagaagttgaagccgtctcatgcagaagagggaatgagcttccattatgctgcagagctggcagcaatggatgaaagttgcaggaagttagttttagttctgtagaaggcaagagtagggtagaccaaatcaaatgctcactggggtcaggctgatggagacagtaacactggcgagcaggtgccccagctcggactatactgctgagttctggtctgttgctgccactctacaggtccagggttgttagatcttctgggtttttgttttgctttttgaaataaggaaaataagcttatcttaagtttatttttccttggatatacctagattccatacagtgacaatacaaatacaaaggaagaacatctggatttcatccttgacctcatttacaaagcaaaaagagatgctggattcagatataaatgtttaattttgcagtgtttaagtcagcaaatcttctgttttttaaaaataagccacatatctagatttttctgtgaaagctctcaattaagtgttgggaactaatttcaagattttaaaaaatgttatgcaggcttaacgtgtctgagagccataaatgacctaacgtttcccgttagtctctgaactaggtgatctcagttctctttcaactccagtactctgtaagtttctgtgacctgtagtgtaccattctcaggtggtgatatggtttggatgttttgtcccctccaaatctcatgttcaaagtgtgacattcagtgttagaggtgggcctagtaggaggtatttgggtcatgggggcggatcccttatgtatgactttgtgccatccccatagtaatgagtgagttctcactctggttgtttatgcaagagctggttgtttaaaagagcctggaacttcctcctctctcgcttgctctctctcaccatgtgacacactggctccccttcaccttctgccatgattgtaagcttcgtgaggccctcaccagaagcagatgccagcgccatgcttcctatacagttctatgcagaacagtgagccaaataaacctcttttctttctaaaaa

SEQ ID NO: 432402 - DNA, 4058 bp, Homo sapiens
aagtgcttctcttttccttggcggaggagggagaccacagagccctgggttgtggaagaggtggctgttccctgtcatcagtatgcagcgattgctctttccgccgttgagggccttgaaggggaggcagtatctgccgctcctggctcctagggcagcgcctagagcacagtgtgattgcatcaggcgccctttgaggccagggcaatacagcaccatctctgaagtagctttgcaatctggaaggggtacagtgtcccttccctcaaaggctgctgagcgggtggtgggccgatggctcctggtctgcagtggaacagtggctggagcagttattcttggtggagtaactaggttgacagagtctggcctctcgatggtagattggcatttaataaaggagatgaagccacctacaagccaagaggaatgggaagcagaattccaaagataccagcaatttccagaatttaaaatcttgaatcatgatatgacactgacagaattcaagttcatctggtacatggagtactcacaccgaatgtggggtcgccttgtaggccttgtgtacatcctgcctgctgcctacttttggagaaagggctggctcagccgtggcatgaaaggacgtgttcttgccctctgtggcctcgtctgcttccagggtctgttgggatggtatatggtgaaaagtggactagaagaaaaatcagactcccatgacatccctcgggtcagtcagtaccgccttgctgcccacctgggatcagccctggttctttattgtgccagcttgtggacctcactgtcactgctactccctccgcacaagttgcctgaaacccaccaactcctacagttgagacgatttgctcatggaacagcaggtctggtgttccttacggccctctcaggggcttttgtggcagggctagatgctgggcttgtttataactcctttcccaaaatgggagaatcctggatcccggaggacctctttaccttctcccccatcctgaggaatgtttttgagaatcccaccatggtgcagtttgatcaccggattctgggaatcacttcagtcactgccattacagtgctctacttcctctctcggagaattccccttcctagaaggaccaagatggcagcagtgactctgctggctttggcgtatacacaggtgggcttgggcatcagcacgctgctgatgtatgtcccaactcctctggccgccactcaccagtcaggctccttggctttgctcactggtgctctttggctgatgaatgaactccgaagagtcccaaaatgattcttagaggaccagcctcctgggactgtgactgcttttgagagctcttcagagatcataagaacttgggcttttctacgagatgaccttgacataccaagtggtttccaaatggtcaacttacttaaaaatcttttcctgttttgagatagtcactggatcaagaatgcattaagtgtggttaccctaaatgttcccttttaaatctgcttttcatgttgaaaatcagttttaatgtagagaaagaaatgtctgccatttgctgcttaacaggctttgtgtcaggtttttcagtgttggcaagctcttggttctacgtggatgatttctacgtggatgttctcctgagtccttaattctgcctaaatagaatttctttatgatcttaacttcacttccattaggtgaagattgaaaggataggattgacatacccaaagtagccagctggtcttcagcaaaaaaaaaaaagctaatgtcttctaatatcctgattttcagaaatggggaaattgcagattttgacaagcttaatgtgtatatgtagcaaaatggtttttaagtacttggaaaaggaggtaatcgccaaatagttccatttttttttttttttttgagacagagtttcactcttgttgcccaggctggagtacaatggcgtgatctcagctcactctgcaacctccacttcccaggttcaagcgattctcatgcctcagcctcccgagtagctgggactacaggcacaagtcaccatgcctggctaattttgtatttttagtagagaaggggtttcaccacattggccaggctggtcttgaactcctgacctcaggtaatccgcccatctcggcttcccaaagtgctgagattacaggcatgggccaccacgcccagctagttcctcttttgataaggctgttaacattacaaggtcagagagaggaatggaatcgacagtataaattggttcctgagagggtttcctaacagctttgtaataagaaaaatatggccttgatggtgtagtgcatggacatctacccagataaacaaattgttgactgctgaattaatgtgattttggtctctattgatatttcatagggccctgtcttattcaaccttacttttaaaatcagtgatttggatgaaggcatcagaaacatctgatttgaggatggagcaacccaatattgctaatataatagatgacagtggcaactgaaaacagtcccagaatgaccccatcgagatgaaattaaacagattagaaatgtaacatactcatttaaattaaataagttgtataagtttgggctgaagaaacctggccttatatcatttcatataaaaaagacgggattttagttgtcctcaggttcaatatgaaccaagtagtattcatgttgttattatatgataacagaaaaattagtggtacttcaggttttatcagtagaagtgtcacagccatagtcaaaatacccctaacatactgcatttcactctgggtaccaaatttaagcaagatattgatggccactaagtgtgtatccagaagaagagatcagaatgatgagtccagaacccctgtcacacagggaataggtgaaggaactagggatatttaactggagcagagaacatctggagagagagcaagattcctgtccttgagaagttgaagccgtctcatgcagaagagggaatgagcttccattatgctgcagagctggcagcaatggatgaaagttgcaggaagttagttttagttctgtagaaggcaagagtagggtagaccaaatcaaatgctcactggggtcaggctgatggagacagtaacactggcgagcaggtgccccagctcggactatactgctgagttctggtctgttgctgccactctacaggtccagggttgttagatcttctgggtttttgttttgctttttgaaataaggaaaataagcttatcttaagtttatttttccttggatatacctagattccatacagtgacaatacaaatacaaaggaagaacatctggatttcatccttgacctcatttacaaagcaaaaagagatgctggattcagatataaatgtttaattttgcagtgtttaagtcagcaaatcttctgttttttaaaaataagccacatatctagatttttctgtgaaagctctcaattaagtgttgggaactaatttcaagattttaaaaaatgttatgcaggcttaacgtgtctgagagccataaatgacctaacgtttcccgttagtctctgaactaggtgatctcagttctctttcaactccagtactctgtaagtttctgtgacctgtagtgtaccattctcaggtggtgatatggtttggatgttttgtcccctccaaatctcatgttcaaagtgtgacattcagtgttagaggtgggcctagtaggaggtatttgggtcatgggggcggatcccttatgtatgactttgtgccatccccatagtaatgagtgagttctcactctggttgtttatgcaagagctggttgtttaaaagagcctggaacttcctcctctctcgcttgctctctctcaccatgtgacacactggctccccttcaccttctgccatgattgtaagcttcgtgaggccctcaccagaagcagatgccagcgccatgcttcctatacagttctatgcagaacagtgagccaaataaacctcttttctttctaaaaa

SEQ ID NO: 432403 - DNA, 4004 bp, Homo sapiens
aagtgcttctcttttccttggcggaggagggagaccacagagccctgggttgtggaagaggtggctgttccctgtcatcagtatgcagcgattgctctttccgccgttgagggccttgaaggggaggcagtatctgccgctcctggctcctagggcagcgcctagagcacagtgtgattgcatcaggcgccctttgaggccagggcaatacagcaccatctctgaagtagctttgcaatctggaaggggtacagtgtcccttccctcaaaggctgctgagcgggtggtgggccgatggctcctggtctgcagtggaacagtggctggagcagttattcttggtggagtaactaggttgacagagtctggcctctcgatggtagattggcatttaataaaggagatgaagccacctacaagccaagaggaatgggaagcagaattccaaagataccagcaatttccagaatttaaaatcttgaatcatgatatgacactgacagaattcaagttcatctggtacatggagtactcacaccgaatgtggggtcgccttgtaggccttgtgtacatcctgcctgctgcctacttttggagaaagggctggctcagccgtggcatgaaaggacgtgttcttgccctctgtggcctcgtctgcttccagggtctgttgggatggtatatggtgaaaagtggactagaagaaaaatcagactcccatgacatccctcgggtcagtcagtaccgccttgctgcccacctgggatcagccctggttctttattgtgccagcttgtggacctcactgtcactgctactccctccgcacaagttgcctgaaacccaccaactcctacagttgagacgatttgctcatggaacagcaggtctggtgttccttacggccctctcaggggcttttgtggcagggctagatgctgggcttgtttataactcctttcccaaaatgggagaatcctggatcccggaggacctctttaccttctcccccatcctgaggaatgtttttgagaatcccaccatggtgcagtttgatcaccggattctgggaatcacttcagtcactgccattacagtgctctacttcctctctcggagaattccccttcctagaaggaccaagatggcagcagtgactctgctggctttggcgtatacacaggtgggcttgggcatcagcacgctgctgatgtatgtcccaactcctctggccgccactcaccagtcaggctccttggctttgctcactggtgctctttggctgatgaatgaactccgaagagtcccaaaatgattcttagaggaccagcctcctgggactgtgactgcttttgagagctcttcagagatcataagaacttgggcttttctacgagatgaccttgacataccaagtggtttccaaatggtcaacttacttaaaaatcttttcctgttttgagatagtcactggatcaagaatgcattaagtgtggttaccctaaatgttcccttttaaatctgcttttcatgttgaaaatcagttttaatgtagagaaagaaatgtctgccatttgctgcttaacaggctttgtgtcaggtttttcagtgttggcaagctcttggttctacgtggatgatttctacgtggatgttctcctgagtccttaattctgcctaaatagaatttctttatgatcttaacttcacttccattaggtgaagattgaaaggataggattgacatacccaaagtagccagctggtcttcagcaaaaaaaaaaaagctaatgtcttctaatatcctgattttcagaaatggggaaattgcagattttgacaagcttaatgtgtatatgtagcaaaatggtttttaagtacttggaaaaggaggtaatcgccaaatagttccatttttttttttttttttgagacagagtttcactcttgttgcccaggctggagtacaatggcgtgatctcagctcactctgcaacctccacttcccaggttcaagcgattctcatgcctcagcctcccgagtagctgggactacaggcacaagtcaccatgcctggctaattttgtatttttagtagagaaggggtttcaccacattggccaggctggtcttgaactcctgacctcaggtaatccgcccatctcggcttcccaaagtgctgagattacaggcatgggccaccacgcccagctagttcctcttttgataaggctgttaacattacaaggtcagagagaggaatggaatcgacagtataaattggttcctgagagggtttcctaacagctttgtaataagaaaaatatggccttgatggtgtagtgcatggacatctacccagataaacaaattgttgactgctgaattaatgtgattttggtctctattgatatttcatagggccctgtcttattcaaccttacttttaaaatcagtgatttggatgaaggcatcagaaacatctgatttgaggatggagcaacccaatattgctaatataatagatgacagtggcaactgaaaacagtcccagaatgaccccatcgagatgaaattaaacagattagaaatgtaacatactcatttaaattaaataagttgtataagtttgggctgaagaaacctggccttatatcatttcatataaaaaagacgggattttagttgtcctcaggttcaatatgaaccaagtagtattcatgttgttattatatgataacagaaaaattagtggtacttcaggttttatcagtagaagtgtcacagccataatattgatggccactaagtgtgtatccagaagaagagatcagaatgatgagtccagaacccctgtcacacagggaataggtgaaggaactagggatatttaactggagcagagaacatctggagagagagcaagattcctgtccttgagaagttgaagccgtctcatgcagaagagggaatgagcttccattatgctgcagagctggcagcaatggatgaaagttgcaggaagttagttttagttctgtagaaggcaagagtagggtagaccaaatcaaatgctcactggggtcaggctgatggagacagtaacactggcgagcaggtgccccagctcggactatactgctgagttctggtctgttgctgccactctacaggtccagggttgttagatcttctgggtttttgttttgctttttgaaataaggaaaataagcttatcttaagtttatttttccttggatatacctagattccatacagtgacaatacaaatacaaaggaagaacatctggatttcatccttgacctcatttacaaagcaaaaagagatgctggattcagatataaatgtttaattttgcagtgtttaagtcagcaaatcttctgttttttaaaaataagccacatatctagatttttctgtgaaagctctcaattaagtgttgggaactaatttcaagattttaaaaaatgttatgcaggcttaacgtgtctgagagccataaatgacctaacgtttcccgttagtctctgaactaggtgatctcagttctctttcaactccagtactctgtaagtttctgtgacctgtagtgtaccattctcaggtggtgatatggtttggatgttttgtcccctccaaatctcatgttcaaagtgtgacattcagtgttagaggtgggcctagtaggaggtatttgggtcatgggggcggatcccttatgtatgactttgtgccatccccatagtaatgagtgagttctcactctggttgtttatgcaagagctggttgtttaaaagagcctggaacttcctcctctctcgcttgctctctctcaccatgtgacacactggctccccttcaccttctgccatgattgtaagcttcgtgaggccctcaccagaagcagatgccagcgccatgcttcctatacagttctatgcagaacagtgagccaaataaacctcttttctttctaaaaa

SEQ ID NO: 432404 - DNA, 4211 bp, Homo sapiens
aagtgcttctcttttccttggcggaggagggagaccacagagccctgggttgtggaagaggtggctgttccctgtcatcagtatgcagcgattgctctttccgccgttgagggccttgaaggggaggcagtatctgccgctcctggctcctagggcagcgcctagagcacagtgtgattgcatcaggcgccctttgaggccagggcaatacagcaccatctctgaagtagctttgcaatctggaaggggtacagtgtcccttccctcaaaggctgctgagcgggtggtgggccgatggctcctggtctgcagtggaacagtggctggagcagttattcttggtggagtaactaggttgacagagtctggcctctcgatggtagattggcatttaataaaggagatgaagccacctacaagccaagaggaatgggaagcagaattccaaagataccagcaatttccagaatttaaaatcttgaatcatgatatgacactgacagaattcaagttcatctggtacatggagtactcacaccgaatgtggggtcgccttgtaggccttgtgtacatcctgcctgctgcctacttttggagaaagggctggctcagccgtggcatgaaaggacgtgttcttgccctctgtggcctcgtctgcttccagggtctgttgggatggtatatggtgaaaagtggactagaagaaaaatcagactcccatgacatccctcgggtcagtcagtaccgccttgctgcccacctgggatcagccctggttctttattgtgccagcttgtggacctcactgtcactgctactccctccgcacaagttgcctgaaacccaccaactcctacagttgagacgatttgctcatggaacagcaggtctggtgttccttacggccctctcaggggcttttgtggcagggctagatgctgggcttgtttataactcctttcccaaaatgggagaatcctggatcccggaggacctctttaccttctcccccatcctgaggaatgtttttgagaatcccaccatggtgcagtttgatcaccggattctgggaatcacttcagtcactgccattacagtgctctacttcctctctcggagaattccccttcctagaaggaccaagatggcagcagtgactctgctggctttggcgtatacacaggtgggcttgggcatcagcacgctgctgatgtatgtcccaactcctctggccgccactcaccagtcaggctccttggctttgctcactggtgctctttggctgatgaatgaactccgaagagtcccaaaatgattcttagaggaccagcctcctgggactgtgactgcttttgagagctcttcagagatcataagaacttgggcttttctacgagatgaccttgacataccaagtggtttccaaatggtcaacttacttaaaaatcttttcctgttttgagatagtcactggatcaagaatgcattaagtgtggttaccctaaatgttcccttttaaatctgcttttcatgttgaaaatcagttttaatgtagagaaagaaatgtctgccatttgctgcttaacaggctttgtgtcaggtttttcagtgttggcaagctcttggttctacgtggatgatttctacgtggatgttctcctgagtccttaattctgcctaaatagaatttctttatgatcttaacttcacttccattaggtgaagattgaaaggataggattgacatacccaaagtagccagctggtcttcagcaaaaaaaaaaaagctaatgtcttctaatatcctgattttcagaaatggggaaattgcagattttgacaagcttaatgtgtatatgtagcaaaatggtttttaagtacttggaaaaggaggtaatcgccaaatagttccatttttttttttttttttgagacagagtttcactcttgttgcccaggctggagtacaatggcgtgatctcagctcactctgcaacctccacttcccaggttcaagcgattctcatgcctcagcctcccgagtagctgggactacaggcacaagtcaccatgcctggctaattttgtatttttagtagagaaggggtttcaccacattggccaggctggtcttgaactcctgacctcaggtaatccgcccatctcggcttcccaaagtgctgagattacaggcatgggccaccacgcccagctagttcctcttttgataaggctgttaacattacaaggtcagagagaggaatggaatcgacagtataaattggttcctgagagggtttcctaacagctttgtaataagaaaaatatggccttgatggtgtagtgcatggacatctacccagataaacaaattgttgactgctgaattaatgtgattttggtctctattgatatttcatagggccctgtcttattcaaccttacttttaaaatcagtgatttggatgaaggcatcagaaacatctgatttgaggatggagcaacccaatattgctaatataatagatgacagtggcaactgaaaacagtcccagaatgaccccatcgagatgaaattaaacagattagaaatgtaacatactcatttaaattaaataagttgtataagtttgggctgaagaaacctggccttatatcatttcatataaaaaagacgggattttagttgtcctcaggttcaatatgaaccaagtagtattcatgttgttattatatgataacagaaaaattagtggtacttcaggttttatcagtagaagtgtcacagccatagtcaaaatacccctaacatactgcatttcactctgggtaccaaatttaagcaagatattgatggccactaagtgtgtatccagaagaagagatcagaatgatgagtccagaacccctgtcacacagggaataggtgaaggaactagggatatttaactggagcagagaacatctggagagagagcaagattcctgtccttgagaagttgaagccgtctcatgcagaagagggaatgagcttccattatgctgcagagctggcagcaatggatgaaagttgcaggaagttagttttagttctgtagaaggcaagagtagggtagaccaaatcaaatgctcactggggtcaggctgatggagacagtaacactggcgagcaggtgccccagctcggactatactgctgagttctggtctgttgctgccactctacaggtccagggttgttagatcttctgggtttttgttttgctttttgaaataaggaaaataagcttatcttaagtttatttttccttggatatacctagattccatacagtgacaatacaaatacaaaggaagaacatctggatttcatccttgacctcatttacaaagcaaaaagagatgctggattcagatataaatgtttaattttgcagtgtttaagtcagcaaatcttctgttttttaaaaataagccacatatctagatttttctgtgaaagctctcaattaagtgttgggaactaatttcaagattttaaaaaatgttatgcaggcttaacgtgtctgagagccataaatgacctaacgtttcccgttagtctctgaactaggtgatctcagttctctttcaactccagtactctgtaagtttctgtgacctgtagtgtaccattctcaggtggtgatatggtttggatgttttgtcccctccaaatctcatgttcaaagtgtgacattcagtgttagaggtgggcctagtaggaggtatttgggtcatgggggcggatcccttatgtatgactttgtgccatccccatagtaatgagtgagttctcactctggttgtttatgcaagagctggttgtttaaaagagcctggaacttcctcctctctcgcttgctctctctcaccatgtgacacactggctccccttcaccttctgccatgattgtaagcttcgtgaggccctcaccagaagcagatgccagcgccatgcttcctatacagttctatgcagaacagtgagccaaataaacctcttttctttctaaaaaaaaaaaaaaaaaaaatgtgggcgcccggcccagaaaatttaaacatcgtgggcgggccaagaagaacaggcacgccagaaccggcgaaggtgggttccaaaaccgggccgggtgaacaagggctggttggttacggctataaccccggcgggg

SEQ ID NO: 432405 - DNA, 1957 bp, Homo sapiens
aagtgcttctcttttccttggcggaggagggagaccacagagccctgggttgtggaagaggtggctgttccctgtcatcagtatgcagcgattgctctttccgccgttgagggccttgaaggggaggcagtatctgccgctcctggctcctagggcagcgcctagagcacagtgtgattgcatcaggcgccctttgaggccagggcaatacagcaccatctctgaagtagctttgcaatctggaaggggtacagtgtcccttccctcaaaggctgctgagcgggtggtgggccgatggctcctggtctgcagtggaacagtggctggagcagttattcttggtggagtaactaggttgacagagtctggcctctcgatggtagattggcatttaataaaggagatgaagccacctacaagccaagaggaatgggaagcagaattccaaagataccagcaatttccagaatttaaaatcttgaatcatgatatgacactgacagaattcaagttcatctggtacatggagtactcacaccgaatgtggggtcgccttgtaggccttgtgtacatcctgcctgctgcctacttttggagaaagggctggctcagccgtggcatgaaaggacgtgttcttgccctctgtggcctcgtctgcttccagggtctgttgggatggtatatggtgaaaagtggactagaagaaaaatcagactcccatgacatccctcgggtcagtcagtaccgccttgctgcccacctgggatcagccctggttctttattgtgccagcttgtggacctcactgtcactgctactccctccgcacaagttgcctgaaacccaccaactcctacagttgagacgatttgctcatggaacagcaggtctggtgttccttacggccctctcaggggcttttgtggcagggctagatgctgggcttgtttataactcctttcccaaaatgggagaatcctggatcccggaggacctctttaccttctcccccatcctgaggaatgtttttgagaatcccaccatggtgcagtttgatcaccggattctgggaatcacttcagtcactgccattacagtgctctacttcctctctcggagaattccccttcctagaaggaccaagatggcagcagtgactctgctggctttggcgtatacacaggtgggcttgggcatcagcacgctgctgatgtatgtcccaactcctctggccgccactcaccagtcaggctccttggctttgctcactggtgctctttggctgatgaatgaactccgaagagtcccaaaatgattcttagaggaccagcctcctgggactgtgactgcttttgagagctcttcagagatcataagaacttgggcttttctacgagatgaccttgacataccaagtggtttccaaatggtcaacttacttaaaaatcttttcctgttttgagatagtcactggatcaagaatgcattaagtgtggttaccctaaatgttcccttttaaatctgcttttcatgttgaaaatcagttttaatgtagagaaagaaatgtctgccatttgctgcttaacaggctttgtgtcaggtttttcagtgttggcaagctcttggttctacgtggatgatttctacgtggatgttctcctgagtccttaattctgcctaaatagaatttctttatgatcttaacttcacttccattaggtgaagattgaaaggataggattgacatacccaaagtagccagctggtcttcagcaaaaaaaaaaaagctaatgtcttctaatatcctgattttcagaaatggggaaattgcagattttgacaagcttaatgtgtatatgtagcaaaatggtttttaagtacttggaaaaggaggttgcagtgagccgagatcgtgtcattgcactgcagcctgggcaacaagagcgaaactgtctca

SEQ ID NO: 432406 - DNA, 3901 bp, Homo sapiens
aagtgcttctcttttccttggcggaggagggagaccacagagccctgggttgtggaagaggtggctgttccctgtcatcagtatgcagcgattgctctttccgccgttgagggccttgaaggggaggcagtatctgccgctcctggctcctagggcagcgcctagagcacagcagttattcttggtggagtaactaggttgacagagtctggcctctcgatggtagattggcatttaataaaggagatgaagccacctacaagccaagaggaatgggaagcagaattccaaagataccagcaatttccagaatttaaaatcttgaatcatgatatgacactgacagaattcaagttcatctggtacatggagtactcacaccgaatgtggggtcgccttgtaggccttgtgtacatcctgcctgctgcctacttttggagaaagggctggctcagccgtggcatgaaaggacgtgttcttgccctctgtggcctcgtctgcttccagggtctgttgggatggtatatggtgaaaagtggactagaagaaaaatcagactcccatgacatccctcgggtcagtcagtaccgccttgctgcccacctgggatcagccctggttctttattgtgccagcttgtggacctcactgtcactgctactccctccgcacaagttgcctgaaacccaccaactcctacagttgagacgatttgctcatggaacagcaggtctggtgttccttacggccctctcaggggcttttgtggcagggctagatgctgggcttgtttataactcctttcccaaaatgggagaatcctggatcccggaggacctctttaccttctcccccatcctgaggaatgtttttgagaatcccaccatggtgcagtttgatcaccggattctgggaatcacttcagtcactgccattacagtgctctacttcctctctcggagaattccccttcctagaaggaccaagatggcagcagtgactctgctggctttggcgtatacacaggtgggcttgggcatcagcacgctgctgatgtatgtcccaactcctctggccgccactcaccagtcaggctccttggctttgctcactggtgctctttggctgatgaatgaactccgaagagtcccaaaatgattcttagaggaccagcctcctgggactgtgactgcttttgagagctcttcagagatcataagaacttgggcttttctacgagatgaccttgacataccaagtggtttccaaatggtcaacttacttaaaaatcttttcctgttttgagatagtcactggatcaagaatgcattaagtgtggttaccctaaatgttcccttttaaatctgcttttcatgttgaaaatcagttttaatgtagagaaagaaatgtctgccatttgctgcttaacaggctttgtgtcaggtttttcagtgttggcaagctcttggttctacgtggatgatttctacgtggatgttctcctgagtccttaattctgcctaaatagaatttctttatgatcttaacttcacttccattaggtgaagattgaaaggataggattgacatacccaaagtagccagctggtcttcagcaaaaaaaaaaaagctaatgtcttctaatatcctgattttcagaaatggggaaattgcagattttgacaagcttaatgtgtatatgtagcaaaatggtttttaagtacttggaaaaggaggtaatcgccaaatagttccatttttttttttttttttgagacagagtttcactcttgttgcccaggctggagtacaatggcgtgatctcagctcactctgcaacctccacttcccaggttcaagcgattctcatgcctcagcctcccgagtagctgggactacaggcacaagtcaccatgcctggctaattttgtatttttagtagagaaggggtttcaccacattggccaggctggtcttgaactcctgacctcaggtaatccgcccatctcggcttcccaaagtgctgagattacaggcatgggccaccacgcccagctagttcctcttttgataaggctgttaacattacaaggtcagagagaggaatggaatcgacagtataaattggttcctgagagggtttcctaacagctttgtaataagaaaaatatggccttgatggtgtagtgcatggacatctacccagataaacaaattgttgactgctgaattaatgtgattttggtctctattgatatttcatagggccctgtcttattcaaccttacttttaaaatcagtgatttggatgaaggcatcagaaacatctgatttgaggatggagcaacccaatattgctaatataatagatgacagtggcaactgaaaacagtcccagaatgaccccatcgagatgaaattaaacagattagaaatgtaacatactcatttaaattaaataagttgtataagtttgggctgaagaaacctggccttatatcatttcatataaaaaagacgggattttagttgtcctcaggttcaatatgaaccaagtagtattcatgttgttattatatgataacagaaaaattagtggtacttcaggttttatcagtagaagtgtcacagccatagtcaaaatacccctaacatactgcatttcactctgggtaccaaatttaagcaagatattgatggccactaagtgtgtatccagaagaagagatcagaatgatgagtccagaacccctgtcacacagggaataggtgaaggaactagggatatttaactggagcagagaacatctggagagagagcaagattcctgtccttgagaagttgaagccgtctcatgcagaagagggaatgagcttccattatgctgcagagctggcagcaatggatgaaagttgcaggaagttagttttagttctgtagaaggcaagagtagggtagaccaaatcaaatgctcactggggtcaggctgatggagacagtaacactggcgagcaggtgccccagctcggactatactgctgagttctggtctgttgctgccactctacaggtccagggttgttagatcttctgggtttttgttttgctttttgaaataaggaaaataagcttatcttaagtttatttttccttggatatacctagattccatacagtgacaatacaaatacaaaggaagaacatctggatttcatccttgacctcatttacaaagcaaaaagagatgctggattcagatataaatgtttaattttgcagtgtttaagtcagcaaatcttctgttttttaaaaataagccacatatctagatttttctgtgaaagctctcaattaagtgttgggaactaatttcaagattttaaaaaatgttatgcaggcttaacgtgtctgagagccataaatgacctaacgtttcccgttagtctctgaactaggtgatctcagttctctttcaactccagtactctgtaagtttctgtgacctgtagtgtaccattctcaggtggtgatatggtttggatgttttgtcccctccaaatctcatgttcaaagtgtgacattcagtgttagaggtgggcctagtaggaggtatttgggtcatgggggcggatcccttatgtatgactttgtgccatccccatagtaatgagtgagttctcactctggttgtttatgcaagagctggttgtttaaaagagcctggaacttcctcctctctcgcttgctctctctcaccatgtgacacactggctccccttcaccttctgccatgattgtaagcttcgtgaggccctcaccagaagcagatgccagcgccatgcttcctatacagttctatgcagaacagtgagccaaataaacctcttttctttctaaaaa

SEQ ID NO: 432407 - DNA, 3587 bp, Homo sapiens
aagtgcttctcttttccttggcggaggagggagaccacagagccctgggttgtggaagaggtggctgttccctgtcatcagtatgcagcgattgctctttccgccgttgagggccttgaaggggaggcagtatctgccgctcctggctcctagggcagcgcctagagcacagtgtgattgcatcaggcgccctttgaggccagggcaatacagcaccatctctgaagtagctttgcaatctggaaggggtacagtgtcccttccctcaaaggctgctgagcgggtggtgggccgatggcccctggttctttattgtgccagcttgtggacctcactgtcactgctactccctccgcacaagttgcctgaaacccaccaactcctacagttgagacgatttgctcatggaacagcaggtctggtgttccttacggccctctcaggggcttttgtggcagggctagatgctgggcttgtttataactcctttcccaaaatgggagaatcctggatcccggaggacctctttaccttctcccccatcctgaggaatgtttttgagaatcccaccatggtgcagtttgatcaccggattctgggaatcacttcagtcactgccattacagtgctctacttcctctctcggagaattccccttcctagaaggaccaagatggcagcagtgactctgctggctttggcgtatacacaggtgggcttgggcatcagcacgctgctgatgtatgtcccaactcctctggccgccactcaccagtcaggctccttggctttgctcactggtgctctttggctgatgaatgaactccgaagagtcccaaaatgattcttagaggaccagcctcctgggactgtgactgcttttgagagctcttcagagatcataagaacttgggcttttctacgagatgaccttgacataccaagtggtttccaaatggtcaacttacttaaaaatcttttcctgttttgagatagtcactggatcaagaatgcattaagtgtggttaccctaaatgttcccttttaaatctgcttttcatgttgaaaatcagttttaatgtagagaaagaaatgtctgccatttgctgcttaacaggctttgtgtcaggtttttcagtgttggcaagctcttggttctacgtggatgatttctacgtggatgttctcctgagtccttaattctgcctaaatagaatttctttatgatcttaacttcacttccattaggtgaagattgaaaggataggattgacatacccaaagtagccagctggtcttcagcaaaaaaaaaaaagctaatgtcttctaatatcctgattttcagaaatggggaaattgcagattttgacaagcttaatgtgtatatgtagcaaaatggtttttaagtacttggaaaaggaggtaatcgccaaatagttccatttttttttttttttttgagacagagtttcactcttgttgcccaggctggagtacaatggcgtgatctcagctcactctgcaacctccacttcccaggttcaagcgattctcatgcctcagcctcccgagtagctgggactacaggcacaagtcaccatgcctggctaattttgtatttttagtagagaaggggtttcaccacattggccaggctggtcttgaactcctgacctcaggtaatccgcccatctcggcttcccaaagtgctgagattacaggcatgggccaccacgcccagctagttcctcttttgataaggctgttaacattacaaggtcagagagaggaatggaatcgacagtataaattggttcctgagagggtttcctaacagctttgtaataagaaaaatatggccttgatggtgtagtgcatggacatctacccagataaacaaattgttgactgctgaattaatgtgattttggtctctattgatatttcatagggccctgtcttattcaaccttacttttaaaatcagtgatttggatgaaggcatcagaaacatctgatttgaggatggagcaacccaatattgctaatataatagatgacagtggcaactgaaaacagtcccagaatgaccccatcgagatgaaattaaacagattagaaatgtaacatactcatttaaattaaataagttgtataagtttgggctgaagaaacctggccttatatcatttcatataaaaaagacgggattttagttgtcctcaggttcaatatgaaccaagtagtattcatgttgttattatatgataacagaaaaattagtggtacttcaggttttatcagtagaagtgtcacagccatagtcaaaatacccctaacatactgcatttcactctgggtaccaaatttaagcaagatattgatggccactaagtgtgtatccagaagaagagatcagaatgatgagtccagaacccctgtcacacagggaataggtgaaggaactagggatatttaactggagcagagaacatctggagagagagcaagattcctgtccttgagaagttgaagccgtctcatgcagaagagggaatgagcttccattatgctgcagagctggcagcaatggatgaaagttgcaggaagttagttttagttctgtagaaggcaagagtagggtagaccaaatcaaatgctcactggggtcaggctgatggagacagtaacactggcgagcaggtgccccagctcggactatactgctgagttctggtctgttgctgccactctacaggtccagggttgttagatcttctgggtttttgttttgctttttgaaataaggaaaataagcttatcttaagtttatttttccttggatatacctagattccatacagtgacaatacaaatacaaaggaagaacatctggatttcatccttgacctcatttacaaagcaaaaagagatgctggattcagatataaatgtttaattttgcagtgtttaagtcagcaaatcttctgttttttaaaaataagccacatatctagatttttctgtgaaagctctcaattaagtgttgggaactaatttcaagattttaaaaaatgttatgcaggcttaacgtgtctgagagccataaatgacctaacgtttcccgttagtctctgaactaggtgatctcagttctctttcaactccagtactctgtaagtttctgtgacctgtagtgtaccattctcaggtggtgatatggtttggatgttttgtcccctccaaatctcatgttcaaagtgtgacattcagtgttagaggtgggcctagtaggaggtatttgggtcatgggggcggatcccttatgtatgactttgtgccatccccatagtaatgagtgagttctcactctggttgtttatgcaagagctggttgtttaaaagagcctggaacttcctcctctctcgcttgctctctctcaccatgtgacacactggctccccttcaccttctgccatgattgtaagcttcgtgaggccctcaccagaagcagatgccagcgccatgcttcctatacagttctatgcagaacagtgagccaaataaacctcttttctttctaaaaa

SEQ ID NO: 432408 - DNA, 1478 bp, Homo sapiens
aagtgcttctcttttccttggcggaggagggagaccacagagccctgggttgtggaagaggtggctgttccctgtcatcagtatgcagcgattgctctttccgccgttgagggccttgaaggggaggcagtatctgccgctcctggctcctagggcagcgcctagagcacagtgtgattgcatcaggcgccctttgaggccagggcaatacagcaccatctctgaagtagctttgcaatctggaaggggtacagtgtcccttccctcaaaggctgctgagcgggtggtgggccgatggctcctggtctgcagtggaacagtggctggagcagttattcttggtggagtaactaggttgacagagtctggcctctcgatggtagattggcatttaataaaggagatgaagccacctacaagccaagaggaatgggaagcagaattccaaagataccagcaatttccagaatttaaaatcttgaatcatgatatgacactgacagaattcaagttcatctggtacatggagtactcacaccgaatgtggggtcgccttgtaggccttgtgtacatcctgcctgctgcctacttttggagaaagggctggctcagccgtggcatgaaaggacgtgttcttgccctctgtggcctcgtctgcttccagggtctgttgggatggtatatggtgaaaagtggactagaagaaaaatcagactcccatgacatccctcgggtcagtcagtaccgccttgctgcccacctgggatcagccctggttctttattgtgccagcttgtggacctcactgtcactgctactccctccgcacaagttgcctgaaacccaccaactcctacagttgagacgatttgctcatggaacagcaggtctggtgttccttacggccctctcaggggcttttgtggcagggctagatgctgggcttgtttataactcctttcccaaaatgggagaatcctggatcccggaggacctctttaccttctcccccatcctgaggaatgtttttgagaatcccaccatggtgcagtttgatcaccggattctgggaatcacttcagtcactgccattacagtgctctacttcctctctcggagaattccccttcctagaaggaccaagatggcagcagtgactctgctggctttggcgtatacacaggtataaaccacttctttttgttctgacagtatccccaatacaaagttaaaaaaggggccgggcacagtggctcatggctgtaatcccagcactttgggaggcctaggtgggcagatcacttgagccaggaattcaagactagcctgggcaacatggcaaaaccccatctctacaaaaaaaatacaaaaattagatgggcatgttggtgtgtgcctgtagtccaaactacttgggaggctgagatgggaggatcacctgagccagggaggttgaggctgcagtgagtcaagatcgc

SEQ ID NO: 432409 - DNA, 3174 bp, Homo sapiens
cagaagaggatggtggaagagacagcctgtggaggagtgatcaggctgggactgcagggaggttctctgtgactggtacaggaaagtacttcatggttgctgagtggttctagaggagatacatgtaaggtgagttagaaacctggcacttctatctaatgtgatagactctttcttccctgcagggaatcacttcagtcactgccattacagtgctctacttcctctctcggagaattccccttcctagaaggaccaagatggcagcagtgactctgctggctttggcgtatacacaggtgggcttgggcatcagcacgctgctgatgtatgtcccaactcctctggccgccactcaccagtcaggctccttggctttgctcactggtgctctttggctgatgaatgaactccgaagagtcccaaaatgattcttagaggaccagcctcctgggactgtgactgcttttgagagctcttcagagatcataagaacttgggcttttctacgagatgaccttgacataccaagtggtttccaaatggtcaacttacttaaaaatcttttcctgttttgagatagtcactggatcaagaatgcattaagtgtggttaccctaaatgttcccttttaaatctgcttttcatgttgaaaatcagttttaatgtagagaaagaaatgtctgccatttgctgcttaacaggctttgtgtcaggtttttcagtgttggcaagctcttggttctacgtggatgatttctacgtggatgttctcctgagtccttaattctgcctaaatagaatttctttatgatcttaacttcacttccattaggtgaagattgaaaggataggattgacatacccaaagtagccagctggtcttcagcaaaaaaaaaaaagctaatgtcttctaatatcctgattttcagaaatggggaaattgcagattttgacaagcttaatgtgtatatgtagcaaaatggtttttaagtacttggaaaaggaggtaatcgccaaatagttccatttttttttttttttttgagacagagtttcactcttgttgcccaggctggagtacaatggcgtgatctcagctcactctgcaacctccacttcccaggttcaagcgattctcatgcctcagcctcccgagtagctgggactacaggcacaagtcaccatgcctggctaattttgtatttttagtagagaaggggtttcaccacattggccaggctggtcttgaactcctgacctcaggtaatccgcccatctcggcttcccaaagtgctgagattacaggcatgggccaccacgcccagctagttcctcttttgataaggctgttaacattacaaggtcagagagaggaatggaatcgacagtataaattggttcctgagagggtttcctaacagctttgtaataagaaaaatatggccttgatggtgtagtgcatggacatctacccagataaacaaattgttgactgctgaattaatgtgattttggtctctattgatatttcatagggccctgtcttattcaaccttacttttaaaatcagtgatttggatgaaggcatcagaaacatctgatttgaggatggagcaacccaatattgctaatataatagatgacagtggcaactgaaaacagtcccagaatgaccccatcgagatgaaattaaacagattagaaatgtaacatactcatttaaattaaataagttgtataagtttgggctgaagaaacctggccttatatcatttcatataaaaaagacgggattttagttgtcctcaggttcaatatgaaccaagtagtattcatgttgttattatatgataacagaaaaattagtggtacttcaggttttatcagtagaagtgtcacagccatagtcaaaatacccctaacatactgcatttcactctgggtaccaaatttaagcaagatattgatggccactaagtgtgtatccagaagaagagatcagaatgatgagtccagaacccctgtcacacagggaataggtgaaggaactagggatatttaactggagcagagaacatctggagagagagcaagattcctgtccttgagaagttgaagccgtctcatgcagaagagggaatgagcttccattatgctgcagagctggcagcaatggatgaaagttgcaggaagttagttttagttctgtagaaggcaagagtagggtagaccaaatcaaatgctcactggggtcaggctgatggagacagtaacactggcgagcaggtgccccagctcggactatactgctgagttctggtctgttgctgccactctacaggtccagggttgttagatcttctgggtttttgttttgctttttgaaataaggaaaataagcttatcttaagtttatttttccttggatatacctagattccatacagtgacaatacaaatacaaaggaagaacatctggatttcatccttgacctcatttacaaagcaaaaagagatgctggattcagatataaatgtttaattttgcagtgtttaagtcagcaaatcttctgttttttaaaaataagccacatatctagatttttctgtgaaagctctcaattaagtgttgggaactaatttcaagattttaaaaaatgttatgcaggcttaacgtgtctgagagccataaatgacctaacgtttcccgttagtctctgaactaggtgatctcagttctctttcaactccagtactctgtaagtttctgtgacctgtagtgtaccattctcaggtggtgatatggtttggatgttttgtcccctccaaatctcatgttcaaagtgtgacattcagtgttagaggtgggcctagtaggaggtatttgggtcatgggggcggatcccttatgtatgactttgtgccatccccatagtaatgagtgagttctcactctggttgtttatgcaagagctggttgtttaaaagagcctggaacttcctcctctctcgcttgctctctctcaccatgtgacacactggctccccttcaccttctgccatgattgtaagcttcgtgaggccctcaccagaagcagatgccagcgccatgcttcctatacagttctatgcagaacagtgagccaaataaacctcttttctttctaaaaa

SEQ ID NO: 432410 - DNA, 1016 bp, Homo sapiens
aagtgcttctcttttccttggcggaggagggagaccacagagccctgggttgtggaagaggtggctgttccctgtcatcagtatgcagcgattgctctttccgccgttgagggccttgaaggggaggcagtatctgccgctcctggctcctagggcagcgcctagagcacagtgtgattgcatcaggcgccctttgaggccagggcaatacagcaccatctctgaagtagctttgcaatctggaaggggtacagtgtcccttccctcaaaggctgctgagcgggtggtgggccgatggctcctggtctgcagtggaacagtggctggagcagttattcttggtggagtaactaggttgacagagtctggcctctcgatggtagattggcatttaataaaggagatgaagccacctacaagccaagaggaatgggaagcagaattccaaagataccagcaatttccagaatttaaaatcttgaatcatgatatgacactgacagaattcaagttcatctggtacatggagtactcacaccgaatgtggggtcgccttgtaggccttgtgtacatcctgcctgctgcctacttttggagaaagggctggctcagccgtggcatgaaaggacgtgttcttgccctctgtggcctcgtctgcttccagggtctgttgggatggtatatggtgaaaagtggactagaagaaaaatcagactcccatgacatccctcgggtcagtcagtaccgccttgctgcccacctgggatcagccctggttctttattgtgccagcttgtggacctcactgtcactgctactccctccgcacaagttgcctgaaacccaccaactcctacagttgagacgatttgctcatggaacagcaggtctggtgttccttacggccctctcaggggcttttgtggcagggctagatgctgggcaaagtcatacttcccaatcacacacttgaaaatgttcagaaaaagtttctagtgcacacaagtctggtttcg

SEQ ID NO: 432411 - DNA, 1945 bp, Homo sapiens
actgcattctagcctgggagacagagtgagagcctgtctcttaaaaaattaaatttaatttaaaatgctgagattacaggcatgggccaccacgcccagctagttcctcttttgataaggctgttaacattacaaggtcagagagaggaatggaatcgacagtataaattggttcctgagagggtttcctaacagctttgtaataagaaaaatatggccttgatggtgtagtgcatggacatctacccagataaacaaattgttgactgctgaattaatgtgattttggtctctattgatatttcatagggccctgtcttattcaaccttacttttaaaatcagtgatttggatgaaggcatcagaaacatctgatttgaggatggagcaacccaatattgctaatataatagatgacagtggcaactgaaaacagtcccagaatgaccccatcgagatgaaattaaacagattagaaatgtaacatactcatttaaattaaataagttgtataagtttgggctgaagaaacctggccttatatcatttcatataaaaaagacgggattttagttgtcctcaggttcaatatgaaccaagtagtattcatgttgttattatatgataacagaaaaattagtggtacttcaggttttatcagtagaagtgtcacagccatagtcaaaatacccctaacatactgcatttcactctgggtaccaaatttaagcaagatattgatggccactaagtgtgtatccagaagaagagatcagaatgatgagtccagaacccctgtcacacagggaataggtgaaggaactagggatatttaactggagcagagaacatctggagagagagcaagattcctgtccttgagaagttgaagccgtctcatgcagaagagggaatgagcttccattatgctgcagagctggcagcaatggatgaaagttgcaggaagttagttttagttctgtagaaggcaagagtagggtagaccaaatcaaatgctcactggggtcaggctgatggagacagtaacactggcgagcaggtgccccagctcggactatactgctgagttctggtctgttgctgccactctacaggtccagggttgttagatcttctgggtttttgttttgctttttgaaataaggaaaataagcttatcttaagtttatttttccttggatatacctagattccatacagtgacaatacaaatacaaaggaagaacatctggatttcatccttgacctcatttacaaagcaaaaagagatgctggattcagatataaatgtttaattttgcagtgtttaagtcagcaaatcttctgttttttaaaaataagccacatatctagatttttctgtgaaagctctcaattaagtgttgggaactaatttcaagattttaaaaaatgttatgcaggcttaacgtgtctgagagccataaatgacctaacgtttcccgttagtctctgaactaggtgatctcagttctctttcaactccagtactctgtaagtttctgtgacctgtagtgtaccattctcaggtggtgatatggtttggatgttttgtcccctccaaatctcatgttcaaagtgtgacattcagtgttagaggtgggcctagtaggaggtatttgggtcatgggggcggatcccttatgtatgactttgtgccatccccatagtaatgagtgagttctcactctggttgtttatgcaagagctggttgtttaaaagagcctggaacttcctcctctctcgcttgctctctctcaccatgtgacacactggctccccttcaccttctgccatgattgtaagcttcgtgaggccctcaccagaagcagatgccagcgccatgcttcctatacagttctatgcagaacagtgagccaaataaacctcttttctttctaaaaa

SEQ ID NO: 432412 - DNA, 2059 bp, Homo sapiens
gagatggagtctcactctgtcacccaggctggcaatatcttttaaaagttaaatgggtaattctttggcccagcaaatgaacttattagtgtcagtcctagaaacagtccaatgcaacaaagaccttttgtatgagaaaattcatcatagaattgtgatagtgaaaaattggaaacaactgctgagattacaggcatgggccaccacgcccagctagttcctcttttgataaggctgttaacattacaaggtcagagagaggaatggaatcgacagtataaattggttcctgagagggtttcctaacagctttgtaataagaaaaatatggccttgatggtgtagtgcatggacatctacccagataaacaaattgttgactgctgaattaatgtgattttggtctctattgatatttcatagggccctgtcttattcaaccttacttttaaaatcagtgatttggatgaaggcatcagaaacatctgatttgaggatggagcaacccaatattgctaatataatagatgacagtggcaactgaaaacagtcccagaatgaccccatcgagatgaaattaaacagattagaaatgtaacatactcatttaaattaaataagttgtataagtttgggctgaagaaacctggccttatatcatttcatataaaaaagacgggattttagttgtcctcaggttcaatatgaaccaagtagtattcatgttgttattatatgataacagaaaaattagtggtacttcaggttttatcagtagaagtgtcacagccatagtcaaaatacccctaacatactgcatttcactctgggtaccaaatttaagcaagatattgatggccactaagtgtgtatccagaagaagagatcagaatgatgagtccagaacccctgtcacacagggaataggtgaaggaactagggatatttaactggagcagagaacatctggagagagagcaagattcctgtccttgagaagttgaagccgtctcatgcagaagagggaatgagcttccattatgctgcagagctggcagcaatggatgaaagttgcaggaagttagttttagttctgtagaaggcaagagtagggtagaccaaatcaaatgctcactggggtcaggctgatggagacagtaacactggcgagcaggtgccccagctcggactatactgctgagttctggtctgttgctgccactctacaggtccagggttgttagatcttctgggtttttgttttgctttttgaaataaggaaaataagcttatcttaagtttatttttccttggatatacctagattccatacagtgacaatacaaatacaaaggaagaacatctggatttcatccttgacctcatttacaaagcaaaaagagatgctggattcagatataaatgtttaattttgcagtgtttaagtcagcaaatcttctgttttttaaaaataagccacatatctagatttttctgtgaaagctctcaattaagtgttgggaactaatttcaagattttaaaaaatgttatgcaggcttaacgtgtctgagagccataaatgacctaacgtttcccgttagtctctgaactaggtgatctcagttctctttcaactccagtactctgtaagtttctgtgacctgtagtgtaccattctcaggtggtgatatggtttggatgttttgtcccctccaaatctcatgttcaaagtgtgacattcagtgttagaggtgggcctagtaggaggtatttgggtcatgggggcggatcccttatgtatgactttgtgccatccccatagtaatgagtgagttctcactctggttgtttatgcaagagctggttgtttaaaagagcctggaacttcctcctctctcgcttgctctctctcaccatgtgacacactggctccccttcaccttctgccatgattgtaagcttcgtgaggccctcaccagaagcagatgccagcgccatgcttcctatacagttctatgcagaacagtgagccaaataaacctcttttctttctaaaaa

SEQ ID NO: 432413 - DNA, 619 bp, Homo sapiens
cggcacgaggcggcacgagggttttttaaaaataagccacatatctagatttttctgtgaaagctctcaattaagtgttgggaactaatttcaagattttaaaaaatgttatgcaggcttaacgtgtctgagagccataaatgacctaacgtttcccgttagtctctgaactaggtgatctcagttctctttcaactccagtactctgtaagtttctgtgacctgtagtgtaccattctcaggtggtgatatggtttggatgttttgtcccctccaaatctcatgttcaaagtgtgacattcagtgttagaggtgggcctagtaggaggtatttgggtcatgggggcggatcccttatgtatgactttgtgccatccccatagtaatgagtgagttctcactctggttgtttatgcaagagctggttgtttaaaagagcctggaacttcctcctctctcgcttgctctctctcaccatgtgacacactggctccccttcaccttctgccatgattgtaagcttcgtgaggccctcaccagaagcagatgccagcgccatgcttcctatacagttctatgcagaacagtgagccaaataaacctcttttctttctaaaaa

SEQ ID NO: 432414 - DNA, 650 bp, Homo sapiens
aagtgcttctcttttccttggcggaggagggagaccacagagccctgggttgtggaagaggtggctgttccctgtcatcagtatgcagcgattgctctttccgccgttgagggccttgaaggggaggcagtatctgccgctcctggctcctagggcagcgcctagagcacagtgtgattgcatcaggcgccctttgaggccagggcaatacagcaccatctctgaagtagctttgcaatctggaaggggtacagtgtcccttccctcaaaggctgctgagcgggtggtgggccgatggctcctggtctgcagtggaacagtggctggagcagttattcttggtggagtaactaggttgacagagtctggcctctcgatggtagattggcatttaataaaggagatgaagccacctacaagccaagaggaatgggaagcagaattccaaagataccagcaatttccagaatttaaaatcttgaatcatgatatgacactgacagggatcaagtttgtggttctagcagatcctaggcaagctggaatagattctcttctccgaaagatttatgagatttactcagactttgccctcaagaatccattctattccttagaaatgcctatcaggtgtgagctccagacaagaa

SEQ ID NO: 432415 - DNA, 563 bp, Homo sapiens
ggacctcactgtcactgctactccctccgcacaaggtaagagttgtgtgcaaatatctgtgttcaagaccccgcttttggttcttttggatatatatctagaagtagaattgctggatcatataggagttgaatattttgccaacattttctattggcaaaggtgaaacaaattgaaaaatagagtgggagggagtaccaacaacaagaaatatcccagtcgctttacctctgactcctagaagggatggtggatggcaaagtgagaaagatcagaacagaggtgtttctgaacttctggtgtggacaagagctatattgttcgttaaatggggacctgccagttaagtctaatagtaaaccttagtgattttgtctgaagtatttttctgtctgctgattaaagcaaagtactagtttttcattttatgctttgatttaaaagcaaggtataacatttttttgaggccttcattaataatagaggttccaagacaccacacccttataggacatttttttccctagaatttttttttaaatgagtcttggccaggcgcggtg

SEQ ID NO: 432416 - DNA, 379 bp, Homo sapiens
gttgagggccttgaaggggaggcagtatctgccgctcctggctcctagggcagcgcctagagcacagggtaccgcactgcagcggactccgagtcgcgggagcggggatggagtgaaagggccgggataaagataatgtagagccccacatcacgtttccggagctccttacagtgcactcacaacgcataggttcagatcagagcccctaggttcagatctggaacattgacctgctgtgtggtattggccaagttaattaaactttctgttcttcagtttccttatctgtaaaatggggataacaatacctactttaaggtttgttatgaggattacattctttaatatacatcaggcctttagcacatggtaaaag

SEQ ID NO: 432417 - DNA, 766 bp, Homo sapiens
atactaaagtacaagtatgcagaaactggtaacagtgactactctggggaactgggatggattgaagaataaggggaattttaggtttatcaattttgttcgaatttctttcattgtaagcatatttgcttgtgaaattaaaaatgtgtgtattttaagtgctctgataggaggatgtggaggtttgtgtgtggttatccacgcctggccattttcaatgtgaactttgggttactgcctttcctattgccttctttcctttgtgacaggtgggcttgggcatcagcacgctgctgatgtatgtcccaactcctctggccgccactcaccagtcaggctccttggctttgctcactggtgctctttggctgatgaatgaactccgaagagtcccaaaatgattcttagaggaccagcctcctgggactgtgactgcttttgagagctcttcagagatcataagaacttgggcttttctacgagatgaccttgacataccaagtggtttccaaatggtcaacttacttaaaaatcttttcctgttttgagatagtcactggatcaagaatgcattaagtgtggttaccctaaatgttcccttttaaatctgcttttcatgttgaaaatcagttttaatgtagagaaagaaatgtctgccatttgctgcttaacaggctttgtgtcaggtttttcagtgttggcaagctcttggttctacgtggatgatttctacgtggatgttctcctgagtccttaattctgccta

SEQ ID NO: 432418 - DNA, 564 bp, Homo sapiens
acgtttcccgttagtctctgaactaggtgatctcagttctctttcaactccagtactctgtaagtttctgtgacctgtagtgtaccattctcaggtggtgatatggtttggatgttttgtcccctccaaatctcatgttcaaagtgtgacattcagtgttagaggtgggcctagtaggaggtatttgggtcatgggggcggatcccttatgtatgactttgtgccatccccatagtaatgagtgagttctcactctggttgtttatgcaagagctggttgtttaaaagagcctggaacttcctcctctctcgcttgctctctctcaccatgtgacacactggctccccttcaccttctgccatgattgtaagcttcgtgaggccctcaccagaagcagatgccagcgccatgcttcctatacagttctatgcagaacagtgagccaaataaacctcttttctttctaaaaaattgtcagtatttccttatagcaatgcaagccgactaacacaggtgattcttagcaaaacagtttgtcaatttttcataaatgctggaccctg

SEQ ID NO: 432419 - DNA, 3386 bp, Homo sapiens
ctgggagccttagccgcggggctgagaccaggcagcctgcgttcgccatgaagcgacccaaggagccgagcggctccgacggggagtccgacggacccatcgacgtgggccaagagggccagctgagccagatggccaggccgctgtccacccccagctcttcgcagatgcaagccaggaagaaacgcagagggatcatagagaaacggcgtcgagaccgcatcaacagtagcctttctgaattgcgacgcttggtccccactgcctttgagaaacagggctcttccaagctggagaaagccgaggtcttgcagatgacggtggatcacttgaaaatgctccatgccactggtgggacaggattctttgatgcccgagccctggcagttgacttccggagcattggttttcgggagtgcctcactgaggtcatcaggtacctgggggtccttgaagggcccagcagccgtgcagaccccgtccggattcgccttctctcccacctcaacagctacgcagccgagatggagccttcgcccacgcccactggccctttggccttccctgcctggccctggtctttcttccatagctgtccagggctgccagccctgagcaaccagctcgccatcctgggaagagtgcccagccctgtcctccccggtgtctcctctcctgcttaccccatcccagccctccgaaccgctccccttcgcagagccacaggcatcatcctgccagcccggaggaatgtgctgcccagtcgaggggcatcttccacccggagggcccgccccctagagaggccagcgacccctgtgcctgtcgcccccagcagcagggctgccaggagcagccacatcgctcccctcctgcagtcttcctccccaacaccccctggtcctacagggtcggctgcttacgtggctgttcccacccccaactcatcctccccagggccagctgggaggccagcgggagccatgctctaccactcctgggtctctgaaatcactgaaatcggggctttctgagctgccccttcaccaccccgccccaaggaataaggaaggttcttttaccaggagcccaaaaaagggcactgccttttctgctttgcttcgtggactggctcatatgtgaaggcacgttctccagccatcagaggccccctcctcctccaacccatctctccttctcactgttatcccagcttatccacccagctctcctggagctgttctggtctcagaggcttggttccatttctcacctgaacagatgagtcctgggagagaccctcagagatccgcccagacccctctcctgccctctgcacaccagcagcaggcatgaaccttgggtctgggaaaaagctttaacctgcagggcaccaggacccaaggcaggctgttccttggggcggtcagaccccagtcaggagcaatgactgactggctgcagccttcccacgccaagaggctggaacatagtgtctgcctcgcttcctggagatagtaactgagcaggggctacaaagaggtctcctgggaaccctgtctgccccttcccacctgtccttgggccacaccatcacactgaaccacaggacagaccctttctccaccacagccaaggcctggagactgggggcccagcagagcctgctcccaccctcctcccagcagcagacacccaccctctcactgactaacaggtccctgcacacagctggcctggtaaacccagctgggaggtttctaggcagcagcaaaactctgtgacagggtgtcctcacaccaggccttggacagctctcccagacaggagccagggttgagcaatggagagcccagcccccacgtcttacagtcgccatcctccaggcgtgtggtccctccccattgggtgcacagtgcagaggggccgtggccccatgtgatggtgcgcagagaggaacctcttgggattcagcaccagacgtctgtgctgcctggtttgcatccggctcacagagcccagactgctggaacagccaaggactgtcaggctggacaaaaataactgcaaggaggggcaagagaaaggatgattcgaggcaccttggcccttcaaggtcatgcagtgggtcgagcgcctgagatcctgttcaccaggactccacagagctggctctgctcagaagccatttcattccccggctccaccctaggccactttttctaacagaggaaacaaatggtccagcagtcgttcccagcagaacagcggagcctggactgacacccagtgggaccagtgttgccacaccagttgataaaatgcagaaacccttctgtactcgttggtaaatatctactcccccaagtgactccaggtgccccccaccgcctggcacttcccccaggactcctacgatctggttactgcctggccgatccaaggctgtggagtcccagagccagcagttcactggtgctcattccacactggttagatacttcagttgtcacccctgggaagattctcccacctcctccctttgatggaaccaccctccccagaggctgcattgaggagactccacagactgaaaagtgagtttgcagaaaccttggggaaaagggccctttcaaagaagtggataagagggaggagatcattgagtgacccagaaagctcttttgaaaagacagactcctcaaggagagataaagaggaaagcacctctttcattttttagtgtgagctaattccatcagactgctgtcctcctggacccatctgagatgtgcagtagcaaggagaggggggatcattttagagagtgggtcattggcagggagtgctccggagggaggcagaggggagactgtggtagaaggaagacagaactcacacatgctcccaggattggggacagggacagaggaggtaacagaaggcaaaggccagtttccccgttatcatgaaggggcccactcaggacaggaacaaggacaactcctcctcctcctcctcctctcctgctgctcctgggataccaggtcagtgatgtagtcttgcagtttggcaacttcctagcctgagaatccctagtggggctgtgggaaacacatttccacgttgcaagcatgcaactccaaagaatctgtgatgccactgaaatgagatgggaatgatccagctctttcagcatcttggttgaacttgctttcattgtccctgggatattgtggaaggaaaggtgactgtgtgatctgattctgtggtcaaggacttgcatcttgtgtttctatccccaagccttcctggtgtctccaactcctaccccattgcatgggttgttgcggacatccaataaagatttttttagtgcttctgga

SEQ ID NO: 432420 - DNA, 1024 bp, Homo sapiens
ctgggagccttagccgcggggctgagaccaggcagcctgcgttcgccatgaagcgacccaaggagccgagcggctccgacggggagtccgacggacccatcgacgtgggccaagagggccagctgagccagatggccaggccgctgtccacccccagctcttcgcagatgcaagccaggaagaaacgcagagggatcatagagaaacggcgtcgagaccgcatcaacagtagcctttctgaattgcgacgcttggtccccactgcctttgagaaacagggctcttccaagctggagaaagccgaggtcttgcagatgacggtggatcacttgaaaatgctccatgccactggtgggacaggtacccatgctcttctctttcaggcgtcattcatacaacaaatattttgaggctgggccctggggatatgctggtgagcaaagtccacacgctgcccactctgaggagctcagtcaatggagggaacatttgcaaagcttctctctctcctttcagcatctccctctccactttcagtgtctccatttgtcgcaaccttttcctcagttcagctccctccagtcttagacctgggaggcgctttcttctgtaacagactgttcctatgggtcccactcttgtccaacccaggacctcattaagaattcacctgaatgagctaattctcactgggatcccaatctgaccccccttaacccagggaggagcctggtatcctacccactggtctagccttctgggctactgtggggtccttggcagaactggggtgacatatcatgctcaccacaggtctcaggattgtagcaggacacaaattaactcattttgttattttaagcccatcagttacaataaagtaagggaacagtggctttaaagacacttccagacaaatagaaattctgtctactcaaagtttctctgtgtatttggtgatttcaaaattgggaaaccttgaaagctccacaggccttggccacaaagacctaagttccagaga

SEQ ID NO: 432421 - DNA, 3698 bp, Homo sapiens
ctgggagccttagccgcggggctgagaccaggcagcctgcgttcgccatgaagcgacccaaggagccgagcggctccgacggggagtccgacggacccatcgacgtgggccaagagggccagctgagccagatggccaggccgctgtccacccccagctcttcgcagatgcaaagctgtccagggctgccagccctgagcaaccagctcgccatcctgggaagagtgcccagccctgtcctccccggtgtctcctctcctgcttaccccatcccagccctccgaaccgctccccttcgcagagccacaggcatcatcctgccagcccggaggaatgtgctgcccagtcgaggggcatcttccacccggagggcccgccccctagagaggccagcgacccctgtgcctgtcgcccccagcagcagggctgccaggagcagccacatcgctcccctcctgcagtcttcctccccaacaccccctggtcctacagggtcggctgcttacgtggctgttcccacccccaactcatcctccccagggccagctgggaggccagcgggagccatgctctaccactcctgggtctctgaaatcactgaaatcggggctttctgagctgccccttcaccaccccgccccaaggaataaggaaggttcttttaccaggagcccaaaaaagggcactgccttttctgctttgcttcgtggactggctcatatgtgaaggcacgttctccagccatcagaggccccctcctcctccaacccatctctccttctcactgttatcccagcttatccacccagctctcctggagctgttctggtctcagaggcttggttccatttctcacctgaacagatgagtcctgggagagaccctcagagatccgcccagacccctctcctgccctctgcacaccagcagcaggcatgaaccttgggtctgggaaaaagctttaacctgcagggcaccaggacccaaggcaggctgttccttggggcggtcagaccccagtcaggagcaatgactgactggctgcagccttcccacgccaagaggctggaacatagtgtctgcctcgcttcctggagatagtaactgagcaggggctacaaagaggtctcctgggaaccctgtctgccccttcccacctgtccttgggccacaccatcacactgaaccacaggacagaccctttctccaccacagccaaggcctggagactgggggcccagcagagcctgctcccaccctcctcccagcagcagacacccaccctctcactgactaacaggtccctgcacacagctggcctggtaaacccagctgggaggtttctaggcagcagcaaaactctgtgacagggtgtcctcacaccaggccttggacagctctcccagacaggagccagggttgagcaatggagagcccagcccccacgtcttacagtcgccatcctccaggcgtgtggtccctccccattgggtgcacagtgcagaggggccgtggccccatgtgatggtgcgcagagaggaacctcttgggattcagcaccagacgtctgtgctgcctggtttgcatccggctcacagagcccagactgctggaacagccaaggactgtcaggctggacaaaaataactgcaaggaggggcaagagaaaggatgattcgaggcaccttggcccttcaaggtcatgcagtgggtcgagcgcctgagatcctgttcaccaggactccacagagctggctctgctcagaagccatttcattccccggctccaccctaggccactttttctaacagaggaaacaaatggtccagcagtcgttcccagcagaacagcggagcctggactgacacccagtgggaccagtgttgccacaccagttgataaaatgcagaaacccttctgtactcgttggtaaatatctactcccccaagtgactccaggtgccccccaccgcctggcacttcccccaggactcctacgatctggttactgcctggccgatccaaggctgtggagtcccagagccagcagttcactggtgctcattccacactggttagatacttcagttgtcacccctgggaagattctcccacctcctccctttgatggaaccaccctccccagaggctgcattgaggagactccacagactgaaaagtgagtttgcagaaaccttggggaaaagggccctttcaaagaagtggataagagggaggagatcattgagtgacccagaaagctcttttgaaaagacagactcctcaaggagagataaagaggaaagcacctctttcattttttagtgtgagctaattccatcagactgctgtcctcctggacccatctgagatgtgcagtagcaaggagaggggggatcattttagagagtgggtcattggcagggagtgctccggagggaggcagaggggagactgtggtagaaggaagacagaactcacacatgctcccaggattggggacagggacagaggaggtaacagaaggcaaaggccagtttccccgttatcatgaaggggcccactcaggacaggaacaaggacaactcctcctcctcctcctcctctcctgctgctcctgggataccaggtcagtgatgtagtcttgcagtttggcaacttcctagcctgagaatccctagtggggctgtgggaaacacatttccacgttgcaagcatgcaactccaaagaatctgtgatgccactgaaatgagatgggaatgatccagctctttcagcatcttggttgaacttgctttcattgtccctgggatattgtggaaggaaaggtgactgtgtgatctgattctgtggtcaaggacttgcatcttgtgtttctatccccaagccttcctggtgtctccaactcctaccccattgcatgggttgttgcggacatccaataaagatttttttagtgcttctggaaacttccagtagattctacttctaaactatctctggagtccatccacttctgtctgcacccacagccatcctggccaggccacatcacctcccccagatcactgccctggcctcagaaaggtcttccctcttgctttgtcaatcagttctcagtagcagcaggagaaattgaaagctgcaggtcatatcgtatcatctttagtttgaaaacctcactctcttaccctattgttctaaaggtcttcttttggtcccaacctcacttccagcctcatttcttgccagtcccagacttgctccctgagcttctgccacctgcccttccttcatttcctcgacattccagccttgttcccacctccagcactttgcatatgctgttccctttgccaagaatgctcttcccctaccctgtgcatggctgagttctgcagaccctcaggccttggcttcaacgttgcctcgtccaagaggccttcctcgactactttacttgtggagttcctctatcacaaggcctctgttctttcccttcatggagaatttgccactgcatatccatttgtgtaatttacttgttggttgactgtgcctcccactcgagtgtaagctcatgaggccaggtgccatgcctggttcagtctccactctgtacccagcattgagcacagggcctggtccatagttggcgttcaataaatacttgttgaagaagtgaaaaaaaaaagt

SEQ ID NO: 432422 - DNA, 1132 bp, Homo sapiens
gtgtcatctcctgctgctgtctcctcctcctcctcctcctctcctgctgctcctgggataccaggtcagtgatgtagtcttgcagtttggcaacttcctagcctgagaatccctagtggggctgtgggaaacacatttccacgttgcaagcatgcaactccaaagaatctgtgatgccactgaaatgagatgggaatgatccagctctttcagcatcttggttgaacttgctttcattgtccctgggatattgtggaaggaaaggtgactgtgtgatctgattctgtggtcaaggacttgcatcttgtgtttctatccccaagccttcctggtgtctccaactcctaccccattgcatgggttgttgcggacatccaataaagatttttttagtgcttctggaaacttccagtagattctacttctaaactatctctggagtccatccacttctgtctgcacccacagccatcctggccaggccacatcacctcccccagatcactgccctggcctcagaaaggtcttccctcttgctttgtcaatcagttctcagtagcagcaggagaaattgaaagctgcaggtcatatcgtatcatctttagtttgaaaacctcactctcttaccctattgttctaaaggtcttcttttggtcccaacctcacttccagcctcatttcttgccagtcccagacttgctccctgagcttctgccacctgcccttccttcatttcctcgacattccagccttgttcccacctccagcactttgcatatgctgttccctttgccaagaatgctcttcccctaccctgtgcatggctgagttctgcagaccctcaggccttggcttcaacgttgcctcgtccaagaggccttcctcgactactttacttgtggagttcctctatcacaaggcctctgttctttcccttcatggagaatttgccactgcatatccatttgtgtaatttacttgttggttgactgtgcctcccactcgagtgtaagctcatgaggccaggtgccatgcctggttcagtctccactctgtacccagcattgagcacagggcctggtccatagttggcgttcaataaatacttgttgaagaagtgaaaaaaaaaagt

SEQ ID NO: 432423 - DNA, 249 bp, Homo sapiens
gtgagtaacttcttgtcatgattgtttagatcatagagaaacggcgtcgagaccgcatcaacagtagcctttctgaattgcgacgcttggtccccactgcctttgagaaacaggtatgtgacattgctgattgtgctagaggaaatactgtgtgggtggcagataaggttcgtttctcatggcatctcttgttgattggtagcagctgcctgagatgctgtgatcatttaccaatatctgtcactggcc

SEQ ID NO: 432424 - DNA, 4115 bp, Homo sapiens
ctgggagccttagccgcggggctgagaccaggcagcctgcgttcgccatgaagcgacccaaggagccgagcggctccgacggggagtccgacggacccatcgacgtgggccaagagggccagctgagccagatggccaggccgctgtccacccccagctcttcgcagatgcaagccaggaagaaacgcagagggatcatagagaaacggcgtcgagaccgcatcaacagtagcctttctgaattgcgacgcttggtccccactgcctttgagaaacagggctcttccaagctggagaaagccgaggtcttgcagatgacggtggatcacttgaaaatgctccatgccactggtgggacaggattctttgatgcccgagccctggcagttgacttccggagcattggttttcgggagtgcctcactgaggtcatcaggtacctgggggtccttgaagggcccagcagccgtgcagaccccgtccggattcgccttctctcccacctcaacagctacgcagccgagatggagccttcgcccacgcccactggccctttggccttccctgcctggccctggtctttcttccatagctgtccagggctgccagccctgagcaaccagctcgccatcctgggaagagtgcccagccctgtcctccccggtgtctcctctcctgcttaccccatcccagccctccgaaccgctccccttcgcagagccacaggcatcatcctgccagcccggaggaatgtgctgcccagtcgaggggcatcttccacccggagggcccgccccctagagaggccagcgacccctgtgcctgtcgcccccagcagcagggctgccaggagcagccacatcgctcccctcctgcagtcttcctccccaacaccccctggtcctacagggtcggctgcttacgtggctgttcccacccccaactcatcctccccagggccagctgggaggccagcgggagccatgctctaccactcctgggtctctgaaatcactgaaatcggggctttctgagctgccccttcaccaccccgccccaaggaataaggaaggttcttttaccaggagcccaaaaaagggcactgccttttctgctttgcttcgtggactggctcatatgtgaaggcacgttctccagccatcagaggccccctcctcctccaacccatctctccttctcactgttatcccagcttatccacccagctctcctggagctgttctggtctcagaggcttggttccatttctcacctgaacagatgagtcctgggagagaccctcagagatccgcccagacccctctcctgccctctgcacaccagcagcaggcatgaaccttgggtctgggaaaaagctttaacctgcagggcaccaggacccaaggcaggctgttccttggggcggtcagaccccagtcaggagcaatgactgactggctgcagccttcccacgccaagaggctggaacatagtgtctgcctcgcttcctggagatagtaactgagcaggggctacaaagaggtctcctgggaaccctgtctgccccttcccacctgtccttgggccacaccatcacactgaaccacaggacagaccctttctccaccacagccaaggcctggagactgggggcccagcagagcctgctcccaccctcctcccagcagcagacacccaccctctcactgactaacaggtccctgcacacagctggcctggtaaacccagctgggaggtttctaggcagcagcaaaactctgtgacagggtgtcctcacaccaggccttggacagctctcccagacaggagccagggttgagcaatggagagcccagcccccacgtcttacagtcgccatcctccaggcgtgtggtccctccccattgggtgcacagtgcagaggggccgtggccccatgtgatggtgcgcagagaggaacctcttgggattcagcaccagacgtctgtgctgcctggtttgcatccggctcacagagcccagactgctggaacagccaaggactgtcaggctggacaaaaataactgcaaggaggggcaagagaaaggatgattcgaggcaccttggcccttcaaggtcatgcagtgggtcgagcgcctgagatcctgttcaccaggactccacagagctggctctgctcagaagccatttcattccccggctccaccctaggccactttttctaacagaggaaacaaatggtccagcagtcgttcccagcagaacagcggagcctggactgacacccagtgggaccagtgttgccacaccagttgataaaatgcagaaacccttctgtactcgttggtaaatatctactcccccaagtgactccaggtgccccccaccgcctggcacttcccccaggactcctacgatctggttactgcctggccgatccaaggctgtggagtcccagagccagcagttcactggtgctcattccacactggttagatacttcagttgtcacccctgggaagattctcccacctcctccctttgatggaaccaccctccccagaggctgcattgaggagactccacagactgaaaagtgagtttgcagaaaccttggggaaaagggccctttcaaagaagtggataagagggaggagatcattgagtgacccagaaagctcttttgaaaagacagactcctcaaggagagataaagaggaaagcacctctttcattttttagtgtgagctaattccatcagactgctgtcctcctggacccatctgagatgtgcagtagcaaggagaggggggatcattttagagagtgggtcattggcagggagtgctccggagggaggcagaggggagactgtggtagaaggaagacagaactcacacatgctcccaggattggggacagggacagaggaggtaacagaaggcaaaggccagtttccccgttatcatgaaggggcccactcaggacaggaacaaggacaactcctcctcctcctcctcctctcctgctgctcctgggataccaggtcagtgatgtagtcttgcagtttggcaacttcctagcctgagaatccctagtggggctgtgggaaacacatttccacgttgcaagcatgcaactccaaagaatctgtgatgccactgaaatgagatgggaatgatccagctctttcagcatcttggttgaacttgctttcattgtccctgggatattgtggaaggaaaggtgactgtgtgatctgattctgtggtcaaggacttgcatcttgtgtttctatccccaagccttcctggtgtctccaactcctaccccattgcatgggttgttgcggacatccaataaagatttttttagtgcttctggaaacttccagtagattctacttctaaactatctctggagtccatccacttctgtctgcacccacagccatcctggccaggccacatcacctcccccagatcactgccctggcctcagaaaggtcttccctcttgctttgtcaatcagttctcagtagcagcaggagaaattgaaagctgcaggtcatatcgtatcatctttagtttgaaaacctcactctcttaccctattgttctaaaggtcttcttttggtcccaacctcacttccagcctcatttcttgccagtcccagacttgctccctgagcttctgccacctgcccttccttcatttcctcgacattccagccttgttcccacctccagcactttgcatatgctgttccctttgccaagaatgctcttcccctaccctgtgcatggctgagttctgcagaccctcaggccttggcttcaacgttgcctcgtccaagaggccttcctcgactactttacttgtggagttcctctatcacaaggcctctgttctttcccttcatggagaatttgccactgcatatccatttgtgtaatttacttgttggttgactgtgcctcccactcgagtgtaagctcatgaggccaggtgccatgcctggttcagtctccactctgtacccagcattgagcacagggcctggtccatagttggcgttcaataaatacttgttgaagaagtgaaaaaaaaaagt

SEQ ID NO: 432425 - DNA, 716 bp, Homo sapiens
ctgggagccttagccgcggggctgagaccaggcagcctgcgttcgccatgaagcgacccaaggagccgagcggctccgacggggagtccgacggacccatcgacgtgggccaagagggccagctgagccagatggccaggccgctgtccacccccagctcttcgcagatgcaagccaggaagaaacgcagagggatcatagagaaacggcgtcgagaccgcatcaacagtagcctttctgaattgcgacgcttggtccccactgcctttgagaaacagggctcttccaagctggagaaagccgaggtcttgcagatgacggtggatcacttgaaaatgctccatgccactggtgggacagaccgataatgaagggccctcgtgaccggacctcatgccaaacaactcgttacaaaaagagctagggtcccagctgcgctgaagcttcatgagacctctcctcatctgtgcatggatgagtggccgactctggagcccaggctgttgcttcccagtctggtggtgaatcctccatagtctggtgagtgtaaatatgtgtatatctcttttcccttctccccttcccattgcaatttgcttattatgtcatttacttatatcaatttgcttattatattaatttccttattatatcatttgcttattatatctgcattgccatttacgtgggataaagcttgtttacccttaaaaata

SEQ ID NO: 432426 - DNA, 756 bp, Homo sapiens
tatcttagtattaaatttaatagcgttaacaaattataggttgtcagtgtgatgctggtctagtgcttagtacacaataaattcttgtcaactagctataaaaatcatatcaaatccaaatatgtctagaatttaaagaagctgtactttgaaaagtaagcagggtcctacagctttaatttaatactgctttaggcaacagagttcacacttaaaatttttaacttctaatgagagtaaccacttttaatctaattctaatcctaggaaagcccagttaagaagtgatgttctaatatccaaaccatgtatgtataggtttggtgatatatgtaagagatgttaatagcttcatagctgtgagaaagcagtactcctaagtctgaatattataacgtgaaaaaaacactggtttaattagcaaatacagttatatatttgaaattactattgggagccagacacggtggctcatgcctgtaatcccagcactttggggggccaaggcaggaggatcacttgaggcaagaagtttgagaccaccttaggcaatatagtgagacactgtctcaacaaaaaaattttaaaattagccagacctggtggtacttacctgtagtcctagctactcagaaagctgaggcaagaggatctcttaaccttttcttaagcccaggagttaaaagctgcagttaactacaattgtgctgctacactccagctggcacaacagagtgagaccctgtattaaaaaaa

SEQ ID NO: 432427 - DNA, 1019 bp, Homo sapiens
gtgagccgaaatcacgccactgcactccagcctgggcgacggagcgagaccctgtctcagaaagaaaaagaaaaaccaccgtccaggggcggagaaggaaggttctccctacttctcaggtttccactccctggccggaaaaaacctagtcctcccaggttagcacgccgctctagcccagcctcacgtctccactgcttctcagccagccaacgcctcttctgattggctctgacgtgcgtggtgcgtgaaaacgtcacgagacgccggcgttactataagagcgcagccgtggcgcttgcgcggctctttctcagtgaccgggtggtttgcttaggcgcagacggggaagcggagccaacatgccagtggcccggagctgggtttgtcgcaaaacttatgtgaccccgcggagacccttcgagaaatctcgtctcgaccaagagctgaagctgatcggcgagtatgggctccggaacaaacgtgaggtctggagggtcaaatttaccctggccaagatccgcaaggccgcccgggaactgctgacgcttgatgagaaggacccacggcgtctgttcgaaggcaacgccctgctgcggcggctggtccgcattggggtgctggatgagggcaagatgaagctggattacatcctgggcctgaagatagaggatttcttagagagacgcctgcagacccaggtcttcaagctgggcttggccaagtccatccaccacgctcgcgtgctgatccgccagcgccatatcagggtccgcaagcaggtggtgaacatcccgtccttcattgtccgcctggattcccagaagcacatcgacttctctctgcgctctccctacgggggtggccgcccgggccgcgtgaagaggaagaatgccaagaagggccagggtggggctggggctggagacgacgaggaggaggattaagtccacctgtccctcctgggctgctggattgtctcgttttcctgccaaataaacaggatcagcgctttacaa

SEQ ID NO: 432428 - DNA, 925 bp, Homo sapiens
  misc_feature (752)..(752): n is a, c, g, or t
  misc_feature (758)..(758): n is a, c, g, or t
gcctggtggcgaattcggcacgagggcgcagacggggaagcggagccaacatgccagtggcccggagctgggtttgtcgcaaaacttatgtgaccccgcggagacccttcgagaaatctcgtctcgaccaagagctgaagctgatcggcgagtatgggctccggaacaaacgtgaggtctggagggtcaaatttaccctggccaagatccgcaaggccgcccgggaactgctgacgcttgatgagaaggacccacggcgtctgttcgaaggcaacgccctgctgcggcggctggtccgcattggggtgctggatgagggcaagatgaagctggattacatcctgggcctgaagatagaggatttcttagagagacgcctgcagacccaggtcttcaagctgggcttggccaagtccatccaccacgctcgcgtgctgatccgccagcgccatatcagggtccgcaagcaggtggtgaacatcccgtccttcattgtccgcctggattcccagaagcacatcgacttctctctgcgctctccctacgggggtggccgcccgggccgcgtgaagaggaagaatgccaagaagggccagggtggggctggggctggagacgacgaggaggaggattaagtccacctgtccctcctgggctgctggattgtctcgttttcctgccaaataaacaggatcagcgctttacaaaaaaacaaaaaacctttccatcccccaatcatccatacacacttnagcttnatatgactgtgtgatgaggtgaagggtaaagaggtatggtggacctggagaaataatttcagggtggctgctcttcatcaacagtggaaggggacttatacccatgcattctttcctttcttcccttttccttttcttccttgaaacaaggggcgctcttttgccaa

SEQ ID NO: 432429 - DNA, 166 bp, Homo sapiens
gcggccacctactactactactatacggctgcgagaagacgacaggaagggccagggtggggctggggctggagacgacgaggaggaggattaagtccacctgtccctcctgggctgctggattgtctcgttttcctgccaaataaacaggatcagcgctttacaa

SEQ ID NO: 432430 - DNA, 745 bp, Homo sapiens
atcctctagagcggccgcctactactactaaattcgcggcccgtcgacgggtggtttgcttaggcgcagacggggaagcggagccaacatgccagtggcccggagctgggtttgtcgcaaaacttatgtgaccccgcggagacccttcgagaaatctcgtctcgaccaagagctgaagctgatcggcgagtatgggctccggaacaaacgtgaggtctggagggtcaaatttaccctggccaagatccgcaaggccgcccgggaactgctgacgcttgatgagaaggacccacggcgtctgttcgaaggcaacgccctgctgcggcggctggtccgcattggggtgctggatgagggcaagatgaagctggattacatcctgggcctgaagatagaggatttcttagagagacgcctgcagacccaggtcttcaagctgggcttggccaagtccatccaccacgctcgcgtgctgatccgccagcgccatatcagggtccgcaagcaggtggtgaacatcccgtccttcattgtccgcctggattcccagaagcacatcgacttctctctgcgctctccctacgggggtggccgcccgggccgcgtgaagaggaagaatgccaagaagggccagggtggggctggggctggagacgacgaggaggaggattaagtccacctgtccctcctgggctgctggattgtctcgttttcctgccaaataaacaggatcagcgctttacaa

SEQ ID NO: 432431 - DNA, 879 bp, Homo sapiens
gtgagccgaaatcacgccactgcactccagcctgggcgacggagcgagaccctgtctcagaaagaaaaagaaaaaccaccgtccaggggcggagaaggaaggttctccctacttctcaggtttccactccctggccggaaaaaacctagtcctcccaggttagcacgccgctctagcccagcctcacgtctccactgcttctcagccagccaacgcctcttctgattggctctgacgtgcgtggtgcgtgaaaacgtcacgagacgccggcgttactataagagcgcagccgtggcgcttgcgcggctctttctcagtgaccgggtggtttgcttaggcgcagacggggaagcggagccaacatgccagtggcccggagctgggtttgtcgcaaaacttatgtgaccccgcggagacccttcgagaaatctcgtctcgaccaagagctgaagctgatcggcgagtatgggctccggaacaaacgtgaggtctggagggtcaaatttaccctggccaagatccaagatagaggatttcttagagagacgcctgcagacccaggtcttcaagctgggcttggccaagtccatccaccacgctcgcgtgctgatccgccagcgccatatcagggtccgcaagcaggtggtgaacatcccgtccttcattgtccgcctggattcccagaagcacatcgacttctctctgcgctctccctacgggggtggccgcccgggccgcgtgaagaggaagaatgccaagaagggccagggtggggctggggctggagacgacgaggaggaggattaagtccacctgtccctcctgggctgctggattgtctcgttttcctgccaaataaacaggatcagcgctttacaa

SEQ ID NO: 432432 - DNA, 793 bp, Homo sapiens
  misc_feature (12)..(12): n is a, c, g, or t
  misc_feature (14)..(14): n is a, c, g, or t
  misc_feature (39)..(39): n is a, c, g, or t
gcggcgggaaantnacggctaggtacgaggctggggttnaatcggcacgagggtggtttgcttaggtgaggcgcagacggggaagcggagccaacatgccagtggcccggagctgggtttgtcgcaaaacttatgtgaccccgcggagacccttcgagaaatctcgtctcgaccaagagctgaagctgatcggcgagtatgggctccggaacaaacgtgaggtctggagggtcaaatttaccctggccaagatccgcaaggccgcccgggaactgctgacgcttgatgagaaggacccacggcgtctgttcgaaggcaacgccctgctgcggcggctggtccgcattggggtgctggatgagggcaagatgaagctggattacatcctgggcctgaagatagaggatttcttagagagacgcctgcagacccaggtcttcaagctgggcttggccaagtccatccaccacgctcgcgtgctgatccgccagcgccatatcagggtccgcaagcaggtggtgaacatcccgtccttcattgtccgcctggattcccagaagcacatcgacttctctctgcgctctccctacgggggtggccgcccgggccgcgtgaagaggaagaatgccaagaagggccagggtggggctggggctggagacgacgaggaggaggattaagtccacctgtccctcctgggctgctggattgtctcgttttcctgccaaataaacaggatcagcgctttacaaaaaaaaaaaacaaaaggggggggcgcccaaaagaaccccgg

SEQ ID NO: 432433 - DNA, 731 bp, Homo sapiens
  misc_feature (24)..(24): n is a, c, g, or t
cgagcgcgccaagagagacaaaanaaagacaagaaaaaggtttgcttaggcgcagacggggaagcggagccaacatgccagtggcccggagctgggtttgtcgcaaaacttatgtgaccccgcggagacccttcgagaaatctcgtctcgaccaagagctgaagctgatcggcgagtatgggctccggaacaaacgtgaggtctggagggtcaaatttaccctggccaagatccgcaaggccgcccgggaactgctgacgcttgatgagaaggacccacggcgtctgttcgaaggcaacgccctgctgcggcggctggtccgcattggggtgctggatgagggcaagatgaagctggattacatcctgggcctgaagatagaggatttcttagagagacgcctgcagacccaggtcttcaagctgggcttggccaagtccatccaccacgctcgcgtgctgatccgccagcgccatatcagggtccgcaagcaggtggtgaacatcccgtccttcattgtccgcctggattcccagaagcacatcgacttctctctgcgctctccctacgggggtggccgcccgggccgcgtgaagaggaagaatgccaagaagggccagggtggggctggggctggagacgacgaggaggaggattaagtccacctgtccctcctgggctgctggattgtctcgttttcctgccaaataaacaggatcagcgctttacaa

SEQ ID NO: 432434 - DNA, 877 bp, Homo sapiens
tgcagtaacctaggaattaggctaggtacgaggctggcgcagacggggaagcggagccaacatgccagtggcccggagctgggtttgtcgcaaaacttatgtgaccccgcggagacccttcgagaaatctcgtctcgaccaagagctgaagctgatcggcgagtatgggctccggaacaaacgtgaggtctggagggtcaaatttaccctggccaagatccgcaaggccgcccgggaactgctgacgcttgatgagaaggacccacggcgtctgttcgaaggcaacgccctgctgcggcggctggtccgcattggggtgctggatgagggcaagatgaagctggattacatcctgggcctgaagatagaggatttcttagagagacgcctgcagacccaggtcttcaagctgggcttggccaagtccatccaccacgctcgcgtgctgatccgccagcgccatatcagggtccgcaagcaggtggtgaacatcccgtccttcattgtccgcctggattcccagaagcacatcgacttctctctgcgctctccctacgggggtggccgcccgggccgcgtgaagaggaagaatgccaagaagggccagggtggggctggggctggagacgacgaggaggaggattaagtccacctgtccctcctgggctgctggattgtctcgttttcctgccaaataaacaggatcagcgctttacaatagaaaaacaaaaacaaaaaaaagcaaaaaagacagcagacaaaaaaaagcagaaaacagggggggggcaaaaaaaaacccagaggggggacaaaaagggccaccacatttttgaaaacggccaccaaagggggaaaaaaaaaaaagggcggggggaac

SEQ ID NO: 432435 - DNA, 508 bp, Homo sapiens
acaaatggactgtagagaacagtccagtgggggaaggaggtgtataggtcatgctggctcatgaatgccaaggataagctaaggaactccaccttctaggcccctggacgcatggtcagcgtggggtctggctggatggggtggggcagggccccgctgcctattctacattcaagtgtccgctcactccgtgttcttgcatggtctctcgggggccttcggaggctggctggtagtggtgaggtgagaagtggcatctcctctgtatcctcccaacatctgtctgtccagaattgtccgcctggattcccagaagcacatcgacttctctctgcgctctccctacgggggtggccgcccgggccgcgtgaagaggaagaatgccaagaagggccagggtggggctggggctggagacgacgaggaggaggattaagtccacctgtccctcctgggctgctggattgtctcgttttcctgccaaataaacaggatcagcgctttacaa

SEQ ID NO: 432436 - DNA, 751 bp, Homo sapiens
  misc_feature (24)..(24): n is a, c, g, or t
cgagcgcgccaagagagacaaaanaaagacaagaaaaaggtttgcttaggcgcagacggggaagcggagccaacatgccagtggcccggagctgggtttgtcgcaaaacttatgtgaccccgcggagacccttcgagaaatctcgtctcgaccaagagctgaagctgatcggcgagtatgggctccggaacaaacgtgaggtctggagggtcaaatttaccctggccaagatccgcaaggccgcccgggaactgctgacgcttgatgagaaggacccacggcgtctgttcgaaggcaacgccctgctgcggcggctggtccgcattggggtgctggatgagggcaagatgaagctggattacatcctgggcctgaagatagaggatttcttagagagacgcctgcagacccaggtcttcaagctgggcttggccaagtccatccaccacgctcgcgtgctgatccgccagcgccatatcagggtccgcaagcaggtggtgaacatcccgtccttcattgtccgcctggattcccagaagcacatcgacttctctctgcgctctccctacgggggtggccgcccgggccgcgtgaagaggaagaatgccaagaagggccagggtggggctggggctggagacgacgaggaggaggattaagtccacctgtccctcctgggctgctggattgtctcgttttcctgccaaataaacaggatcagcgctttacaaaaaaaaaaacacacacaaca

SEQ ID NO: 432437 - DNA, 1153 bp, Homo sapiens
  misc_feature (12)..(12): n is a, c, g, or t
  misc_feature (14)..(14): n is a, c, g, or t
  misc_feature (39)..(39): n is a, c, g, or t
  misc_feature (764)..(764): n is a, c, g, or t
  misc_feature (774)..(775): n is a, c, g, or t
  misc_feature (779)..(779): n is a, c, g, or t
  misc_feature (781)..(781): n is a, c, g, or t
  misc_feature (788)..(790): n is a, c, g, or t
  misc_feature (798)..(798): n is a, c, g, or t
  misc_feature (801)..(801): n is a, c, g, or t
gcggcgggaaantnacggctaggtacgaggctggggttnaatcggcacgagggtggtttgcttaggtgaggcgcagacggggaagcggagccaacatgccagtggcccggagctgggtttgtcgcaaaacttatgtgaccccgcggagacccttcgagaaatctcgtctcgaccaagagctgaagctgatcggcgagtatgggctccggaacaaacgtgaggtctggagggtcaaatttaccctggccaagatccgcaaggccgcccgggaactgctgacgcttgatgagaaggacccacggcgtctgttcgaaggcaacgccctgctgcggcggctggtccgcattggggtgctggatgagggcaagatgaagctggattacatcctgggcctgaagatagaggatttcttagagagacgcctgcagacccaggtcttcaagctgggcttggccaagtccatccaccacgctcgcgtgctgatccgccagcgccatatcagggtccgcaagcaggtggtgaacatcccgtccttcattgtccgcctggattcccagaagcacatcgacttctctctgcgctctccctacgggggtggccgcccgggccgcgtgaagaggaagaatgccaagaagggccagggtggggctggggctggagacgacgaggaggaggattaagtccacctgtccctcctgggctgctggattgtctcgttttcctgccaaataaacaggatcagcgctttacaaaaaacaaaaatnaaaaaaaacnncggngngaactannncggggggnggnaaacacgggataagatgggcactggccaaaaggggctacctcgaacccagattcttgtgcaccaggggggacacatcacggggaacaccacaacgagcggggggccacaaaaaattggcgaagagacgcggggtacacgcaggagagagaagaagggcatgagacacccaaagtaacagaacagcacaatgcaaacggaggaggacccgacagaacagataaacaagaaccgacagagagaacaacaaaaaacaagcaaacagcggccaatcaaatcagcaacagacaagaagaaactgaagacgaacgaagcacacgaagagacgaacggacgagaagaggagacagacaa

SEQ ID NO: 432438 - DNA, 881 bp, Homo sapiens
  misc_feature (761)..(761): n is a, c, g, or t
  misc_feature (764)..(764): n is a, c, g, or t
  misc_feature (766)..(766): n is a, c, g, or t
cacgcgtcgccacgcgtcgcggacgcgtgggtttgcttaggcgcagacggggaagcggagccaacatgccagtggcccggagctgggtttgtcgcaaaacttatgtgaccccgcggagacccttcgagaaatctcgtctcgaccaagagctgaagctgatcggcgagtatgggctccggaacaaacgtgaggtctggagggtcaaatttaccctggccaagatccgcaaggccgcccgggaactgctgacgcttgatgagaaggacccacggcgtctgttcgaaggcaacgccctgctgcggcggctggtccgcattggggtgctggatgagggcaagatgaagctggattacatcctgggcctgaagatagaggatttcttagagagacgcctgcagacccaggtcttcaagctgggcttggccaagtccatccaccacgctcgcgtgctgatccgccagcgccatatcagggtccgcaagcaggtggtgaacatcccgtccttcattgtccgcctggattcccagaagcacatcgacttctctctgcgctctccctacgggggtggccgcccgggccgcgtgaagaggaagaatgccaagaagggccagggtggggctggggctggagacgacgaggaggaggattaagtccacctgtccctcctgggctgctggattgtctcgttttcctgccaaataaacaggatcagcgctttacaaaaaaaaaaaaaaggaagaaacaaaaacaaaaaaacacanacnanacaaggggggcgccaaaaaaacccgaggggcccactataggcgcacccactttttcacagtgcccacaacgcccgcatcaaacacacgcgggcgaaaaagagaatggaaactccg

SEQ ID NO: 432439 - DNA, 738 bp, Homo sapiens
tgcagtaacctaggaattaggctaggtacgaggctgggtggtggtggtttgcttaggcgcagacggggaagcggagccaacatgccagtggcccggagctgggtttgtcgcaaaacttatgtgaccccgcggagacccttcgagaaatctcgtctcgaccaagagctgaagctgatcggcgagtatgggctccggaacaaacgtgaggtctggagggtcaaatttaccctggccaagatccgcaaggccgcccgggaactgctgacgcttgatgagaaggacccacggcgtctgttcgaaggcaacgccctgctgcggcggctggtccgcattggggtgctggatgagggcaagatgaagctggattacatcctgggcctgaagatagaggatttcttagagagacgcctgcagacccaggtcttcaagctgggcttggccaagtccatccaccacgctcgcgtgctgatccgccagcgccatatcagggtccgcaagcaggtggtgaacatcccgtccttcattgtccgcctggattcccagaagcacatcgacttctctctgcgctctccctacgggggtggccgcccgggccgcgtgaagaggaagaatgccaagaagggccagggtggggctggggctggagacgacgaggaggaggattaagtccacctgtccctcctgggctgctggattgtctcgttttcctgccaaataaacaggatcagcgctttacaa

SEQ ID NO: 432440 - DNA, 792 bp, Homo sapiens
tgcagtaacctaggaattaggctaggtacgaggctgggtggtggtggtttgcttaggcgcagacggggaagcggagccaacatgccagtggcccggagctgggtttgtcgcaaaacttatgtgaccccgcggagacccttcgagaaatctcgtctcgaccaagagctgaagctgatcggcgagtatgggctccggaacaaacgtgaggtctggagggtcaaatttaccctggccaagatccgcaaggccgcccgggaactgctgacgcttgatgagaaggacccacggcgtctgttcgaaggcaacgccctgctgcggcggctggtccgcattggggtgctggatgagggcaagatgaagctggattacatcctgggcctgaagatagaggatttcttagagagacgcctgcagacccaggtcttcaagctgggcttggccaagtccatccaccacgctcgcgtgctgatccgccagcgccatatcagggtccgcaagcaggtggtgaacatcccgtccttcattgtccgcctggattcccagaagcacatcgacttctctctgcgctctccctacgggggtggccgcccgggccgcgtgaagaggaagaatgccaagaagggccagggtggggctggggctggagacgacgaggaggaggattaagtccacctgtccctcctgggctgctggattgtctcgttttcctgccaaataaacaggatcagcgctttacaaaaacaaacaaaaacaaaaacacacccacacaaagccacgacaaaagaaaacaag

SEQ ID NO: 432441 - DNA, 811 bp, Homo sapiens
tgcagtaacctaggaattaggctaggtacgaggctgggtggtggtggtttgcttaggcgcagacggggaagcggagccaacatgccagtggcccggagctgggtttgtcgcaaaacttatgtgaccccgcggagacccttcgagaaatctcgtctcgaccaagagctgaagctgatcggcgagtatgggctccggaacaaacgtgaggtctggagggtcaaatttaccctggccaagatccgcaaggccgcccgggaactgctgacgcttgatgagaaggacccacggcgtctgttcgaaggcaacgccctgctgcggcggctggtccgcattggggtgctggatgagggcaagatgaagctggattacatcctgggcctgaagatagaggatttcttagagagacgcctgcagacccaggtcttcaagctgggcttggccaagtccatccaccacgctcgcgtgctgatccgccagcgccatatcagggtccgcaagcaggtggtgaacatcccgtccttcattgtccgcctggattcccagaagcacatcgacttctctctgcgctctccctacgggggtggccgcccgggccgcgtgaagaggaagaatgccaagaagggccagggtggggctggggctggagacgacgaggaggaggattaagtccacctgtccctcctgggctgctggattgtctcgttttcctgccaaataaacaggatcagcgctttacaaaaaaaaaaaaaaggaagaaacaaaaacaaaaaaaacataacgaaatcggagaaataataaggaaggccaaaca

SEQ ID NO: 432442 - DNA, 911 bp, Homo sapiens
  misc_feature (766)..(766): n is a, c, g, or t
  misc_feature (773)..(773): n is a, c, g, or t
  misc_feature (775)..(775): n is a, c, g, or t
tgcagtaacctaggaattaggctaggtacgaggctgggtggtggtggtttgcttaggcgcagacggggaagcggagccaacatgccagtggcccggagctgggtttgtcgcaaaacttatgtgaccccgcggagacccttcgagaaatctcgtctcgaccaagagctgaagctgatcggcgagtatgggctccggaacaaacgtgaggtctggagggtcaaatttaccctggccaagatccgcaaggccgcccgggaactgctgacgcttgatgagaaggacccacggcgtctgttcgaaggcaacgccctgctgcggcggctggtccgcattggggtgctggatgagggcaagatgaagctggattacatcctgggcctgaagatagaggatttcttagagagacgcctgcagacccaggtcttcaagctgggcttggccaagtccatccaccacgctcgcgtgctgatccgccagcgccatatcagggtccgcaagcaggtggtgaacatcccgtccttcattgtccgcctggattcccagaagcacatcgacttctctctgcgctctccctacgggggtggccgcccgggccgcgtgaagaggaagaatgccaagaagggccagggtggggctggggctggagacgacgaggaggaggattaagtccacctgtccctcctgggctgctggattgtctcgttttcctgccaaataaacaggatcagcgctttacaaaaaaaaacaacaacaagaaacaaaaaanaaaaaananaaaaaaaaaaaagcggggggtctttttgggggggggaaaaaggggttaaaagggggggggttattggttttcgccaacccctcttttgaaaggggaaaaggggggcccacaagagggggggatattaaacgggacg

SEQ ID NO: 432443 - DNA, 1397 bp, Homo sapiens
  misc_feature (766)..(766): n is a, c, g, or t
  misc_feature (773)..(773): n is a, c, g, or t
  misc_feature (775)..(775): n is a, c, g, or t
tgcagtaacctaggaattaggctaggtacgaggctgggtggtggtggtttgcttaggcgcagacggggaagcggagccaacatgccagtggcccggagctgggtttgtcgcaaaacttatgtgaccccgcggagacccttcgagaaatctcgtctcgaccaagagctgaagctgatcggcgagtatgggctccggaacaaacgtgaggtctggagggtcaaatttaccctggccaagatccgcaaggccgcccgggaactgctgacgcttgatgagaaggacccacggcgtctgttcgaaggcaacgccctgctgcggcggctggtccgcattggggtgctggatgagggcaagatgaagctggattacatcctgggcctgaagatagaggatttcttagagagacgcctgcagacccaggtcttcaagctgggcttggccaagtccatccaccacgctcgcgtgctgatccgccagcgccatatcagggtccgcaagcaggtggtgaacatcccgtccttcattgtccgcctggattcccagaagcacatcgacttctctctgcgctctccctacgggggtggccgcccgggccgcgtgaagaggaagaatgccaagaagggccagggtggggctggggctggagacgacgaggaggaggattaagtccacctgtccctcctgggctgctggattgtctcgttttcctgccaaataaacaggatcagcgctttacaaaaaaaaacaacaacaagaaacaaaaaanaaaaaananaaaaaaaaaaaaaaaaaaaaaaaaaaaaaaaaaaaaaaaaaaaaaaaaaaaaaaaaaaaaaaaaaaaaaaaaaaaaaatatacaacacatggaccaaacataattttaactgaaaaaaacttttccatagggccgaaattttgagtaaattgagccaaatctgcctaaagggggttccattacaatacaatggccggctattttcaattatggaaattggaaaaacctgagtggacccaatttaaaggcgtatgaagaaataaccacttatgcatttggagaaaaaagcaatatgggcccgaacagcatgtttcttcctaaccaattgaaaaccataaaaggccaattgaaatttgaaagcctaaatattaggcaaaatatcggttaaaatgtattttaaaccaatttattttataaacacataggccgaaaatttcgaaaatccttggatatttaaaacaattctccctaaaagggtaaaaacttttcaatttgaacaatgagccctttttaaataactgggcctaaaccttaaagggcgtaaaacccttttaaaggctaaggccccctttagaggcctaaccctttaaaattttttggagtcccttcccagccttttgct

SEQ ID NO: 432444 - DNA, 758 bp, Homo sapiens
tgcagtaacctaggaattaggctaggtacgaggctgggtggtggtggtttgcttaggcgcagacggggaagcggagccaacatgccagtggcccggagctgggtttgtcgcaaaacttatgtgaccccgcggagacccttcgagaaatctcgtctcgaccaagagctgaagctgatcggcgagtatgggctccggaacaaacgtgaggtctggagggtcaaatttaccctggccaagatccgcaaggccgcccgggaactgctgacgcttgatgagaaggacccacggcgtctgttcgaaggcaacgccctgctgcggcggctggtccgcattggggtgctggatgagggcaagatgaagctggattacatcctgggcctgaagatagaggatttcttagagagacgcctgcagacccaggtcttcaagctgggcttggccaagtccatccaccacgctcgcgtgctgatccgccagcgccatatcagggtccgcaagcaggtggtgaacatcccgtccttcattgtccgcctggattcccagaagcacatcgacttctctctgcgctctccctacgggggtggccgcccgggccgcgtgaagaggaagaatgccaagaagggccagggtggggctggggctggagacgacgaggaggaggattaagtccacctgtccctcctgggctgctggattgtctcgttttcctgccaaataaacaggatcagcgctttacaaaaaaaaaaacacacacaaca

SEQ ID NO: 432445 - DNA, 779 bp, Homo sapiens
tgcagtaacctaggaattaggctaggtacgaggctgggtggtggtggtttgcttaggcgcagacggggaagcggagccaacatgccagtggcccggagctgggtttgtcgcaaaacttatgtgaccccgcggagacccttcgagaaatctcgtctcgaccaagagctgaagctgatcggcgagtatgggctccggaacaaacgtgaggtctggagggtcaaatttaccctggccaagatccgcaaggccgcccgggaactgctgacgcttgatgagaaggacccacggcgtctgttcgaaggcaacgccctgctgcggcggctggtccgcattggggtgctggatgagggcaagatgaagctggattacatcctgggcctgaagatagaggatttcttagagagacgcctgcagacccaggtcttcaagctgggcttggccaagtccatccaccacgctcgcgtgctgatccgccagcgccatatcagggtccgcaagcaggtggtgaacatcccgtccttcattgtccgcctggattcccagaagcacatcgacttctctctgcgctctccctacgggggtggccgcccgggccgcgtgaagaggaagaatgccaagaagggccagggtggggctggggctggagacgacgaggaggaggattaagtccacctgtccctcctgggctgctggattgtctcgttttcctgccaaataaacaggatcagcgctttacaaaaaaaaaaaacaaaaggggggggcgcccaaaagaaccccgg

SEQ ID NO: 432446 - DNA, 956 bp, Homo sapiens
  misc_feature (783)..(783): n is a, c, g, or t
  misc_feature (789)..(789): n is a, c, g, or t
tgcagtaacctaggaattaggctaggtacgaggctgggtggtggtggtttgcttaggcgcagacggggaagcggagccaacatgccagtggcccggagctgggtttgtcgcaaaacttatgtgaccccgcggagacccttcgagaaatctcgtctcgaccaagagctgaagctgatcggcgagtatgggctccggaacaaacgtgaggtctggagggtcaaatttaccctggccaagatccgcaaggccgcccgggaactgctgacgcttgatgagaaggacccacggcgtctgttcgaaggcaacgccctgctgcggcggctggtccgcattggggtgctggatgagggcaagatgaagctggattacatcctgggcctgaagatagaggatttcttagagagacgcctgcagacccaggtcttcaagctgggcttggccaagtccatccaccacgctcgcgtgctgatccgccagcgccatatcagggtccgcaagcaggtggtgaacatcccgtccttcattgtccgcctggattcccagaagcacatcgacttctctctgcgctctccctacgggggtggccgcccgggccgcgtgaagaggaagaatgccaagaagggccagggtggggctggggctggagacgacgaggaggaggattaagtccacctgtccctcctgggctgctggattgtctcgttttcctgccaaataaacaggatcagcgctttacaaaaaaacaaaaaacctttccatcccccaatcatccatacacacttnagcttnatatgactgtgtgatgaggtgaagggtaaagaggtatggtggacctggagaaataatttcagggtggctgctcttcatcaacagtggaaggggacttatacccatgcattctttcctttcttcccttttccttttcttccttgaaacaaggggcgctcttttgccaa

SEQ ID NO: 432447 - DNA, 1352 bp, Homo sapiens
tgcagtaacctaggaattaggctaggtacgaggctgggtggtggtggtttgcttaggcgcagacggggaagcggagccaacatgccagtggcccggagctgggtttgtcgcaaaacttatgtgaccccgcggagacccttcgagaaatctcgtctcgaccaagagctgaagctgatcggcgagtatgggctccggaacaaacgtgaggtctggagggtcaaatttaccctggccaagatccgcaaggccgcccgggaactgctgacgcttgatgagaaggacccacggcgtctgttcgaaggcaacgccctgctgcggcggctggtccgcattggggtgctggatgagggcaagatgaagctggattacatcctgggcctgaagatagaggatttcttagagagacgcctgcagacccaggtcttcaagctgggcttggccaagtccatccaccacgctcgcgtgctgatccgccagcgccatatcagggtccgcaagcaggtggtgaacatcccgtccttcattgtccgcctggattcccagaagcacatcgacttctctctgcgctctccctacgggggtggccgcccgggccgcgtgaagaggaagaatgccaagaagggccagggtggggctggggctggagacgacgaggaggaggattaagtccacctgtccctcctgggctgctggattgtctcgttttcctgccaaataaacaggatcagcgctttacaatgccaaataaacaggatcagcgctttacaaaaaaaaaaaaaaaaaaaaaaaaaaaaaaaaaaaaaaaaaatatacaacacatggaccaaacataattttaactgaaaaaaacttttccatagggccgaaattttgagtaaattgagccaaatctgcctaaagggggttccattacaatacaatggccggctattttcaattatggaaattggaaaaacctgagtggacccaatttaaaggcgtatgaagaaataaccacttatgcatttggagaaaaaagcaatatgggcccgaacagcatgtttcttcctaaccaattgaaaaccataaaaggccaattgaaatttgaaagcctaaatattaggcaaaatatcggttaaaatgtattttaaaccaatttattttataaacacataggccgaaaatttcgaaaatccttggatatttaaaacaattctccctaaaagggtaaaaacttttcaatttgaacaatgagccctttttaaataactgggcctaaaccttaaagggcgtaaaacccttttaaaggctaaggccccctttagaggcctaaccctttaaaattttttggagtcccttcccagccttttgct

SEQ ID NO: 432448 - DNA, 786 bp, Homo sapiens
tgcagtaacctaggaattaggctaggtacgaggctgggtggtggtggtttgcttaggcgcagacggggaagcggagccaacatgccagtggcccggagctgggtttgtcgcaaaacttatgtgaccccgcggagacccttcgagaaatctcgtctcgaccaagagctgaagctgatcggcgagtatgggctccggaacaaacgtgaggtctggagggtcaaatttaccctggccaagatccgcaaggccgcccgggaactgctgacgcttgatgagaaggacccacggcgtctgttcgaaggcaacgccctgctgcggcggctggtccgcattggggtgctggatgagggcaagatgaagctggattacatcctgggcctgaagatagaggatttcttagagagacgcctgcagacccaggtcttcaagctgggcttggccaagtccatccaccacgctcgcgtgctgatccgccagcgccatatcagggtccgcaagcaggtggtgaacatcccgtccttcattgtccgcctggattcccagaagcacatcgacttctctctgcgctctccctacgggggtggccgcccgggccgcgtgaagaggaagaatgccaagaagggccagggtggggctggggctggagacgacgaggaggaggattaagtccacctgtccctcctgggctgctggattgtctcgttttcctgccaaataaacaggatcagcgctttacaatgccaaataaacaggatcagcgctttacaaaaaaaaacacacacaaca

SEQ ID NO: 432449 - DNA, 897 bp, Homo sapiens
tgcagtaacctaggaattaggctaggtacgaggctgggtggtggtggtttgcttaggcgcagacggggaagcggagccaacatgccagtggcccggagctgggtttgtcgcaaaacttatgtgaccccgcggagacccttcgagaaatctcgtctcgaccaagagctgaagctgatcggcgagtatgggctccggaacaaacgtgaggtctggagggtcaaatttaccctggccaagatccgcaaggccgcccgggaactgctgacgcttgatgagaaggacccacggcgtctgttcgaaggcaacgccctgctgcggcggctggtccgcattggggtgctggatgagggcaagatgaagctggattacatcctgggcctgaagatagaggatttcttagagagacgcctgcagacccaggtcttcaagctgggcttggccaagtccatccaccacgctcgcgtgctgatccgccagcgccatatcagggtccgcaagcaggtggtgaacatcccgtccttcattgtccgcctggattcccagaagcacatcgacttctctctgcgctctccctacgggggtggccgcccgggccgcgtgaagaggaagaatgccaagaagggccagggtggggctggggctggagacgacgaggaggaggattaagtccacctgtccctcctgggctgctggattgtctcgttttcctgccaaataaacaggatcagcgctttacaatagaaaaacaaaaacaaaaaaaagcaaaaaagacagcagacaaaaaaaagcagaaaacagggggggggcaaaaaaaaacccagaggggggacaaaaagggccaccacatttttgaaaacggccaccaaagggggaaaaaaaaaaaagggcggggggaac

SEQ ID NO: 432450 - DNA, 1107 bp, Homo sapiens
tgcagtaacctaggaattaggctaggtacgaggctgggtggtggtggtttgcttaggcgcagacggggaagcggagccaacatgccagtggcccggagctgggtttgtcgcaaaacttatgtgaccccgcggagacccttcgagaaatctcgtctcgaccaagagctgaagctgatcggcgagtatgggctccggaacaaacgtgaggtctggagggtcaaatttaccctggccaagatccgcaaggccgcccgggaactgctgacgcttgatgagaaggacccacggcgtctgttcgaaggcaacgccctgctgcggcggctggtccgcattggggtgctggatgagggcaagatgaagctggattacatcctgggcctgaagatagaggatttcttagagagacgcctgcagacccaggtcttcaagctgggcttggccaagtccatccaccacgctcgcgtgctgatccgccagcgccatatcagggtccgcaagcaggtggtgaacatcccgtccttcattgtccgcctggattcccagaagcacatcgacttctctctgcgctctccctacgggggtggccgcccgggccgcgtgaagaggaagaatgccaagaagggccagggtggggctggggctggagacgacgaggaggaggattaagtccacctgtccctcctgggctgctggattgtctcgttttcctgccaaataaacaggatcagcgctttacaaaaaaaaaaaaaaaaaaaaaaaaaaaaaaaaaaagggggggccgcctcaaaaatttcccccgggggggcccaagtttcggcgctccccggttttttgtgtacaaaagggggcccccttatgggggggttttaatacgcctagaggcacagcggggcccgccagtttaaaaacacgggttgcgcggacggggggacaaaacggctggaccgaacccggggggaacgctcttgtgggcaaaggaaccctctaaattcgcgggggggggggcacaacaatagtggggaccaaacatctcctctcgcgacgaatatttcagcggctccagagggggaacatatttacaccttttccaggcggttcacgggcggt

SEQ ID NO: 432451 - DNA, 878 bp, Homo sapiens
tgcagtaacctaggaattaggctaggtacgaggctgggtggtggtggtttgcttaggcgcagacggggaagcggagccaacatgccagtggcccggagctgggtttgtcgcaaaacttatgtgaccccgcggagacccttcgagaaatctcgtctcgaccaagagctgaagctgatcggcgagtatgggctccggaacaaacgtgaggtctggagggtcaaatttaccctggccaagatccgcaaggccgcccgggaactgctgacgcttgatgagaaggacccacggcgtctgttcgaaggcaacgccctgctgcggcggctggtccgcattggggtgctggatgagggcaagatgaagctggattacatcctgggcctgaagatagaggatttcttagagagacgcctgcagacccaggtcttcaagctgggcttggccaagtccatccaccacgctcgcgtgctgatccgccagcgccatatcagggtccgcaagcaggtggtgaacatcccgtccttcattgtccgcctggattcccagaagcacatcgacttctctctgcgctctccctacgggggtggccgcccgggccgcgtgaagaggaagaatgccaagaagggccagggtggggctggggctggagacgacgaggaggaggattaagtccacctgtccctcctgggctgctggattgtctcgttttcctgccaaataaacaggatcagcgctttacaaaaaaaaaaaaaaaaaaaaaaaaaattgtgtgtgggggggggaaaagagccacctaaaaattaagggggttccatggatggggggagaggaaaaggggggggggggcccggggtcgagatttggacttttgggtttggttg

SEQ ID NO: 432452 - DNA, 769 bp, Homo sapiens
  misc_feature (767)..(767): n is a, c, g, or t
  misc_feature (769)..(769): n is a, c, g, or t
tgcagtaacctaggaattaggctaggtacgaggctgggtggtggtggtttgcttaggcgcagacggggaagcggagccaacatgccagtggcccggagctgggtttgtcgcaaaacttatgtgaccccgcggagacccttcgagaaatctcgtctcgaccaagagctgaagctgatcggcgagtatgggctccggaacaaacgtgaggtctggagggtcaaatttaccctggccaagatccgcaaggccgcccgggaactgctgacgcttgatgagaaggacccacggcgtctgttcgaaggcaacgccctgctgcggcggctggtccgcattggggtgctggatgagggcaagatgaagctggattacatcctgggcctgaagatagaggatttcttagagagacgcctgcagacccaggtcttcaagctgggcttggccaagtccatccaccacgctcgcgtgctgatccgccagcgccatatcagggtccgcaagcaggtggtgaacatcccgtccttcattgtccgcctggattcccagaagcacatcgacttctctctgcgctctccctacgggggtggccgcccgggccgcgtgaagaggaagaatgccaagaagggccagggtggggctggggctggagacgacgaggaggaggattaagtccacctgtccctcctgggctgctggattgtctcgttttcctgccaaataaacaggatcagcgctttacaaaaaaatcactgcccgtcgtttaccgtcgngn

SEQ ID NO: 432453 - DNA, 910 bp, Homo sapiens
tgcagtaacctaggaattaggctaggtacgaggctgggtggtggtggtttgcttaggcgcagacggggaagcggagccaacatgccagtggcccggagctgggtttgtcgcaaaacttatgtgaccccgcggagacccttcgagaaatctcgtctcgaccaagagctgaagctgatcggcgagtatgggctccggaacaaacgtgaggtctggagggtcaaatttaccctggccaagatccgcaaggccgcccgggaactgctgacgcttgatgagaaggacccacggcgtctgttcgaaggcaacgccctgctgcggcggctggtccgcattggggtgctggatgagggcaagatgaagctggattacatcctgggcctgaagatagaggatttcttagagagacgcctgcagacccaggtcttcaagctgggcttggccaagtccatccaccacgctcgcgtgctgatccgccagcgccatatcagccctcggaggtgatgggtgtgaactcacccagagggtacagattcacccttgcacacagctcaccagggagctggggcagcctcttgccccaatagcccagcgcaagggtcactgcggctctagccgtacaccttgtgaaggcctctgccaggcatgtgggcagctggacagggtccgcaagcaggtggtgaacatcccgtccttcattgtccgcctggattcccagaagcacatcgacttctctctgcgctctccctacgggggtggccgcccgggccgcgtgaagaggaagaatgccaagaagggccagggtggggctggggctggagacgacgaggaggaggattaagtccacctgtccctcctgggctgctggattgtctcgttttcctgccaaataaacaggatcagcgctttacaa

SEQ ID NO: 432454 - DNA, 1583 bp, Homo sapiens
tgcagtaacctaggaattaggctaggtacgaggctgggtggtggtggtttgcttaggcgcagacggggaagcggagccaacatgccagtggcccggagctgggtttgtcgcaaaacttatgtgaccccgcggagacccttcgagaaatctcgtctcgaccaagagctgaagctgatcggcgagtatgggctccggaacaaacgtgaggtctggagggtcaaatttaccctggccaagatccgcaaggccgcccgggaactgctgacgcttgatgagaaggacccacggcgtctgttcgaaggcaacgccctgctgcggcggctggtccgcattggggtgctggatgagggcaagatgaagctggattacatcctgggcctgaagatagaggatttcttagagagacgcctgcagacccaggtcttcaagctgggcttggccaagtccatccaccacgctcgcgtgctgatccgccagcgccatatcagccctcggaggtgatgggtgtgaactcacccagagggtacagattcacccttgcacacagctcaccagggagctggggcagcctcttgccccaatagcccagcgcaagggtcactgcggctctagccgtacaccttgtgaaggcctctgccaggcatgtgggcagctggacaggtaacagctcttggtgtccccagtggagggagagaaccagcctcacctcgcttgggtggtgggttcagctgtctcctggctcgcttgtgaagttgattccagaccccgatccatgactgcgttctgggtactcagtgtgccctttctgtaatgtggcaccattgagggggaggagctgtacagaaagagggcaagatgtttgcgtttagaatcttcgccccagcccttcactaaccctgtgagccgtaggcagagccttgtgtgtcaatgctttcgtcggagacgtagcctcgggttgctgtgttattgtgggcattgctgctgcacgtggtaatacagctcagtgtcaggtgtggggttcacgatatttcagactcggaacttgggggctctcacatggccatctcatttgctttgtggtcttaggtgggatactttcagatttctcctataaaatggggttgagaaagtcatctgaagcatttttggggattaaggtgataccctaaaaccccggagggcgcacgtaggatcaggtgcacccttcctgcagcgccttggtgtctgcagccgtggcggcctcacggggtgggtggagaggaaagagtggtgcggtagctggggttagcgtccgtttctcctccagtccacctcaccttgtcgctgcttccagggtccgcaagcaggtggtgaacatcccgtccttcattgtccgcctggattcccagaagcacatcgacttctctctgcgctctccctacgggggtggccgcccgggccgcgtgaagaggaagaatgccaagaagggccagggtggggctggggctggagacgacgaggaggaggattaagtccacctgtccctcctgggctgctggattgtctcgttttcctgccaaataaacaggatcagcgctttacaa

SEQ ID NO: 432455 - DNA, 1673 bp, Homo sapiens
tgcagtaacctaggaattaggctaggtacgaggctgggtggtggtggtttgcttaggcgcagacggggaagcggagccaacatgccagtggcccggagctgggtttgtcgcaaaacttatgtgaccccgcggagacccttcgagaaatctcgtctcgaccaagagctgaagctgatcggcgagtatgggctccggaacaaacgtgaggtctggagggtcaaatttaccctggccaagatccgcaaggccgcccgggaactgctgacgcttgatgagaaggacccacggcgtctgttcgaaggcaacgccctgctgcggcggctggtccgcattggggtgctggatgagggcaagatgaagctggattacatcctgggcctgaagatagaggatttcttagagagacgcctgcagacccaggtcttcaagctgggcttggccaagtccatccaccacgctcgcgtgctgatccgccagcgccatatcaggtaccacctcggatgggcacctgaatcttcctccacctgcccctctgatggttgccctcactaagcctgctgtccctatctcctatgcagccctcggaggtgatgggtgtgaactcacccagagggtacagattcacccttgcacacagctcaccagggagctggggcagcctcttgccccaatagcccagcgcaagggtcactgcggctctagccgtacaccttgtgaaggcctctgccaggcatgtgggcagctggacaggtaacagctcttggtgtccccagtggagggagagaaccagcctcacctcgcttgggtggtgggttcagctgtctcctggctcgcttgtgaagttgattccagaccccgatccatgactgcgttctgggtactcagtgtgccctttctgtaatgtggcaccattgagggggaggagctgtacagaaagagggcaagatgtttgcgtttagaatcttcgccccagcccttcactaaccctgtgagccgtaggcagagccttgtgtgtcaatgctttcgtcggagacgtagcctcgggttgctgtgttattgtgggcattgctgctgcacgtggtaatacagctcagtgtcaggtgtggggttcacgatatttcagactcggaacttgggggctctcacatggccatctcatttgctttgtggtcttaggtgggatactttcagatttctcctataaaatggggttgagaaagtcatctgaagcatttttggggattaaggtgataccctaaaaccccggagggcgcacgtaggatcaggtgcacccttcctgcagcgccttggtgtctgcagccgtggcggcctcacggggtgggtggagaggaaagagtggtgcggtagctggggttagcgtccgtttctcctccagtccacctcaccttgtcgctgcttccagggtccgcaagcaggtggtgaacatcccgtccttcattgtccgcctggattcccagaagcacatcgacttctctctgcgctctccctacgggggtggccgcccgggccgcgtgaagaggaagaatgccaagaagggccagggtggggctggggctggagacgacgaggaggaggattaagtccacctgtccctcctgggctgctggattgtctcgttttcctgccaaataaacaggatcagcgctttacaa

SEQ ID NO: 432456 - DNA, 652 bp, Homo sapiens
tgcagtaacctaggaattaggctaggtacgaggctgggtggtggtggtttgcttaggcgcagacggggaagcggagccaacatgccagtggcccggagctgggtttgtcgcaaaacttatgtgaccccgcggagacccttcgagaaatctcgtctcgaccaagagctgaagctgatcggcgagtatgggctccggaacaaacgtgaggtctggagggtcaaatttaccctggccaagatccgcaaggccgcccgggaactgctgacgcttgatgagaaggacccacggcgtctgttcgaaggcaacgccctgctgcggcggctggtccgcattggggtgctggatgagggcaagatgaagctggattacatcctgggcctgaagatagaggatttcttagagagacgcctgcagacccaggtcttcaagctgggcttggccaagtccatccaccacgctcgcgtgctgatccgccagcgccatatcagggtccgcaagcaggtggtgaacatcccgtccttcattgtccgcctggattcccagaagcacatcgacttctctctgcgctctccctacgggggtggccgcccgggccgcgtgaagaggaagaatgccaacatagccccagccccaccctggcccttcgtcgatc

SEQ ID NO: 432457 - DNA, 664 bp, Homo sapiens
tgcagtaacctaggaattaggctaggtacgaggctgggtggtggtggtttgcttaggcgcagacggggaagcggagccaacatgccagtggcccggagctgggtttgtcgcaaaacttatgtgaccccgcggagacccttcgagaaatctcgtctcgaccaagagctgaagctgatcggcgagtatgggctccggaacaaacgtgaggtctggagggtcaaatttaccctggccaagatccgcaaggccgcccgggaactgctgacgcttgatgagaaggacccacggcgtctgttcgaaggcaacgccctgctgcggcggctggtccgcattggggtgctggatgagggcaagatgaagctggattacatcctgggcctgaagatagaggatttcttagagagacgcctgcagacccaggtcttcaagctgggcttggccaagtccatccaccacgctcgcgtgctgatccgccagcgccatatcagggtccgcaagcaggtggtgaacatcccgtccttcattgtccgcctggattcccagaagcacatcgacttctctctgcgctctccctacgggggtggccgcccgggccgcgtgaagaggaagaatgccaaatccgcagccgacccggaactgctacgctatatacttaaatcctgta

SEQ ID NO: 432458 - DNA, 765 bp, Homo sapiens
tgcagtaacctaggaattaggctaggtacgaggctgggtggtggtggtttgcttaggcgcagacggggaagcggagccaacatgccagtggcccggagctgggtttgtcgcaaaacttatgtgaccccgcggagacccttcgagaaatctcgtctcgaccaagagctgaagctgatcggcgagtatgggctccggaacaaacgtgaggtctggagggtcaaatttaccctggccaagatccgcaaggccgcccgggaactgctgacgcttgatgagaaggacccacggcgtctgttcgaaggcaacgccctgctgcggcggctggtccgcattggggtgctggatgagggcaagatgaagctggattacatcctgggcctgaagatagaggatttcttagagagacgcctgcagacccaggtcttcaagctgggcttggccaagtccatccaccacgctcgcgtgctgatccgccagcgccatatcagtccacctcaccttgtcgctgcttccagggtccgcaagcaggtggtgaacatcccgtccttcattgtccgcctggattcccagaagcacatcgacttctctctgcgctctccctacgggggtggccgcccgggccgcgtgaagaggaagaatgccaagaagggccagggtggggctggggctggagacgacgaggaggaggattaagtccacctgtccctcctgggctgctggattgtctcgttttcctgccaaataaacaggatcagcgctttacaa

SEQ ID NO: 432459 - DNA, 812 bp, Homo sapiens
tgcagtaacctaggaattaggctaggtacgaggctgggtggtggtggtttgcttaggcgcagacggggaagcggagccaacatgccagtggcccggagctgggtttgtcgcaaaacttatgtgaccccgcggagacccttcgagaaatctcgtctcgaccaagagctgaagctgatcggcgagtatgggctccggaacaaacgtgaggtctggagggtcaaatttaccctggccaagatccgcaaggccgcccgggaactgctgacgcttgatgagaaggacccacggcgtctgttcgaaggcaacgccctgctgcggcggctggtccgcattggggtgctggatgagggcaagatgaagctggattacatcctgggcctgaagatagaggatttcttagagagacgcctgcagacccaggtcttcaagctgggcttggccaagtccatccaccacgctcgcgtgctgatccgccagcgccatatcagccctcggaggtgatgggtgtgaactcacccagagggtacagattcacccttgcacacagctcaccagggagctggggcagcctcttgccccaatagcccagcgcaagggtcactgcggctctagccgtacaccttatcgacttctctctgcgctctccctacgggggtggccgcccgggccgcgtgaagaggaagaatgccaagaagggccagggtggggctggggctggagacgacgaggaggaggattaagtccacctgtccctcctgggctgctggattgtctcgttttcctgccaaataaacaggatcagcgctttacaa

SEQ ID NO: 432460 - DNA, 668 bp, Homo sapiens
tgcagtaacctaggaattaggctaggtacgaggctgggtggtggtggtttgcttaggcgcagacggggaagcggagccaacatgccagtggcccggagctgggtttgtcgcaaaacttatgtgaccccgcggagacccttcgagaaatctcgtctcgaccaagagctgaagctgatcggcgagtatgggctccggaacaaacgtgaggtctggagggtcaaatttaccctggccaagatccgcaaggccgcccgggaactgctgacgcttgatgagaaggacccacggcgtctgttcgaaggcaacgccctgctgcggcggctggtccgcattggggtgctggatgagggcaagatgaagctggattacatcctgggcctgaagatagaggatttcttagagagacgcctgcagacccaggtcttcaagctgggcttggccaagtccatccaccacgctcgcgtgctgatccgccagcgccatatcagggtccgcaagcaggtggtgaacatcccgtccttcgccgcgtgaagaggaagaatgccaagaagggccagggtggggctggggctggagacgacgaggaggaggattaagtccacctgtccctcctgggctgctggattgtctcgttttcctgccaaataaacaggatcagcgctttacaa

SEQ ID NO: 432461 - DNA, 615 bp, Homo sapiens
tgcagtaacctaggaattaggctaggtacgaggctgggtggtggtggtttgcttaggcgcagacggggaagcggagccaacatgccagtggcccggagctgggtttgtcgcaaaacttatgtgaccccgcggagacccttcgagaaatctcgtctcgaccaagagctgaagctgatcggcaacgccctgctgcggcggctggtccgcattggggtgctggatgagggcaagatgaagctggattacatcctgggcctgaagatagaggatttcttagagagacgcctgcagacccaggtcttcaagctgggcttggccaagtccatccaccacgctcgcgtgctgatccgccagcgccatatcagggtccgcaagcaggtggtgaacatcccgtccttcattgtccgcctggattcccagaagcacatcgacttctctctgcgctctccctacgggggtggccgcccgggccgcgtgaagaggaagaatgccaagaagggccagggtggggctggggctggagacgacgaggaggaggattaagtccacctgtccctcctgggctgctggattgtctcgttttcctgccaaataaacaggatcagcgctttacaa

SEQ ID NO: 432462 - DNA, 1003 bp, Homo sapiens
tgcagtaacctaggaattaggctaggtacgaggctgggtggtggtggtttgcttaggcgcagacggggaagcggagccaacatgccagtggcccggagctgggtttgtcgcaaaacttatgtgaccccgcggagacccttcgagaaatctcgtctcgaccaagagctgaagctgatcggcgagtatgggctccggaacaaacgtgaggtctggagggtcaaatttaccctggccaagatccgcaaggccgcccgggaactgctgacgcttgatgagaaggacccacggcgtctgttcgaaggcaacgccctgctgcggcggctggtccgcattggggtgctggatgagggcaagatgaagctggattacatcctgggcctgaagatagaggatttcttagagagacgcctgcagacccaggtcttcaagctgggcttggccaagtccatccaccacgctcgcgtgctgatccgccagcgccatatcagccctcggaggtgatgggtgtgaactcacccagagggtacagattcacccttgcacacagctcaccagggagctggggcagcctcttgccccaatagcccagcgcaagggtcactgcggctctagccgtacaccttgtgaaggcctctgccaggcatgtgggcagctggacagggtccgcaagcaggtggtgaacatcccgtccttcattgtccgcctggattcccagaagcacatcgacttctctctgcgctctccctacgggggtggccgcccgggccgcgtgaagaggaagaatgccaagaagggccagggtggggctggggctggagacgacgaggaggaggattaagtccacctgtccctcctgggctgctggattgtctcgttttcctgccaaataaacaggatcagcgctttacaaaagtacgtactttagggggggccccggtacccaatttcgcctatagtgagtccgaatacaattcactggccgcggtttaaccggcgtacttgg

SEQ ID NO: 432463 - DNA, 941 bp, Homo sapiens
  misc_feature (939)..(939): n is a, c, g, or t
  misc_feature (941)..(941): n is a, c, g, or t
tgcagtaacctaggaattaggctaggtacgaggctgggtggtggtggtttgcttaggcgcagacggggaagcggagccaacatgccagtggcccggagctgggtttgtcgcaaaacttatgtgaccccgcggagacccttcgagaaatctcgtctcgaccaagagctgaagctgatcggcgagtatgggctccggaacaaacgtgaggtctggagggtcaaatttaccctggccaagatccgcaaggccgcccgggaactgctgacgcttgatgagaaggacccacggcgtctgttcgaaggcaacgccctgctgcggcggctggtccgcattggggtgctggatgagggcaagatgaagctggattacatcctgggcctgaagatagaggatttcttagagagacgcctgcagacccaggtcttcaagctgggcttggccaagtccatccaccacgctcgcgtgctgatccgccagcgccatatcagccctcggaggtgatgggtgtgaactcacccagagggtacagattcacccttgcacacagctcaccagggagctggggcagcctcttgccccaatagcccagcgcaagggtcactgcggctctagccgtacaccttgtgaaggcctctgccaggcatgtgggcagctggacagggtccgcaagcaggtggtgaacatcccgtccttcattgtccgcctggattcccagaagcacatcgacttctctctgcgctctccctacgggggtggccgcccgggccgcgtgaagaggaagaatgccaagaagggccagggtggggctggggctggagacgacgaggaggaggattaagtccacctgtccctcctgggctgctggattgtctcgttttcctgccaaataaacaggatcagcgctttacaaaaaaatcactgcccgtcgtttaccgtcgngn

SEQ ID NO: 432464 - DNA, 617 bp, Homo sapiens
tgcagtaacctaggaattaggctaggtacgaggctgggtggtggtggtttgcttaggcgcagacggggaagcggagccaacatgccagtggcccggagctgggtttgtcgcaaaacttatgtgaccccgcggagacccttcgagaaatctcgtctcgaccaagagctgaagctgatcggcgagtatgggctccggaacaaacgtgaggtctggagggtcaaatttaccctggccaagatccgcaaggccgcccgggaactgctgacgcttgatgagaaggacccacggcgtctgttcgaaggcaacgccctgctgcggcggctggtccgcattggggtgctggatgagggcaagatgaagctggattacatcctgggcctgaagatagaggatttcttagagagacgcctgcagacccaggtcttcaagctgggcttggccaagtccatccaccacgctcgcgtgctgatccgccagcgccatatcagggtccgcaagcaggtggtgaacatcccgtccttcgagacgacgaggaggaggattaagtccacctgtccctcctgggctgctggattgtctcgttttcctgccaaataaacaggatcagcgctttacaa

SEQ ID NO: 432465 - DNA, 780 bp, Homo sapiens
  misc_feature (422)..(422): n is a, c, g, or t
  misc_feature (431)..(431): n is a, c, g, or t
  misc_feature (434)..(434): n is a, c, g, or t
  misc_feature (469)..(470): n is a, c, g, or t
tgcagtaacctaggaattaggctaggtacgaggctgggtggtggtggtttgcttaggcgcagacggggaagcggagccaacatgccagtggcccggagctgggtttgtcgcaaaacttatgtgaccccgcggagacccttcgagaaatctcgtctcgaccaagagctgaagctgatcggcgagtatgggctccggaacaaacgtgaggtctggagggtcaaatttaccctggccaagatccgcaaggccgcccgggaactgctgacgcttgatgagaaggacccacggcgtctgttcgaaggcaacgccctgctgcggcggctggtccgcattggggtgctggatgagggcaagatgaagctggattacatcctgggcctgaagatagaggatttcttagagagacgcccttctgttggggnccaaagggnacncccccgaagtgtttctttttcccaaaaaaaggggnncctgggcttggccaagtccatccaccacgctcgcgtgctgatccgccagcgccatatcagggtccgcaagcaggtggtgaacatcccgtccttcattgtccgcctggattcccagaagcacatcgacttctctctgcgctctccctacgggggtggccgcccgggccgcgtgaagaggaagaatgccaagaagggccagggtggggctggggctggagacgacgaggaggaggattaagtccacctgtccctcctgggctgctggattgtctcgttttcctgccaaataaacaggatcagcgctttacaa

SEQ ID NO: 432466 - DNA, 557 bp, Homo sapiens
tgcagtaacctaggaattaggctaggtacgaggctgggtggtggtggtttgcttaggcgcagacggggaagcggagccaacatgccagtggcccggagctgggtttgtcgcaaaacttatgtgaccccgcggagacccttcgagaaatctcgtctcgaccaagagctgaagctgatcggcgagtatgggctccggaacaaacgtgaggtctggagggtcaaatttaccctggccaagatccgcaaggccgcccgggaactgctgacgcttgatgagaaggacccacggcgtctgttcgaaggcaacgccctgctgcggcggctggtccgcattggggtgctggatgagggcaagatgaagctggattacatcctgggcctgaagatagaggatttcttagagagacgcctgcagacccaggtcttcaagctgggcttggccaagtccatccaccacgctcgcgagacgacgaggaggaggattaagtccacctgtccctcctgggctgctggattgtctcgttttcctgccaaataaacaggatcagcgctttacaa

SEQ ID NO: 432467 - DNA, 1037 bp, Homo sapiens
  misc_feature (980)..(980): n is a, c, g, or t
  misc_feature (982)..(982): n is a, c, g, or t
tgcagtaacctaggaattaggctaggtacgaggctgggtggtggtggtttgcttaggcgcagacggggaagcggagccaacatgccagtggcccggagctgggtttgtcgcaaaacttatgtgaccccgcggagacccttcgagaaatctcgtctcgaccaagagctgaagctgatcggcgagtatgggctccggaacaaacgtgaggtctggagggtcaaatttaccctggccaagatccgcaaggccgcccgggaactgctgacgcttgatgagaaggacccacggcgtctgttcgaaggcaacgccctgctgcggcggctggtccgcattggggtgctggatgagggcaagatgaagctggattacatcctgggcctgaagatagaggatttcttagagagacgcctgcagacccaggtcttcaagctgggcttggccaagtccatccaccacgctcgcgtgctgatccgccagcgccatatcagccctcggaggtgatgggtgtgaactcacccagagggtacagattcacccttgcacacagctcaccagggagctggggcagcctcttgccccaatagcccagcgcaagggtcactgcggctctagccgtacaccttgtgaaggcctctgccaggcatgtgggcagctggacaggtaacagctcttggtgtccccagtggagggagagaaccagcctcacctcgcttgggtggtgggttcagctgtctcctggctcgcttgtgaagttgattccagaccccgatccatgactgcgttctgggtactcagtgtgccctttctgtaatgtggcaccattgagggggaggagctgtacagaaagagggcaagatgtttgcgtttagaatcttcgccccagcccttcactaaccctgtgagccgtaggcagagccttgtgtgtcaatgctttcgtcggagacgtagcctcgggttgctgtgttattgtggtcacacangnatgcaggtagaacatcggctgcagtaatataggcctgggtaatctcgagatttaa

SEQ ID NO: 432468 - DNA, 570 bp, Homo sapiens
tgcagtaacctaggaattaggctaggtacgaggctgggtggtggtggtttgcttaggcgcagacggggaagcggagccaacatgccagtggcccggagctgggtttgtcgcaaaacttatgtgaccccgcggagacccttcgagaaatctcgtctcgaccaagagctgaagctgatcggcgagtatgggctccggaacaaacgtgaggtctggagggtcaaatttaccctggccaagatccgcaaggccgcccgggaactgctgacgcttgatgagaaggacccacggcgtctgttcgaaggcaacgccctgctgcggcggctggtccgcattggggtgctggatgagggcaagattgtccgcctggattcccagaagcacatcgacttctctctgcgctctccctacgggggtggccgcccgggccgcgtgaagaggaagaatgccaagaagggccagggtggggctggggctggagacgacgaggaggaggattaagtccacctgtccctcctgggctgctggattgtctcgttttcctgccaaataaacaggatcagcgctttacaa

SEQ ID NO: 432469 - DNA, 551 bp, Homo sapiens
tgcagtaacctaggaattaggctaggtacgaggctgggtggtggtggtttgcttaggcgcagacggggaagcggagccaacatgccagtggcccggagctgggtttgtcgcaaaacttatgtgaccccgcggagacccttcgagaaatctcgtctcgaccaagagctgaagctgatcggcgagtatgggctccggaacaaacgtgaggtctggagggtcaaatttaccctggccaagatccgcaaggccgcccgggaactgctgacgcttgatgagaaggacccacggcgtctgttcgaagggtccgcaagcaggtggtgaacatcccgtccttcattgtccgcctggattcccagaagcacatcgacttctctctgcgctctccctacgggggtggccgcccgggccgcgtgaagaggaagaatgccaagaagggccagggtggggctggggctggagacgacgaggaggaggattaagtccacctgtccctcctgggctgctggattgtctcgttttcctgccaaataaacaggatcagcgctttacaa

SEQ ID NO: 432470 - DNA, 920 bp, Homo sapiens
tgcagtaacctaggaattaggctaggtacgaggctgggtggtggtggtttgcttaggcgcagacggggaagcggagccaacatgccagtggcccggagctgggtttgtcgcaaaacttatgtgaccccgcggagacccttcgagaaatctcgtctcgaccaagagctgaagctgatcggcgagtatgggctccggaacaaacgtgaggtctggagggtcaaatttaccctggccaagatccgcaaggccgcccgggaactgctgacgcttgatgagaaggacccacggcgtctgttcgaagggtccgcaagcaggtggtgaacatcccgtccttcattgtccgcctggattcccagaagcacatcgacttctctctgcgctctccctacgggggtggccgcccgggccgcgtgaagaggaagaatgccaagaagggccagggtggggctggggctggagacgacgaggaggaggattaagtccacctgtccctcctgggctgctggattgtctcgttttcctgccaaataaacaggatcagcgctttacaaaaaaaaaaaaaaaaaaaaaaaaaaaaaaaaaaagggggggccgcctcaaaaatttcccccgggggggcccaagtttcggcgctccccggttttttgtgtacaaaagggggcccccttatgggggggttttaatacgcctagaggcacagcggggcccgccagtttaaaaacacgggttgcgcggacggggggacaaaacggctggaccgaacccggggggaacgctcttgtgggcaaaggaaccctctaaattcgcgggggggggggcacaacaatagtggggaccaaacatctcctctcgcgacgaatatttcagcggctccagagggggaacatatttacaccttttccaggcggttcacgggcggt

SEQ ID NO: 432471 - DNA, 647 bp, Homo sapiens
tgcagtaacctaggaattaggctaggtacgaggctgggtggtggtggtttgcttaggcgcagacggggaagcggagccaacatgccagtggcccggagctgggtttgtcgcaaaacttatgtgaccccgcggagacccttcgagaaatctcgtctcgaccaagagctgaagctgatcggcgagtatgggctccggaacaaacgtgaggtctggagggtcaaatttaccctggccaagatccgcaaggccgcccgggaactgctgacgcttgatgagaaggacccacggcgtctgttcgaaggtgcgtatgggagtccacagcagagggatggggtgcagggcttgtgaggttcattctcccttctgttgcctctgttccagtgatgagagttgtgtcattggataaatggagccagccttctaacttttagtggcacttgtggagtaggaaaagtgtatctggaccagtctttgccctgtttcttaggtgtgtggcttttttgcccagttattggaccttcagtttagtaatgaccagagctaaagataggcctggcacacctgggcacccgtctatatctttatattctgtttatgtggcctgtttgctagtggatgagagtagactatgaagtggaatttctggg

SEQ ID NO: 432472 - DNA, 852 bp, Homo sapiens
tgcagtaacctaggaattaggctaggtacgaggctgggtggtggtggtttgcttaggcgcagacggggaagcggagccaacatgccagtggcccggagctgggtttgtcgcaaaacttatgtgaccccgcggagacccttcgagaaatctcgtctcgaccaagagctgaagctgatcggtgagtggccaaggcttccgggaagtggttcggcttccgggaggcggttagcacgtggatgaaggtgcccatgtactctatctagtccgtcccctaaatttggtactattcgtggtttaggaaggttttgtgattccaaagctgccagtctagttgttgtgccagtaggtgggactacacttgtccacccgcttctccccaccaggcgagtatgggctccggaacaaacgtgaggtctggagggtcaaatttaccctggccaagatccgcaaggccgcccgggaactgctgacgcttgatgagaaggacccacggcgtctgttcgaaggtgcgtatgggagtccacagcagagggatggggtgcagggcttgtgaggttcattctcccttctgttgcctctgttccagtgatgagagttgtgtcattggataaatggagccagccttctaacttttagtggcacttgtggagtaggaaaagtgtatctggaccagtctttgccctgtttcttaggtgtgtggcttttttgcccagttattggaccttcagtttagtaatgaccagagctaaagataggcctggcacacctgggcacccgtctatatctttatattctgtttatgtggcctgtttgctagtggatgagagtagactatgaagtggaatttctggg

SEQ ID NO: 432473 - DNA, 707 bp, Homo sapiens
gcctggtggcgaattcggcacgagggcgcagacggggaagcggagccaacatgccagtggcccggagctgggtttgtcgcaaaacttatgtgaccccgcggagacccttcgagaaatctcgtctcgaccaagagctgaagctgatcggcgagtatgggctccggaacaaacgtgaggtctggagggtcaaatttaccctggccaagatccgcaaggccgcccgggaactgctgacgcttgatgagaaggacccacggcgtctgttcgaaggcaacgccctgctgcggcggctggtccgcattggggtgctggatgagggcaagatgaagctggattacatcctgggcctgaagatagaggatttcttagagagacgcctgcagacccaggtcttcaagctgggcttggccaagtccatccaccacgctcgcgtgctgatccgccagcgccatatcagggtccgcaagcaggtggtgaacatcccgtccttcattgtccgcctggattcccagaagcacatcgacttctctctgcgctctccctacgggggtggccgcccgggccgcgtgaagaggaagaatgccaagaagggccagggtggggctggggctggagacgacgaggaggaggattaagtccacctgtccctcctgggctgctggattgtctcgttttcctgccaaataaacaggatcagcgctttacaa

SEQ ID NO: 432474 - DNA, 718 bp, Homo sapiens
tgcagtaacctaggaattaggctaggtacgaggctggcgcagacggggaagcggagccaacatgccagtggcccggagctgggtttgtcgcaaaacttatgtgaccccgcggagacccttcgagaaatctcgtctcgaccaagagctgaagctgatcggcgagtatgggctccggaacaaacgtgaggtctggagggtcaaatttaccctggccaagatccgcaaggccgcccgggaactgctgacgcttgatgagaaggacccacggcgtctgttcgaaggcaacgccctgctgcggcggctggtccgcattggggtgctggatgagggcaagatgaagctggattacatcctgggcctgaagatagaggatttcttagagagacgcctgcagacccaggtcttcaagctgggcttggccaagtccatccaccacgctcgcgtgctgatccgccagcgccatatcagggtccgcaagcaggtggtgaacatcccgtccttcattgtccgcctggattcccagaagcacatcgacttctctctgcgctctccctacgggggtggccgcccgggccgcgtgaagaggaagaatgccaagaagggccagggtggggctggggctggagacgacgaggaggaggattaagtccacctgtccctcctgggctgctggattgtctcgttttcctgccaaataaacaggatcagcgctttacaa

SEQ ID NO: 432475 - DNA, 752 bp, Homo sapiens
  misc_feature (12)..(12): n is a, c, g, or t
  misc_feature (14)..(14): n is a, c, g, or t
  misc_feature (39)..(39): n is a, c, g, or t
gcggcgggaaantnacggctaggtacgaggctggggttnaatcggcacgagggtggtttgcttaggtgaggcgcagacggggaagcggagccaacatgccagtggcccggagctgggtttgtcgcaaaacttatgtgaccccgcggagacccttcgagaaatctcgtctcgaccaagagctgaagctgatcggcgagtatgggctccggaacaaacgtgaggtctggagggtcaaatttaccctggccaagatccgcaaggccgcccgggaactgctgacgcttgatgagaaggacccacggcgtctgttcgaaggcaacgccctgctgcggcggctggtccgcattggggtgctggatgagggcaagatgaagctggattacatcctgggcctgaagatagaggatttcttagagagacgcctgcagacccaggtcttcaagctgggcttggccaagtccatccaccacgctcgcgtgctgatccgccagcgccatatcagggtccgcaagcaggtggtgaacatcccgtccttcattgtccgcctggattcccagaagcacatcgacttctctctgcgctctccctacgggggtggccgcccgggccgcgtgaagaggaagaatgccaagaagggccagggtggggctggggctggagacgacgaggaggaggattaagtccacctgtccctcctgggctgctggattgtctcgttttcctgccaaataaacaggatcagcgctttacaa

SEQ ID NO: 432476 - DNA, 586 bp, Homo sapiens
aattcggaacgaggttttagctgttcttaggtagcccaggctgaagcgcagtggtgtgagctcggcttactgcaagctccacctcccgggttcacgccattctcctacctcagcctcccgagtagctgggactataggcacccgccaccatgcccggctaatttttgtatctttagtagagacggggtttcactgtgttagctaggatggtcttgatctcctgaccttgtgatccgcccaccttggcctcccaaggtactgcgattacaggcatgagctaccatgcccggccacaagacatagattttctatatgcacatcaagggaggtgctggtttaggttgctataggacagagctatcctgtattccagttggtttttgtagagaaacaattagacttctctagatagagccctgatttttctctcacgctttcagttttttaaaagcactaatgatatttcctgttttctcataagaaaaagtcaatactatgccttacaaagagacctttccttctaatatagaattttatttgaaagtgagtacatgtttataactagagaataaaaggagaatttttg

SEQ ID NO: 432477 - DNA, 762 bp, Homo sapiens
caatcctcaccctcccccaactctcaaatagacccggtgtcttgtttccctcttgtgttcatgtgtactcaatgtttatgtcccaaataaatatatggaaacatggtatttgattttctgctcctgcatgaattcacttaggataatggcctccagctccatccacgttgttgcaaagaacatgatctcattcttttttatggctgtgtagtattctatggtgtatgtgtgtcacattttctttatccagtctaccattgatgggcatgtggattgattctatgtctttgctattgtgaatagtgctgcagtgaacatacccatggatgtgtctttatgtgatttaacccattttataaatgaaaaactgatgtccagacaggccagacaatttctatacacccaggtggaaacaaagccaggattagagttccatgtcccaactccattgtgcatgtgttgcctctcatttttcttggatccctgtatattctcctaatttgataactaattgtttcatgtgagtttttcattttcaaaatactaaaatttttactttctgctgattgttgctagagttaatgattatgatttcaatatccctattttccttttttttttttttctctaaccccaactttagggaacagaagtcaaagcaataacatattcagcaatgcaggtctataatgaagagaacccggaagtttttgtgatcattgacatttaagacaccaaaaaataaaagactcctacgaagaa

SEQ ID NO: 432478 - DNA, 1030 bp, Homo sapiens
gcagcaagagggcagccattttcttgaaggctattaagcttacgaccctttcagagtactgagatgaaaaatctagaatgccttcgggtctagttatcaattttgggggtgaagcgggggaaagaacctcgccagtcagacccagacgggtttcattcaaggtgcccttcaacgtttttccttagtctttggaaagaactagtaatgaaggaatcgcagaagatggggttttggctttttaaatatgcgatccaagcggcagggtagggactaaagtaggtcaacagccaactccgagaaaggagtgtggtcctttaagggtgtgcgccaaggggcggagtctagagcggaagtagtaactccgggccgaagtccggtggatgaagggcggaagtagagtgtctaatcctgcagtcatggcgcaggaagaggaagatgttagagattacaatttgactgaagaacagaaggcgatcaaggccaagtatccgccagtcaataggaagtacgagtatttggatcatacagcagatgtccatggattgtattacacagagcatgaatatacttctttaggttacacgcatggggagatactctggaggaagcatttgagcaatgtgcaatggccatgtttggttacatgacagatactgggacagtggagcccctccaaacagtagaagtagaaacccaaggagatgacttacagtctcttctgtttcactttttggatgaatggctttataagttcagtgctgatgaattcttcataccccggagacagggtgttgctatgttgtcgaggctggtcttgaactcctggcttccggcgatcctcctgcctcaattttgcaaagtgctgggattacaggtggggagaagaattttcattgtccaagcaccctcagggaacagaagtcaaagcaataacatattcagcaatgcaggtctataatgaagagaacccggaagtttttgtgatcattgacatttaagacaccaaaaaataaaagactcctacgaagaa

SEQ ID NO: 432479 - DNA, 952 bp, Homo sapiens
gcagcaagagggcagccattttcttgaaggctattaagcttacgaccctttcagagtactgagatgaaaaatctagaatgccttcgggtctagttatcaattttgggggtgaagcgggggaaagaacctcgccagtcagacccagacgggtttcattcaaggtgcccttcaacgtttttccttagtctttggaaagaactagtaatgaaggaatcgcagaagatggggttttggctttttaaatatgcgatccaagcggcagggtagggactaaagtaggtcaacagccaactccgagaaaggagtgtggtcctttaagggtgtgcgccaaggggcggagtctagagcggaagtagtaactccgggccgaagtccggtggatgaagggcggaagtagagtgtctaatcctgcagtcatggcgcaggaagaggaagatgttagagattacaatttgactgaagaacagaaggcgatcaaggccaagtatccgccagtcaataggaagtacgagtatttggatcatacagcagatgtccagttacacgcatggggagatactctggaggaagcatttgagcaatgtgcaatggccatgtttggttacatgacagatactgggacagtggagcccctccaaacagtagaagtagaaacccaaggagatgacttacagtctcttctgtttcactttttggatgaatggctttataagttcagtgctgatgaattcttcataccccgggaagtgaaagtacttagcattgatcaaagaaatttcaaattacgatcaattgggtggggagaagaattttcattgtccaagcaccctcagggaacagaagtcaaagcaataacatattcagcaatgcaggtctataatgaagagaacccggaagtttttgtgatcattgacatttaagacaccaaaaaataaaagactcctacgaagaa

SEQ ID NO: 432480 - DNA, 996 bp, Homo sapiens
gcagcaagagggcagccattttcttgaaggctattaagcttacgaccctttcagagtactgagatgaaaaatctagaatgccttcgggtctagttatcaattttgggggtgaagcgggggaaagaacctcgccagtcagacccagacgggtttcattcaaggtgcccttcaacgtttttccttagtctttggaaagaactagtaatgaaggaatcgcagaagatggggttttggctttttaaatatgcgatccaagcggcagggtagggactaaagtaggtcaacagccaactccgagaaaggagtgtggtcctttaagggtgtgcgccaaggggcggagtctagagcggaagtagtaactccgggccgaagtccggtggatgaagggcggaagtagagtgtctaatcctgcagtcatggcgcaggaagaggaagatgttagagattacaatttgactgaagaacagaaggcgatcaaggccaagtatccgccagtcaataggaagtacgagtgtgagtaggtggcttacttctctctttacattggattgtattacacagagcatgaatatacttctttaggttacacgcatggggagatactctggaggaagcatttgagcaatgtgcaatggccatgtttggttacatgacagatactgggacagtggagcccctccaaacagtagaagtagaaacccaaggagatgacttacagtctcttctgtttcactttttggatgaatggctttataagttcagtgctgatgaattcttcataccccgggaagtgaaagtacttagcattgatcaaagaaatttcaaattacgatcaattgggtggggagaagaattttcattgtccaagcaccctcagggaacagaagtcaaagcaataacatattcagcaatgcaggtctataatgaagagaacccggaagtttttgtgatcattgacatttaagacaccaaaaaataaaagactcctacgaagaa

SEQ ID NO: 432481 - DNA, 515 bp, Homo sapiens
ccgggaattcccggtgtcgactactactactaaattcgcggccgcgtcgaggtgttagagattacaatttgactgaagaacagaaggcgatcaaggccaagtatccgccagtcaataggaagtacgagtatttggatcatacagcagatgtccagttacacgcatggggagatactctggaggaagcatttgagcaatgtgcaatggccatgtttggttacatgacagatactgggacagtggagcccctccaaacagtagaagtagaaacccaaggagatgacttacagtctcttctgtttcactttttggatgaatggctttataagttcagtgctgatgaattcttcataccccgggtggggagaagaattttcattgtccaagcaccctcagggaacagaagtcaaagcaataacatattcagcaatgcaggtctataatgaagagaacccggaagtttttgtgatcattgacatttaagacaccaaaaaataaaagactcctacgaagaa

SEQ ID NO: 432482 - DNA, 1093 bp, Homo sapiens
gcagcaagagggcagccattttcttgaaggctattaagcttacgaccctttcagagtactgagatgaaaaatctagaatgccttcgggtctagttatcaattttgggggtgaagcgggggaaagaacctcgccagtcagacccagacgggtttcattcaaggtgcccttcaacgtttttccttagtctttggaaagaactagtaatgaaggaatcgcagaagatggggttttggctttttaaatatgcgatccaagcggcagggtagggactaaagtaggtcaacagccaactccgagaaaggagtgtggtcctttaagggtgtgcgccaaggggcggagtctagagcggaagtagtaactccgggccgaagtccggtggatgaagggcggaagtagagtgtctaatcctgcagtcatggcgcaggaagaggaagatgttagagattacaatttgactgaagaacagaaggcgatcaaggccaagtatccgccagtcaataggaagtacgagtatttggatcatacagcagatgtccagtgagtatagcgggagttcattcctttgaaaccacgtcagtaggaagactgaatgtttcaatcttggtatccctatctttaatttttctcctctcattttggttccttcacaatatgaaaatgatggtttgaaagcactcagttttgcagggttcagtggctcagtgagccgagattgcaccactgcaccccagcctgggtgacagagagaccccatctcaaaaaataaaaaataaaaataaggccgggtgtggtggctcaacgcctgtggtcccagcactttgggaggctgaggcggacggatcatgaggtcaggagttcgagaccagcctgaccggcatggtggaaccccgtctctactaaaaatacaaaaattagccgggtctggtggtgcctgcctgtagtctcagctcccgagtagctgagattatacgcgcctgctaccacgcctggctaatttttggtattattagtatagacggggttacactgtgttggccaggctggtctgaagctcctgacctcaggatgatctgcccgcatcagccctcccaa

SEQ ID NO: 432483 - DNA, 669 bp, Homo sapiens
gcagcaagagggcagccattttcttgaaggctattaagcttacgaccctttcagagtactgagatgaaaaatctagaatgccttcgggtctagttatcaattttgggggtgaagcgggggaaagaacctcgccagtcagacccagacgggtttcattcaaggtgcccttcaacgtttttccttagtctttggaaagaactagtaatgaaggaatcgcagaagatggggttttggctttttaaatatgcgatccaagcggcagggtagggactaaagtaggtcaacagccaactccgagaaaggagtgtggtcctttaagggtgtgcgccaaggggcggagtctagagcggaagtagtaactccgggccgaagtccggtggatgaagggcggaagtagagtgtctaatcctgcagtcatggcgcaggaagaggaagatgttagagattacaatttgactgaagaacagaaggcgatcaaggccaagtatccgccagtcaataggaagtacgagtgtggggagaagaattttcattgtccaagcaccctcagggaacagaagtcaaagcaataacatattcagcaatgcaggtctataatgaagagaacccggaagtttttgtgatcattgacatttaagacaccaaaaaataaaagactcctacgaagaa

SEQ ID NO: 432484 - DNA, 853 bp, Homo sapiens
caatcctcaccctcccccaactctcaaatagacccggtgtcttgtttccctcttgtgttcatgtgtactcaatgtttatgtcccaaataaatatatggaaacatggtatttgattttctgctcctgcatgaattcacttaggataatggcctccagctccatccacgttgttgcaaagaacatgatctcattcttttttatggctgtgtagtattctatggtgtatgtgtgtcacattttctttatccagtctaccattgatgggcatgtggattgattctatgtctttgctattgtgaatagtgctgcagtgaacatacccatggatgtgtctttatgtgatttaacccattttataaatgaaaaactgatgtccagacaggccagacaatttctatacacccaggtggaaacaaagccaggattagagttccatgtcccaactccattgtgcatgtgttgcctctcatttttcttggatccctgtatattctcctaatttgataactaattgtttcatgtgagtttttcattttcaaaatactaaaatttttactttctgctgattgttgctagagttaatgattatgatttcaatatccctattttccttttttttttttttctctaaccccaactttagggaacagaagtcaaagcaataacatattcagcaatgcaggtctataatgaagagaacccggaagtttttgtgatcattgacatttaagacaccaaaaaataaaagactcctacgaagaaaaactaagcacgaccacacaaaacgaacaaattaaggagcaccacacaataagccactcctatattcgccacagtgaagacatataacaca

SEQ ID NO: 432485 - DNA, 1238 bp, Homo sapiens
gcagcaagagggcagccattttcttgaaggctattaagcttacgaccctttcagagtactgagatgaaaaatctagaatgccttcgggtctagttatcaattttgggggtgaagcgggggaaagaacctcgccagtcagacccagacgggtttcattcaaggtgcccttcaacgtttttccttagtctttggaaagaactagtaatgaaggaatcgcagaagatggggttttggctttttaaatatgcgatccaagcggcagggtagggactaaagtaggtcaacagccaactccgagaaaggagtgtggtcctttaagggtgtgcgccaaggggcggagtctagagcggaagtagtaactccgggccgaagtccggtggatgaagggcggaagtagagtgtctaatcctgcagtcatggcgcaggaagaggaagatgttagagattacaatttgactgaagaacagaaggcgatcaaggccaagtatccgccagtcaataggaagtacgagtatttggatcatacagcagatgtccagttacacgcatggggagatactctggaggaagcattcgagcaatgtgcaatggccatgtttggttacatgacagatactgggacagtggagcccctccaaacagtagaagtagaaacccaaggagatgacttacagtctcttctgtttcactttttggatgaatggctttataagttcagtgctgatgaattcttcataccccgggtggggagaagaattttcattgtccaagcaccctcagggaacagaagtcaaagcaataacatattcagcaatgcaggtctataatgaagagaacccggaagtttttgtgatcattgacatttaagacaccaaaaaataaaagactcctacgaagaactgtttttgttttcctcttccttttgagaagacactatgaattaaattctacagcttttttttgatatatggaaatttgtagaacagaaatattttagttaaagtgtgactttcagaaagggaaaatcagggcacagccttggtctgtgttccccaaatattcacactttaaagaattcttcaaccccccaagggacagttatggtcctttgattctctgctgtggcagtaggtgtgcctcatgcccttccagtgcaatgcaagccctccagcctcaccccagagaggatcactgatgtcagcagcagcctgaggctgaatccaggttgaaagaagaat

SEQ ID NO: 432486 - DNA, 694 bp, Homo sapiens
gcagcaagagggcagccattttcttgaaggctattaagcttacgaccctttcagagtactgagatgaaaaatctagaatgccttcgggtctagttatcaattttgggggtgaagcgggggaaagaacctcgccagtcagacccagacgggtttcattcaaggtgcccttcaacgtttttccttagtctttggaaagaactagtaatgaaggaatcgcagaagatggggttttggctttttaaatatgcgatccaagcggcagggtagggactaaagtaggtcaacagccaactccgagaaaggagtgtggtcctttaagggtgtgcgccaaggggcggagtctagagcggaagtagtaactccgggccgaagtccggtggatgaagggcggaagtagagtgtctaatcctgcagtcatggcgcaggaagaggaagatgttagagattacaatttgactgaagaacagaaggcgatcaaggccaagtatccgccagtcaataggaagtacgagtatttggatcatacagcagatgtccagtggggagaagaattttcattgtccaagcaccctcagggaacagaagtcaaagcaataacatattcagcaatgcaggtctataatgaagagaacccggaagtttttgtgatcattgacatttaagacaccaaaaaataaaagactcctacgaagaa

SEQ ID NO: 432487 - DNA, 209 bp, Homo sapiens
  misc_feature (61)..(63): n is a, c, g, or t
gtgttatgtttctttaaatttttcatcctattatactatatatcgtcgttctaggtggggnnnagattttcattgtccaagcaccctcagggaacagaagtcaaagcaataacatattcagcaatgcaggtctataatgaagagaacccggaagtttttgtgatcattgacatttaagacaccaaaaaataaaagactcctacgaagaa

SEQ ID NO: 432488 - DNA, 388 bp, Homo sapiens
ctgtactccagcctgggcgatggagtaaggctccatctcaaaaaaaaaaaaaaaaaaaaaaaaaaaggttttaccaatttttagtagatggtccaaaaaaacaaaacagaacaaaaagatttttagtagatagtctattatgaactttttttaattaaaaaatttttcttcctgtctaggaagtgaaagtacttagcattgatcaaagaaatttcaaattacgatcaattgggtggggagaagaattttcattgtccaagcaccctcagggaacagaagtcaaagcaataacatattcagcaatgcaggtctataatgaagagaacccggaagtttttgtgatcattgacatttaagacaccaaaaaataaaagactcctacgaagaa

SEQ ID NO: 432489 - DNA, 2001 bp, Homo sapiens
gcagcaagagggcagccattttcttgaaggctattaagcttacgaccctttcagagtactgagatgaaaaatctagaatgccttcgggtctagttatcaattttgggggtgaagcgggggaaagaacctcgccagtcagacccagacgggtttcattcaaggtgcccttcaacgtttttccttagtctttggaaagaactagtaatgaaggaatcgcagaagatggggttttggctttttaaatatgcgatccaagcggcagggtagggactaaagtaggtcaacagccaactccgagaaaggagtgtggtcctttaagggtgtgcgccaaggggcggagtctagagcggaagtagtaactccgggccgaagtccggtggatgaagggcggaagtagagtgtctaatcctgcagtcatggcgcaggaagaggaagatgttagagattacaatttgactgaagaacagaaggcgatcaaggccaagtatccgccagtcaataggaagtacgagtgtgagtaggtggcttacttctctctttacattggattgtattacacagagcatgaatatacttctttaggttacacgcatggggagatactctggaggaagcatttgagcaatgtgcaatggccatgtttggttacatgacagatactgggacagtggagcccctccaaacagtagaagtagaaacccaaggagatgacttacagtctcttctgtttcactttttggatgaatggctttataagttcagtgctgatgaattcttcataccccgggaagtgaaagtacttagcattgatcaaagaaatttcaaattacgatcaattgggtggggagaagaattttcattgtccaagcaccctcagggaacagaagtcaaagcaataacatattcagcaatgcaggtctataatgaagagaacccggaagtttttgtgatcattgacatttaagacaccaaaaaataaaagactcctacgaagaaactgtttttgttttcctcttccttttgagaagacactatgaattaaattctacagcttttttttgatatatggaaatttgtagaacagaaatattttagttaaagtgtgactttcagaaagggaaaatcagggcacagccttggtctgtgttccccaaatattcacactttaaagaattcttcaaccccccaagggacagttatggtcctttgattctctgctgtggcagtaggtgtgcctcatgcccttccagtgcaatgcaagccctccagcctcaccccagagaggatcactgatgtcagcagcagcctgaggctgaatccaggttgaaagaagaataacttgaaaaaatatatttccacacacagaattttgtttttcttccaagttggttaagacatatattttgtttctttttttttttttttttgagacggagtctcgctctgtagcccaggctgaagcgcagtggtgtgagctcggcttactgcaagctccacctcccgggttcacgccattctcctacctcagcctcccgagtagctgggactataggcacccgccaccatgcccggctaatttttgtatctttagtagagacggggtttcactgtgttagctaggatggtcttgatctcctgaccttgtgatccgcccaccttggcctcccaaggtactgcgattacaggcatgagctaccatgcccggccacaagacatagattttctatatgcacatcaagggaggtgctggtttaggttgctataggacagagctatcctgtattccagttggtttttgtagagaaacaattagacttctctagatagagccctgatttttctctcacgctttcagttttttaaaagcactaatgatatttcctgttttctcataagaaaaagtcaatactatgccttacaaagagacctttccttctaatatagaattttatttgaaagtgagtacatgtttataactagagaataaaaggagaatttttg

SEQ ID NO: 432490 - DNA, 1932 bp, Homo sapiens
gcagcaagagggcagccattttcttgaaggctattaagcttacgaccctttcagagtactgagatgaaaaatctagaatgccttcgggtctagttatcaattttgggggtgaagcgggggaaagaacctcgccagtcagacccagacgggtttcattcaaggtgcccttcaacgtttttccttagtctttggaaagaactagtaatgaaggaatcgcagaagatggggttttggctttttaaatatgcgatccaagcggcagggtagggactaaagtaggtcaacagccaactccgagaaaggagtgtggtcctttaagggtgtgcgccaaggggcggagtctagagcggaagtagtaactccgggccgaagtccggtggatgaagggcggaagtagagtgtctaatcctgcagtcatggcgcaggaagaggaagatgttagagattacaatttgactgaagaacagaaggcgatcaaggccaagtatccgccagtcaataggaagtacgagtgttacacgcatggggagatactctggaggaagcatttgagcaatgtgcaatggccatgtttggttacatgacagatactgggacagtggagcccctccaaacagtagaagtagaaacccaaggagatgacttacagtctcttctgtttcactttttggatgaatggctttataagttcagtgctgatgaattcttcataccccgggaagtgaaagtacttagcattgatcaaagaaatttcaaattacgatcaattgggtggggagaagaattttcattgtccaagcaccctcagggaacagaagtcaaagcaataacatattcagcaatgcaggtctataatgaagagaacccggaagtttttgtgatcattgacatttaagacaccaaaaaataaaagactcctacgaagaaactgtttttgttttcctcttccttttgagaagacactatgaattaaattctacagcttttttttgatatatggaaatttgtagaacagaaatattttagttaaagtgtgactttcagaaagggaaaatcagggcacagccttggtctgtgttccccaaatattcacactttaaagaattcttcaaccccccaagggacagttatggtcctttgattctctgctgtggcagtaggtgtgcctcatgcccttccagtgcaatgcaagccctccagcctcaccccagagaggatcactgatgtcagcagcagcctgaggctgaatccaggttgaaagaagaataacttgaaaaaatatatttccacacacagaattttgtttttcttccaagttggttaagacatatattttgtttctttttttttttttttttgagacggagtctcgctctgtagcccaggctgaagcgcagtggtgtgagctcggcttactgcaagctccacctcccgggttcacgccattctcctacctcagcctcccgagtagctgggactataggcacccgccaccatgcccggctaatttttgtatctttagtagagacggggtttcactgtgttagctaggatggtcttgatctcctgaccttgtgatccgcccaccttggcctcccaaggtactgcgattacaggcatgagctaccatgcccggccacaagacatagattttctatatgcacatcaagggaggtgctggtttaggttgctataggacagagctatcctgtattccagttggtttttgtagagaaacaattagacttctctagatagagccctgatttttctctcacgctttcagttttttaaaagcactaatgatatttcctgttttctcataagaaaaagtcaatactatgccttacaaagagacctttccttctaatatagaattttatttgaaagtgagtacatgtttataactagagaataaaaggagaatttttg

SEQ ID NO: 432491 - DNA, 1945 bp, Homo sapiens
  misc_feature (792)..(794): n is a, c, g, or t
gcagcaagagggcagccattttcttgaaggctattaagcttacgaccctttcagagtactgagatgaaaaatctagaatgccttcgggtctagttatcaattttgggggtgaagcgggggaaagaacctcgccagtcagacccagacgggtttcattcaaggtgcccttcaacgtttttccttagtctttggaaagaactagtaatgaaggaatcgcagaagatggggttttggctttttaaatatgcgatccaagcggcagggtagggactaaagtaggtcaacagccaactccgagaaaggagtgtggtcctttaagggtgtgcgccaaggggcggagtctagagcggaagtagtaactccgggccgaagtccggtggatgaagggcggaagtagagtgtctaatcctgcagtcatggcgcaggaagaggaagatgttagagattacaatttgactgaagaacagaaggcgatcaaggccaagtatccgccagtcaataggaagtacgagtgtgagtaggtggcttacttctctctttacattggattgtattacacagagcatgaatatacttctttaggttacacgcatggggagatactctggaggaagcatttgagcaatgtgcaatggccatgtttggttacatgacagatactgggacagtggagcccctccaaacagtagaagtagaaacccaaggagatgacttacagtctcttctgtttcactttttggatgaatggctttataagttcagtgctgatgaattcttcataccccggggggnnnagattttcattgtccaagcaccctcagggaacagaagtcaaagcaataacatattcagcaatgcaggtctataatgaagagaacccggaagtttttgtgatcattgacatttaagacaccaaaaaataaaagactcctacgaagaaactgtttttgttttcctcttccttttgagaagacactatgaattaaattctacagcttttttttgatatatggaaatttgtagaacagaaatattttagttaaagtgtgactttcagaaagggaaaatcagggcacagccttggtctgtgttccccaaatattcacactttaaagaattcttcaaccccccaagggacagttatggtcctttgattctctgctgtggcagtaggtgtgcctcatgcccttccagtgcaatgcaagccctccagcctcaccccagagaggatcactgatgtcagcagcagcctgaggctgaatccaggttgaaagaagaataacttgaaaaaatatatttccacacacagaattttgtttttcttccaagttggttaagacatatattttgtttctttttttttttttttttgagacggagtctcgctctgtagcccaggctgaagcgcagtggtgtgagctcggcttactgcaagctccacctcccgggttcacgccattctcctacctcagcctcccgagtagctgggactataggcacccgccaccatgcccggctaatttttgtatctttagtagagacggggtttcactgtgttagctaggatggtcttgatctcctgaccttgtgatccgcccaccttggcctcccaaggtactgcgattacaggcatgagctaccatgcccggccacaagacatagattttctatatgcacatcaagggaggtgctggtttaggttgctataggacagagctatcctgtattccagttggtttttgtagagaaacaattagacttctctagatagagccctgatttttctctcacgctttcagttttttaaaagcactaatgatatttcctgttttctcataagaaaaagtcaatactatgccttacaaagagacctttccttctaatatagaattttatttgaaagtgagtacatgtttataactagagaataaaaggagaatttttg

SEQ ID NO: 432492 - DNA, 1699 bp, Homo sapiens
gcagcaagagggcagccattttcttgaaggctattaagcttacgaccctttcagagtactgagatgaaaaatctagaatgccttcgggtctagttatcaattttgggggtgaagcgggggaaagaacctcgccagtcagacccagacgggtttcattcaaggtgcccttcaacgtttttccttagtctttggaaagaactagtaatgaaggaatcgcagaagatggggttttggctttttaaatatgcgatccaagcggcagggtagggactaaagtaggtcaacagccaactccgagaaaggagtgtggtcctttaagggtgtgcgccaaggggcggagtctagagcggaagtagtaactccgggccgaagtccggtggatgaagggcggaagtagagtgtctaatcctgcagtcatggcgcaggaagaggaagatgttagagattacaatttgactgaagaacagaaggcgatcaaggccaagtatccgccagtcaataggaagtacgagtatttggatcatacagcagatgtccagtggggagaagaattttcattgtccaagcaccctcagggaacagaagtcaaagcaataacatattcagcaatgcaggtctataatgaagagaacccggaagtttttgtgatcattgacatttaagacaccaaaaaataaaagactcctacgaagaaactgtttttgttttcctcttccttttgagaagacactatgaattaaattctacagcttttttttgatatatggaaatttgtagaacagaaatattttagttaaagtgtgactttcagaaagggaaaatcagggcacagccttggtctgtgttccccaaatattcacactttaaagaattcttcaaccccccaagggacagttatggtcctttgattctctgctgtggcagtaggtgtgcctcatgcccttccagtgcaatgcaagccctccagcctcaccccagagaggatcactgatgtcagcagcagcctgaggctgaatccaggttgaaagaagaataacttgaaaaaatatatttccacacacagaattttgtttttcttccaagttggttaagacatatattttgtttctttttttttttttttttgagacggagtctcgctctgtagcccaggctgaagcgcagtggtgtgagctcggcttactgcaagctccacctcccgggttcacgccattctcctacctcagcctcccgagtagctgggactataggcacccgccaccatgcccggctaatttttgtatctttagtagagacggggtttcactgtgttagctaggatggtcttgatctcctgaccttgtgatccgcccaccttggcctcccaaggtactgcgattacaggcatgagctaccatgcccggccacaagacatagattttctatatgcacatcaagggaggtgctggtttaggttgctataggacagagctatcctgtattccagttggtttttgtagagaaacaattagacttctctagatagagccctgatttttctctcacgctttcagttttttaaaagcactaatgatatttcctgttttctcataagaaaaagtcaatactatgccttacaaagagacctttccttctaatatagaattttatttgaaagtgagtacatgtttataactagagaataaaaggagaatttttg

SEQ ID NO: 432493 - DNA, 1970 bp, Homo sapiens
gcagcaagagggcagccattttcttgaaggctattaagcttacgaccctttcagagtactgagatgaaaaatctagaatgccttcgggtctagttatcaattttgggggtgaagcgggggaaagaacctcgccagtcagacccagacgggtttcattcaaggtgcccttcaacgtttttccttagtctttggaaagaactagtaatgaaggaatcgcagaagatggggttttggctttttaaatatgcgatccaagcggcagggtagggactaaagtaggtcaacagccaactccgagaaaggagtgtggtcctttaagggtgtgcgccaaggggcggagtctagagcggaagtagtaactccgggccgaagtccggtggatgaagggcggaagtagagtgtctaatcctgcagtcatggcgcaggaagaggaagatgttagagattacaatttgactgaagaacagaaggcgatcaaggccaagtatccgccagtcaataggaagtacgagtatttggatcatacagcagatgtccagtgagtatagcgggagttcattcctttgaaaccacgtcagtaggaagactgaatgtttcaatcttggttacacgcatggggagatactctggaggaagcatttgagcaatgtgcaatggccatgtttggttacatgacagatactgggacagtggagcccctccaaacagtagaagtagaaacccaaggagatgacttacagtctcttctgtttcactttttggatgaatggctttataagttcagtgctgatgaattcttcataccccgggtggggagaagaattttcattgtccaagcaccctcagggaacagaagtcaaagcaataacatattcagcaatgcaggtctataatgaagagaacccggaagtttttgtgatcattgacatttaagacaccaaaaaataaaagactcctacgaagaaactgtttttgttttcctcttccttttgagaagacactatgaattaaattctacagcttttttttgatatatggaaatttgtagaacagaaatattttagttaaagtgtgactttcagaaagggaaaatcagggcacagccttggtctgtgttccccaaatattcacactttaaagaattcttcaaccccccaagggacagttatggtcctttgattctctgctgtggcagtaggtgtgcctcatgcccttccagtgcaatgcaagccctccagcctcaccccagagaggatcactgatgtcagcagcagcctgaggctgaatccaggttgaaagaagaataacttgaaaaaatatatttccacacacagaattttgtttttcttccaagttggttaagacatatattttgtttctttttttttttttttttgagacggagtctcgctctgtagcccaggctgaagcgcagtggtgtgagctcggcttactgcaagctccacctcccgggttcacgccattctcctacctcagcctcccgagtagctgggactataggcacccgccaccatgcccggctaatttttgtatctttagtagagacggggtttcactgtgttagctaggatggtcttgatctcctgaccttgtgatccgcccaccttggcctcccaaggtactgcgattacaggcatgagctaccatgcccggccacaagacatagattttctatatgcacatcaagggaggtgctggtttaggttgctataggacagagctatcctgtattccagttggtttttgtagagaaacaattagacttctctagatagagccctgatttttctctcacgctttcagttttttaaaagcactaatgatatttcctgttttctcataagaaaaagtcaatactatgccttacaaagagacctttccttctaatatagaattttatttgaaagtgagtacatgtttataactagagaataaaaggagaatttttg

SEQ ID NO: 432494 - DNA, 1801 bp, Homo sapiens
tacgcgtgaatcctttatgagatttataagaacatcaacaaacagtaactgggcaagaattccaaagacatttctttagtcctctttcaataagcacattttctgacattaggtagtaataaaagacagtgctcatatcgaggcttactacatgcttttggaattgcaggattttgttatttaaatttagactgtgattctctgagtaactgtatatattgctttaccccaaatccactcaaatcctctgagcagcagtccttcgggtctaaatgcaatctgttagagattacaatttgactgaagaacagaaggcgatcaaggccaagtatccgccagtcaataggaagtacgagtatttggatcatacagcagatgtccagttacacgcatggggagatactctggaggaagcatttgagcaatgtgcaatggccatgtttggttacatgacagatactgggacagtggagcccctccaaacagtagaagtagaaacccaaggagatgacttacagtctcttctgtttcactttttggatgaatggctttataagttcagtgctgatgaattcttcataccccgggaagtgaaagtacttagcattgatcaaagaaatttcaaattacgatcaattgggtggggagaagaattttcattgtccaagcaccctcagggaacagaagtcaaagcaataacatattcagcaatgcaggtctataatgaagagaacccggaagtttttgtgatcattgacatttaagacaccaaaaaataaaagactcctacgaagaaactgtttttgttttcctcttccttttgagaagacactatgaattaaattctacagcttttttttgatatatggaaatttgtagaacagaaatattttagttaaagtgtgactttcagaaagggaaaatcagggcacagccttggtctgtgttccccaaatattcacactttaaagaattcttcaaccccccaagggacagttatggtcctttgattctctgctgtggcagtaggtgtgcctcatgcccttccagtgcaatgcaagccctccagcctcaccccagagaggatcactgatgtcagcagcagcctgaggctgaatccaggttgaaagaagaataacttgaaaaaatatatttccacacacagaattttgtttttcttccaagttggttaagacatatattttgtttctttttttttttttttttgagacggagtctcgctctgtagcccaggctgaagcgcagtggtgtgagctcggcttactgcaagctccacctcccgggttcacgccattctcctacctcagcctcccgagtagctgggactataggcacccgccaccatgcccggctaatttttgtatctttagtagagacggggtttcactgtgttagctaggatggtcttgatctcctgaccttgtgatccgcccaccttggcctcccaaggtactgcgattacaggcatgagctaccatgcccggccacaagacatagattttctatatgcacatcaagggaggtgctggtttaggttgctataggacagagctatcctgtattccagttggtttttgtagagaaacaattagacttctctagatagagccctgatttttctctcacgctttcagttttttaaaagcactaatgatatttcctgttttctcataagaaaaagtcaatactatgccttacaaagagacctttccttctaatatagaattttatttgaaagtgagtacatgtttataactagagaataaaaggagaatttttg

SEQ ID NO: 432495 - DNA, 1888 bp, Homo sapiens
  misc_feature (735)..(737): n is a, c, g, or t
attttcattgtataaaaattttaggaactagttgtgaaagctttaaaaggaaatttaagaactccaaaggccattatctttaggcatttaattgaagcctggcagctattttcccaaatgccatcaggaaagttttctttctcttacacatacacatgtgcaaattacactcccagattaaaaatcactactggcatgatagggaaatgacctcattcattctctctgtccccgcaaaaaaaaaaagattccaacaaagcaaagcaattagctttgttgagtgaatagatagcaaaaggtgtggatggactggcccacattttcttgctctttaaagatgatattcctaataataatggactagagttattttgtgtgtgtgatttgagagtcaagtttagtgtcttataagtgtttttccctctgtccctcagatttggatcatacagcagatgtccagtgagtatagcgggagttcattcctttgaaaccacgtcagtaggaagactgaatgtttcaatcttggttacacgcatggggagatactctggaggaagcatttgagcaatgtgcaatggccatgtttggttacatgacagatactgggacagtggagcccctccaaacagtagaagtagaaacccaaggagatgacttacagtctcttctgtttcactttttggatgaatggctttataagttcagtgctgatgaattcttcataccccggggggnnnagattttcattgtccaagcaccctcagggaacagaagtcaaagcaataacatattcagcaatgcaggtctataatgaagagaacccggaagtttttgtgatcattgacatttaagacaccaaaaaataaaagactcctacgaagaaactgtttttgttttcctcttccttttgagaagacactatgaattaaattctacagcttttttttgatatatggaaatttgtagaacagaaatattttagttaaagtgtgactttcagaaagggaaaatcagggcacagccttggtctgtgttccccaaatattcacactttaaagaattcttcaaccccccaagggacagttatggtcctttgattctctgctgtggcagtaggtgtgcctcatgcccttccagtgcaatgcaagccctccagcctcaccccagagaggatcactgatgtcagcagcagcctgaggctgaatccaggttgaaagaagaataacttgaaaaaatatatttccacacacagaattttgtttttcttccaagttggttaagacatatattttgtttctttttttttttttttttgagacggagtctcgctctgtagcccaggctgaagcgcagtggtgtgagctcggcttactgcaagctccacctcccgggttcacgccattctcctacctcagcctcccgagtagctgggactataggcacccgccaccatgcccggctaatttttgtatctttagtagagacggggtttcactgtgttagctaggatggtcttgatctcctgaccttgtgatccgcccaccttggcctcccaaggtactgcgattacaggcatgagctaccatgcccggccacaagacatagattttctatatgcacatcaagggaggtgctggtttaggttgctataggacagagctatcctgtattccagttggtttttgtagagaaacaattagacttctctagatagagccctgatttttctctcacgctttcagttttttaaaagcactaatgatatttcctgttttctcataagaaaaagtcaatactatgccttacaaagagacctttccttctaatatagaattttatttgaaagtgagtacatgtttataactagagaataaaaggagaatttttg

SEQ ID NO: 432496 - DNA, 2035 bp, Homo sapiens
gcagcaagagggcagccattttcttgaaggctattaagcttacgaccctttcagagtactgagatgaaaaatctagaatgccttcgggtctagttatcaattttgggggtgaagcgggggaaagaacctcgccagtcagacccagacgggtttcattcaaggtgcccttcaacgtttttccttagtctttggaaagaactagtaatgaaggaatcgcagaagatggggttttggctttttaaatatgcgatccaagcggcagggtagggactaaagtaggtcaacagccaactccgagaaaggagtgtggtcctttaagggtgtgcgccaaggggcggagtctagagcggaagtagtaactccgggccgaagtccggtggatgaagggcggaagtagagtgtctaatcctgcagtcatggcgcaggaagaggaagatgttagagattacaatttgactgaagaacagaaggcgatcaaggccaagtatccgccagtcaataggaagtacgagtatttggatcatacagcagatgtccatggattgtattacacagagcatgaatatacttctttaggttacacgcatggggagatactctggaggaagcatttgagcaatgtgcaatggccatgtttggttacatgacagatactgggacagtggagcccctccaaacagtagaagtagaaacccaaggagatgacttacagtctcttctgtttcactttttggatgaatggctttataagttcagtgctgatgaattcttcataccccggagacagggtgttgctatgttgtcgaggctggtcttgaactcctggcttccggcgatcctcctgcctcaattttgcaaagtgctgggattacaggtggggagaagaattttcattgtccaagcaccctcagggaacagaagtcaaagcaataacatattcagcaatgcaggtctataatgaagagaacccggaagtttttgtgatcattgacatttaagacaccaaaaaataaaagactcctacgaagaaactgtttttgttttcctcttccttttgagaagacactatgaattaaattctacagcttttttttgatatatggaaatttgtagaacagaaatattttagttaaagtgtgactttcagaaagggaaaatcagggcacagccttggtctgtgttccccaaatattcacactttaaagaattcttcaaccccccaagggacagttatggtcctttgattctctgctgtggcagtaggtgtgcctcatgcccttccagtgcaatgcaagccctccagcctcaccccagagaggatcactgatgtcagcagcagcctgaggctgaatccaggttgaaagaagaataacttgaaaaaatatatttccacacacagaattttgtttttcttccaagttggttaagacatatattttgtttctttttttttttttttttgagacggagtctcgctctgtagcccaggctgaagcgcagtggtgtgagctcggcttactgcaagctccacctcccgggttcacgccattctcctacctcagcctcccgagtagctgggactataggcacccgccaccatgcccggctaatttttgtatctttagtagagacggggtttcactgtgttagctaggatggtcttgatctcctgaccttgtgatccgcccaccttggcctcccaaggtactgcgattacaggcatgagctaccatgcccggccacaagacatagattttctatatgcacatcaagggaggtgctggtttaggttgctataggacagagctatcctgtattccagttggtttttgtagagaaacaattagacttctctagatagagccctgatttttctctcacgctttcagttttttaaaagcactaatgatatttcctgttttctcataagaaaaagtcaatactatgccttacaaagagacctttccttctaatatagaattttatttgaaagtgagtacatgtttataactagagaataaaaggagaatttttg

SEQ ID NO: 432497 - DNA, 1356 bp, Homo sapiens
gcagcaagagggcagccattttcttgaaggctattaagcttacgaccctttcagagtactgagatgaaaaatctagaatgccttcgggtctagttatcaattttgggggtgaagcgggggaaagaacctcgccagtcagacccagacgggtttcattcaaggtgcccttcaacgtttttccttagtctttggaaagaactagtaatgaaggaatcgcagaagatggggttttggctttttaaatatgcgatccaagcggcagggtagggactaaagtaggtcaacagccaactccgagaaaggagtgtggtcctttaagggtgtgcgccaaggggcggagtctagagcggaagtagtaactccgggccgaagtccggtggatgaagggcggaagtagagtgtctaatcctgcagtcatggcgcaggaagaggaagatgttagagattacaatttgactgaagaacagaaggcgatcaaggccaagtatccgccagtcaataggaagtacgagtatttggatcatacagcagatgtccagttacacgcatggggagatactctggaggaagcatttgagcaatgtgcaatggccatgtttggttacatgacagatactgggacagtggagcccctccaaacagtagaagtagaaacccaaggagatgacttacagtctcttctgtttcactttttggatgaatggctttataagttcagtgctgatgaattcttcataccccgggaagtgaaagtacttagcattgatcaaagaaatttcaaattacgatcaattgggtggggagaagaattttcattgtccaagcaccctcagggaacagaagtcaaagcaataacatattcagcaatgcaggtctataatgaagagaacccggaagtttttgtgatcattgacatttaagacaccaaaaaataaaagactcctacgaagaaaaaaaaaaaaaaaaaaaaaaaaaaaaaaaaaaaaaaaaaaaaaaaaaaaaaaaaaaaaaagaaaaaaaaaaaaaaaaaaaaaaaaaaaaaaaaaaaaagaaaaaaacaaaaaaaaaaaaaaaaaaaaaaaagaggagggggggaggccgatcatgaaaaagagggcgccaaagaggaaagaagaccaagaggcgaagaaagagagagaagaagagaagggggcaggcagcaaggagagcggagggcagagaaaacgacgagacaagcgtggaggaagaaaaaccagcaacgagaggaagacccggacagaaacagaaaaagacgtcgatgatgagagcaacaaaaaaacagaacgaagccaaaacaggagcagacgaacacacagaaaaaggagagcagaaaac

SEQ ID NO: 432498 - DNA, 1767 bp, Homo sapiens
caatcctcaccctcccccaactctcaaatagacccggtgtcttgtttccctcttgtgttcatgtgtactcaatgtttatgtcccaaataaatatatggaaacatggtatttgattttctgctcctgcatgaattcacttaggataatggcctccagctccatccacgttgttgcaaagaacatgatctcattcttttttatggctgtgtagtattctatggtgtatgtgtgtcacattttctttatccagtctaccattgatgggcatgtggattgattctatgtctttgctattgtgaatagtgctgcagtgaacatacccatggatgtgtctttatgtgatttaacccattttataaatgaaaaactgatgtccagacaggccagacaatttctatacacccaggtggaaacaaagccaggattagagttccatgtcccaactccattgtgcatgtgttgcctctcatttttcttggatccctgtatattctcctaatttgataactaattgtttcatgtgagtttttcattttcaaaatactaaaatttttactttctgctgattgttgctagagttaatgattatgatttcaatatccctattttccttttttttttttttctctaaccccaactttagggaacagaagtcaaagcaataacatattcagcaatgcaggtctataatgaagagaacccggaagtttttgtgatcattgacatttaagacaccaaaaaataaaagactcctacgaagaaactgtttttgttttcctcttccttttgagaagacactatgaattaaattctacagcttttttttgatatatggaaatttgtagaacagaaatattttagttaaagtgtgactttcagaaagggaaaatcagggcacagccttggtctgtgttccccaaatattcacactttaaagaattcttcaaccccccaagggacagttatggtcctttgattctctgctgtggcagtaggtgtgcctcatgcccttccagtgcaatgcaagccctccagcctcaccccagagaggatcactgatgtcagcagcagcctgaggctgaatccaggttgaaagaagaataacttgaaaaaatatatttccacacacagaattttgtttttcttccaagttggttaagacatatattttgtttctttttttttttttttttgagacggagtctcgctctgtagcccaggctgaagcgcagtggtgtgagctcggcttactgcaagctccacctcccgggttcacgccattctcctacctcagcctcccgagtagctgggactataggcacccgccaccatgcccggctaatttttgtatctttagtagagacggggtttcactgtgttagctaggatggtcttgatctcctgaccttgtgatccgcccaccttggcctcccaaggtactgcgattacaggcatgagctaccatgcccggccacaagacatagattttctatatgcacatcaagggaggtgctggtttaggttgctataggacagagctatcctgtattccagttggtttttgtagagaaacaattagacttctctagatagagccctgatttttctctcacgctttcagttttttaaaagcactaatgatatttcctgttttctcataagaaaaagtcaatactatgccttacaaagagacctttccttctaatatagaattttatttgaaagtgagtacatgtttataactagagaataaaaggagaatttttg

SEQ ID NO: 432499 - DNA, 1737 bp, Homo sapiens
agaaaagcacctggttgcagtgctgttaaattgattgaggccttaaaatttgtatttatcatactgaatttattttgactttgcctgctatcaaattttctttcttgcagtggattgtattacacagagcatgaatatacttctttaggttacacgcatggggagatactctggaggaagcatttgagcaatgtgcaatggccatgtttggttacatgacagatactgggacagtggagcccctccaaacagtagaagtagaaacccaaggtaaatgatttattcacaaggaagaaattgttatacagtactgtatagaattgtgcagtattctacataatctgagtatattttcacaaaaagaaccagaaaattaaggatgagtcttttctttctctttaaactgacctaagacatttatttattgcacttttaaattcaagtatgtttttagagaccagaattattaaatatactatttgatcttgtgtaggagatgacttacagtctcttctgtttcactttttggatgaatggctttataagttcagtgctgatgaattcttcataccccgggtggggagaagaattttcattgtccaagcaccctcagggaacagaagtcaaagcaataacatattcagcaatgcaggtctataatgaagagaacccggaagtttttgtgatcattgacatttaagacaccaaaaaataaaagactcctacgaagaaactgtttttgttttcctcttccttttgagaagacactatgaattaaattctacagcttttttttgatatatggaaatttgtagaacagaaatattttagttaaagtgtgactttcagaaagggaaaatcagggcacagccttggtctgtgttccccaaatattcacactttaaagaattcttcaaccccccaagggacagttatggtcctttgattctctgctgtggcagtaggtgtgcctcatgcccttccagtgcaatgcaagccctccagcctcaccccagagaggatcactgatgtcagcagcagcctgaggctgaatccaggttgaaagaagaataacttgaaaaaatatatttccacacacagaattttgtttttcttccaagttggttaagacatatattttgtttctttttttttttttttttgagacggagtctcgctctgtagcccaggctgaagcgcagtggtgtgagctcggcttactgcaagctccacctcccgggttcacgccattctcctacctcagcctcccgagtagctgggactataggcacccgccaccatgcccggctaatttttgtatctttagtagagacggggtttcactgtgttagctaggatggtcttgatctcctgaccttgtgatccgcccaccttggcctcccaaggtactgcgattacaggcatgagctaccatgcccggccacaagacatagattttctatatgcacatcaagggaggtgctggtttaggttgctataggacagagctatcctgtattccagttggtttttgtagagaaacaattagacttctctagatagagccctgatttttctctcacgctttcagttttttaaaagcactaatgatatttcctgttttctcataagaaaaagtcaatactatgccttacaaagagacctttccttctaatatagaattttatttgaaagtgagtacatgtttataactagagaataaaaggagaatttttg

SEQ ID NO: 432500 - DNA, 965 bp, Homo sapiens
gcagcaagagggcagccattttcttgaaggctattaagcttacgaccctttcagagtactgagatgaaaaatctagaatgccttcgggtctagttatcaattttgggggtgaagcgggggaaagaacctcgccagtcagacccagacgggtttcattcaaggtgcccttcaacgtttttccttagtctttggaaagaactagtaatgaaggaatcgcagaagatggggttttggctttttaaatatgcgatccaagcggcagggtagggactaaagtaggtcaacagccaactccgagaaaggagtgtggtcctttaagggtgtgcgccaaggggcggagtctagagcggaagtagtaactccgggccgaagtccggtggatgaagggcggaagtagagtgtctaatcctgcagtcatggcgcaggaagaggaagatgttagagattacaatttgactgaagaacagaaggcgatcaaggccaagtatccgccagtcaataggaagtacgagtatttggatcatacagcagatgtccagtgagtatagcgggagttcattcctttgaaaccacgtcagtaggaagactgaatgtttcaatcttggttacacgcatggggagatactctggaggaagcatttgagcaatgtgcaatggccatgtttggttacatgacagatactgggacagtggagcccctccaaacagtagaagtagaaacccaaggagatgacttacagtctcttctgtttcactttttggatgaatggctttataagttcagtgctgatgaattcttcataccccgggtggggagaagaattttcattgtccaagcaccctcagggaacagaagtcaaagcaataacatattcagcaatgcaggtctataatgaagagaacccggaagtttttgtgatcattgacatttaagacaccaaaaaataaaagactcctacgaagaa

SEQ ID NO: 432501 - DNA, 899 bp, Homo sapiens
gcagcaagagggcagccattttcttgaaggctattaagcttacgaccctttcagagtactgagatgaaaaatctagaatgccttcgggtctagttatcaattttgggggtgaagcgggggaaagaacctcgccagtcagacccagacgggtttcattcaaggtgcccttcaacgtttttccttagtctttggaaagaactagtaatgaaggaatcgcagaagatggggttttggctttttaaatatgcgatccaagcggcagggtagggactaaagtaggtcaacagccaactccgagaaaggagtgtggtcctttaagggtgtgcgccaaggggcggagtctagagcggaagtagtaactccgggccgaagtccggtggatgaagggcggaagtagagtgtctaatcctgcagtcatggcgcaggaagaggaagatgttagagattacaatttgactgaagaacagaaggcgatcaaggccaagtatccgccagtcaataggaagtacgagtatttggatcatacagcagatgtccagttacacgcatggggagatactctggaggaagcatttgagcaatgtgcaatggccatgtttggttacatgacagatactgggacagtggagcccctccaaacagtagaagtagaaacccaaggagatgacttacagtctcttctgtttcactttttggatgaatggctttataagttcagtgctgatgaattcttcataccccgggtggggagaagaattttcattgtccaagcaccctcagggaacagaagtcaaagcaataacatattcagcaatgcaggtctataatgaagagaacccggaagtttttgtgatcattgacatttaagacaccaaaaaataaaagactcctacgaagaa

SEQ ID NO: 432502 - DNA, 874 bp, Homo sapiens
gcagcaagagggcagccattttcttgaaggctattaagcttacgaccctttcagagtactgagatgaaaaatctagaatgccttcgggtctagttatcaattttgggggtgaagcgggggaaagaacctcgccagtcagacccagacgggtttcattcaaggtgcccttcaacgtttttccttagtctttggaaagaactagtaatgaaggaatcgcagaagatggggttttggctttttaaatatgcgatccaagcggcagggtagggactaaagtaggtcaacagccaactccgagaaaggagtgtggtcctttaagggtgtgcgccaaggggcggagtctagagcggaagtagtaactccgggccgaagtccggtggatgaagggcggaagtagagtgtctaatcctgcagtcatggcgcaggaagaggaagatgttagagattacaatttgactgaagaacagaaggcgatcaaggccaagtatccgccagtcaataggaagtacgagtgttacacgcatggggagatactctggaggaagcatttgagcaatgtgcaatggccatgtttggttacatgacagatactgggacagtggagcccctccaaacagtagaagtagaaacccaaggagatgacttacagtctcttctgtttcactttttggatgaatggctttataagttcagtgctgatgaattcttcataccccgggtggggagaagaattttcattgtccaagcaccctcagggaacagaagtcaaagcaataacatattcagcaatgcaggtctataatgaagagaacccggaagtttttgtgatcattgacatttaagacaccaaaaaataaaagactcctacgaagaa

SEQ ID NO: 432503 - DNA, 805 bp, Homo sapiens
gcagcaagagggcagccattttcttgaaggctattaagcttacgaccctttcagagtactgagatgaaaaatctagaatgccttcgggtctagttatcaattttgggggtgaagcgggggaaagaacctcgccagtcagacccagacgggtttcattcaaggtgcccttcaacgtttttccttagtctttggaaagaactagtaatgaaggaatcgcagaagatggggttttggctttttaaatatgcgatccaagcggcagggtagggactaaagtaggtcaacagccaactccgagaaaggagtgtggtcctttaagggtgtgcgccaaggggcggagtctagagcggaagtagtaactccgggccgaagtccggtggatgaagggcggaagtagagtgtctaatcctgcagtcatggcgcaggaagaggaagatgttagagattacaatttgactgaagaacagaaggcgatcaaggccaagtatccgccagtcaataggaagtacgagtgagatgacttacagtctcttctgtttcactttttggatgaatggctttataagttcagtgctgatgaattcttcataccccgggaagtgaaagtacttagcattgatcaaagaaatttcaaattacgatcaattgggtggggagaagaattttcattgtccaagcaccctcagggaacagaagtcaaagcaataacatattcagcaatgcaggtctataatgaagagaacccggaagtttttgtgatcattgacatttaagacaccaaaaaataaaagactcctacgaagaa

SEQ ID NO: 432504 - DNA, 1299 bp, Homo sapiens
gcagcaagagggcagccattttcttgaaggctattaagcttacgaccctttcagagtactgagatgaaaaatctagaatgccttcgggtctagttatcaattttgggggtgaagcgggggaaagaacctcgccagtcagacccagacgggtttcattcaaggtgcccttcaacgtttttccttagtctttggaaagaactagtaatgaaggaatcgcagaagatggggttttggctttttaaatatgcgatccaagcggcagggtagggactaaagtaggtcaacagccaactccgagaaaggagtgtggtcctttaagggtgtgcgccaaggggcggagtctagagcggaagtagtaactccgggccgaagtccggtggatgaagggcggaagtagagtgtctaatcctgcagtcatggcgcaggaagaggaagatgttagagattacaatttgactgaagaacagaaggcgatcaaggccaagtatccgccagtcaataggaagtacgagtatttggatcatacagcagatgtccagtgagtatagcgggagttcattcctttgaaaccacgtcagtaggaagactgaatgtttcaatcttggttacacgcatggggagatactctggaggaagcatttgagcaatgtgcaatggccatgtttggttacatgacagatactgggacagtggagcccctccaaacagtagaagtagaaacccaaggagatgacttacagtctcttctgtttcactttttggatgaatggctttataagttcagtgctgatgaattcttcataccccgggaagtgaaagtacttagcattgatcaaagaaatttcaaattacgatcaattgggtggggagaagaattttcattgtccaagcaccctcagggaacagaagtcaaagcaataacatattcagcaatgcaggtctataatgaagagaacccggaagtttttgtgatcattgacatttaagacaccaaaaaataaaagactcctacgaagaaaaaaaaaaaaaaaaaaaaaaaaaaaaaaaaaaaagaaaaaaacaaaaaaaaaaaaaaaaaagggggggggcacaaaagatatcccaagaaggggcccacagagaaagcggaacaccaaaatgtcaggacaaagagggggacccaaaatgggggaggagcgtatatagaaaggagaagagaagcgggaaagagagtagagaaagaagagagagatggagaaaaacacgggagacagagagagacacacaagagagacaacacacacacacacggagggggcg

SEQ ID NO: 432505 - DNA, 1134 bp, Homo sapiens
gcagcaagagggcagccattttcttgaaggctattaagcttacgaccctttcagagtactgagatgaaaaatctagaatgccttcgggtctagttatcaattttgggggtgaagcgggggaaagaacctcgccagtcagacccagacgggtttcattcaaggtgcccttcaacgtttttccttagtctttggaaagaactagtaatgaaggaatcgcagaagatggggttttggctttttaaatatgcgatccaagcggcagggtagggactaaagtaggtcaacagccaactccgagaaaggagtgtggtcctttaagggtgtgcgccaaggggcggagtctagagcggaagtagtaactccgggccgaagtccggtggatgaagggcggaagtagagtgtctaatcctgcagtcatggcgcaggaagaggaagatgttagagattacaatttgactgaagaacagaaggcgatcaaggccaagtatccgccagtcaataggaagtacgagtgtgagtaggtggcttacttctctctttacattggattgtattacacagagcatgaatatacttctttaggttacacgcatggggagatactctggaggaagcatttgagcaatgtgcaatggccatgtttggttacatgacagatactgggacagtggagcccctccaaacagtagaagtagaaacccaaggagatgacttacagtctcttctgtttcactttttggatgaatggctttataagttcagtgctgatgaattcttcataccccggaagttgtgtgctattgttttctagaaaaggttgtaaaggccaggcgcggtggcttacgcctgtaatcccagcactttgggaagccgaggcaggtggatcacctgaggtcaggagttcgagaccagtctgaccaataaggaagtgaaagtacttagcattgatcaaagaaatttcaaattacgatcaattgggtggggagaagaattttcattgtccaagcaccctcagggaacagaagtcaaagcaataacatattcagcaatgcaggtctataatgaagagaacccggaagtttttgtgatcattgacatttaagacaccaaaaaataaaagactcctacgaagaa

SEQ ID NO: 432506 - DNA, 940 bp, Homo sapiens
  misc_feature (792)..(794): n is a, c, g, or t
gcagcaagagggcagccattttcttgaaggctattaagcttacgaccctttcagagtactgagatgaaaaatctagaatgccttcgggtctagttatcaattttgggggtgaagcgggggaaagaacctcgccagtcagacccagacgggtttcattcaaggtgcccttcaacgtttttccttagtctttggaaagaactagtaatgaaggaatcgcagaagatggggttttggctttttaaatatgcgatccaagcggcagggtagggactaaagtaggtcaacagccaactccgagaaaggagtgtggtcctttaagggtgtgcgccaaggggcggagtctagagcggaagtagtaactccgggccgaagtccggtggatgaagggcggaagtagagtgtctaatcctgcagtcatggcgcaggaagaggaagatgttagagattacaatttgactgaagaacagaaggcgatcaaggccaagtatccgccagtcaataggaagtacgagtgtgagtaggtggcttacttctctctttacattggattgtattacacagagcatgaatatacttctttaggttacacgcatggggagatactctggaggaagcatttgagcaatgtgcaatggccatgtttggttacatgacagatactgggacagtggagcccctccaaacagtagaagtagaaacccaaggagatgacttacagtctcttctgtttcactttttggatgaatggctttataagttcagtgctgatgaattcttcataccccggggggnnnagattttcattgtccaagcaccctcagggaacagaagtcaaagcaataacatattcagcaatgcaggtctataatgaagagaacccggaagtttttgtgatcattgacatttaagacaccaaaaaataaaagactcctacgaagaa

SEQ ID NO: 432507 - DNA, 1036 bp, Homo sapiens
gcagcaagagggcagccattttcttgaaggctattaagcttacgaccctttcagagtactgagatgaaaaatctagaatgccttcgggtctagttatcaattttgggggtgaagcgggggaaagaacctcgccagtcagacccagacgggtttcattcaaggtgcccttcaacgtttttccttagtctttggaaagaactagtaatgaaggaatcgcagaagatggggttttggctttttaaatatgcgatccaagcggcagggtagggactaaagtaggtcaacagccaactccgagaaaggagtgtggtcctttaagggtgtgcgccaaggggcggagtctagagcggaagtagtaactccgggccgaagtccggtggatgaagggcggaagtagagtgtctaatcctgcagtcatggcgcaggaagaggaagatgttagagattacaatttgactgaagaacagaaggcgatcaaggccaagtatccgccagtcaataggaagtacgagtgtgagtaggtggcttacttctctctttacattggattgtattacacagagcatgaatatacttctttaggttacacgcatggggagatactctggaggaagcatttgagcaatgtgcaatggccatgtttggttacatgacagatactgggacagtggagcccctccaaacagtagaagtagaaacccaaggagatgacttacagtctcttctgtttcactttttggatgaatggctttataagttcagtgctgatgaattcttcataccccggagacagggtgttgctatgttgtcgaggctggtcttgaactcctggcttccggcgatcctcctgcctcaattttgcaaagtgctgggattacaggtggggagaagaattttcattgtccaagcaccctcagggaacagaagtcaaagcaataacatattcagcaatgcaggtctataatgaagagaacccggaagtttttgtgatcattgacatttaagacaccaaaaaataaaagactcctacgaagaa

SEQ ID NO: 432508 - DNA, 1014 bp, Homo sapiens
attttcattgtataaaaattttaggaactagttgtgaaagctttaaaaggaaatttaagaactccaaaggccattatctttaggcatttaattgaagcctggcagctattttcccaaatgccatcaggaaagttttctttctcttacacatacacatgtgcaaattacactcccagattaaaaatcactactggcatgatagggaaatgacctcattcattctctctgtccccgcaaaaaaaaaaagattccaacaaagcaaagcaattagctttgttgagtgaatagatagcaaaaggtgtggatggactggcccacattttcttgctctttaaagatgatattcctaataataatggactagagttattttgtgtgtgtgatttgagagtcaagtttagtgtcttataagtgtttttccctctgtccctcagatttggatcatacagcagatgtccagtgagtatagcgggagttcattcctttgaaaccacgtcagtaggaagactgaatgtttcaatcttggtatccctatctttaatttttctcctctcattttggttccttcacaatatgaaaatgatggtttgaaagcactcagttttgcagggttcagtggctcagtgagccgagattgcaccactgcaccccagcctgggtgacagagagaccccatctcaaaaaataaaaaataaaaataaggccgggtgtggtggctcaacgcctgtggtcccagcactttgggaggctgaggcggacggatcatgaggtcaggagttcgagaccagcctgaccggcatggtggaaccccgtctctactaaaaatacaaaaattagccgggtctggtggtgcctgcctgtagtctcagctcccgagtagctgagattatacgcgcctgctaccacgcctggctaatttttggtattattagtatagacggggttacactgtgttggccaggctggtctgaagctcctgacctcaggatgatctgcccgcatcagccctcccaa

SEQ ID NO: 432509 - DNA, 705 bp, Homo sapiens
  misc_feature (632)..(632): n is a, c, g, or t
gcagcaagagggcagccattttcttgaaggctattaagcttacgaccctttcagagtactgagatgaaaaatctagaatgccttcgggtctagttatcaattttgggggtgaagcgggggaaagaacctcgccagtcagacccagacgggtttcattcaaggtgcccttcaacgtttttccttagtctttggaaagaactagtaatgaaggaatcgcagaagatggggttttggctttttaaatatgcgatccaagcggcagggtagggactaaagtaggtcaacagccaactccgagaaaggagtgtggtcctttaagggtgtgcgccaaggggcggagtctagagcggaagtagtaactccgggccgaagtccggtggatgaagggcggaagtagagtgtctaatcctgcagtcatggcgcaggaagaggaagatgttagagattacaatttgactgaagaacagaaggcgatcaaggccaagtatccgccagtcaataggaagtacgagtagccaagatcttgctgtatcgtccaggctgaagtgcagtggcaccatcatagctcactgcatcctttactcagtgatcctaaggctcaagtgatcctcccacccgagcctcctgagtanctgagactacaggcatgtgccaccacgcccacctaatttttaaagttttttgtagagactgcgactttttatg

SEQ ID NO: 432510 - DNA, 493 bp, Homo sapiens
gtgttgctatgttgtcgaggctggtcttgaactcctggcttccggcgatcctcctgcctcaattttgcaaagtgctgggattacaggtgtgagcattgcacgcagcctcatccacactttttatgtttcccaagtttgagctatatttatgtccatccattttttccttttgttccatgaaatttagtagccctgtcacattggcctaagttaaacaactgcagcttttagttttccttaacatgaaaaaaggaaaagccaaatggagattgcttgctgctgtcatcctttagaagggaacacatctgcaatgtcattgttatttaatagagatggcactctctgcttttataattcctccattctctgctttaccagcttcactacttatactcattctatcaactgagtcactcatcctacagaattcaagtgcctaccagtagtttattaggctcagagtgattgaaatcctatgtcgtcctcctccacc

SEQ ID NO: 432511 - DNA, 712 bp, Homo sapiens
atggcactctagcctgtgggcaaaagagcgaaactccgtctcaaaaaaaaaaaaaaaaacaaaaaaccggtgggcctgctatctccctccgtcctggaggaagggggcatcaggggcagaccagaggacagagttgacttacggagaggaaatgcctgatcgggagggtcaggatgggttcctgccatcacaggtccagaggcagctcaagtcttttccttgccctggcccttgaaacacaggcgggttgctgggagggaggagatggagcagatgcatcgctgccatcacttctggctgagaactcttcacaaccccttgaacagcaagtcggtagcaccgtgctgagaagtctgggcatgccagggttgagcagaagcctgtgtggggtcacggtcgcaggttatgacaaggcagtgaacaccccacagctcacaaagcagaagtgcagttacataggccagtgagggtcccgtgacaggggtcaagaaagggattccgaggccaataagccctcctttctcttggcattttgggaatgccatctctgctgctccgtggtcccgcagagagctcggggctatgctgagccgaggcctcccagggtgcctgctgtgccttcactgtttcagtcagggacttgccagctatggaatgccattaaggtcacctttcccgggcctccaagaaccttgcaattatgaaaaaaaaa

SEQ ID NO: 432512 - DNA, 6980 bp, Homo sapiens
  misc_feature (3)..(5): n is a, c, g, or t
  misc_feature (9)..(9): n is a, c, g, or t
  misc_feature (2794)..(2794): n is a, c, g, or t
aannnctgntccccccggtaatgagggggctgagctgtccctccgaggagggggcctggtgtggataaaagagacgaaaaagccgggggaggtttccaaaaataaaaccgtccgggtccccttcagacggctgcaggcacagggaggaggcgcgaaggtgcagcagccgtgcgagcccagctggagtaggagcgcggactcgaggctcggggcgcgcagccctcgttccgccgagagccgggcccccagtcggccgcttcagggccccctagactcagagaagctggccgccgggcggggccgggagaacagcccgcgggcgtccagcgtgccgaccacaaagctcttcgcggtgcccgcgcgcaccactctccagccgccccgcgccatgaggccgcggaccaaagcccgcagcccggggcgcgccctgcggaacccctggagaggcttcctgccgctcaccctggctctcttcgtgggcgcgggtcatgcccaaagggaccccgtagggagatacgagccggctggtggagacgcgaatcgactgcggcgccctgggggcagctacccggcagcggctgcagccaaggtgtacagtctgttccgggagcaggacgcgcctgtcgcgggcttgcagcccgtggagcgggcccagccgggctgggggagccccaggaggcccaccgaggcggaggccaggaggccgtcccgcgcgcagcagtcgcggcgtgtccagccacctgcgcagacccggagaagcactcccctgggccagcagcaaccagcaccccggacccgggccgcgccggctctcccacgcctggggaccccacagcggtctggggctgcgcccccaaccccgccgcgagggcggctcacggggaggaacgtctgcgggggacagtgctgcccaggatggacaacagcaaacagcaccaaccactgtatcaaacccgtttgcgagccgccgtgccagaaccggggctcctgcagccgcccgcagctctgtgtctgccgctctggtttccgtggagcccgctgcgaggaggtcattcccgatgaggaatttgacccccagaactccaggctggcacctcgacgctgggccgagcgttcacccaacctgcgcaggagcagtgcggctggagagggcaccttggccagagcacagccgccagcaccacagtcgccgcccgcaccacagtcgccaccagctgggaccctgagtggcctcagccagacccacccttcccagcagcacgtggggttgtcccgcactgtccgacttcacccgactgccacggccagtagccagctctcttccaacgccctgcccccgggaccaggccttgagcagagagatggcacccaacaggcggtacctctggagcacccctcatccccctgggggctgaacctcacggagaaaatcaagaagatcaagatcgtcttcactcccaccatctgcaagcagacctgtgcccgtggacactgtgccaacagctgtgagaggggcgacaccaccaccctgtacagccagggcggccatgggcacgatcccaagtctggcttccgcatctatttctgccagatcccctgcctgaacggaggccgctgcatcggcagggacgaatgctggtgccccgccaactccaccgggaagttctgccacctgcctatcccgcagccggacagggagcctccagggagggggtcccgccccagggccttgctggaagccccactgaagcagtccactttcacactgccgctctccaaccagctggcctccgtgaacccctccctggtgaaggtgcacattcaccacccacccgaggcctcagtgcagatccaccaggtggcccaggtgcggggcggggtggaggaggccctagtggagaacagcgtggagaccagacccccgccctggctgcctgccagccctggccacagcctctgggacagcaacaacatccctgctcggtctggagagccccctcggccactgcccccagcagcacccaggcctcgaggactgctgggccggtgttacctgaacactgtgaacggacagtgtgccaaccctctgctggagctgactacccaggaggactgctgtggcagtgtgggagccttctggggggtgactttgtgtgccccatgcccacccagaccagcctccccggtgattgagaatggccagctggagtgtcctcaggggtacaagagactgaacctcactcactgccaagatatcaacgagtgcttgaccctgggcctgtgcaaggacgcggagtgtgtgaataccaggggcagctacctgtgcacatgcagacctggcctcatgctggatccatcgcggagccgctgtgtgtcggacaaggcaatctccatgctgcagggactgtgctaccggtcgctggggcccggcacctgcaccctgcctttggcccagcggatcaccaagcagatatgctgctgcagccgcgtgggcaaagcatggggcagcgagtgtgagaaatgccctctgcctggcacagaggccttcagagagatctgccctgccggccacggctacacctacgcgagctccgacatccgcctgtccatgaggaaagccgaggaggaggaactggcaaggcccccaagggagcaagggcagaggagcagcggggcactgcccgggccagcagagaggcagcccctccgggtcgtcacggacacctggcttgaggccgggaccatccctgacaagggtgactctcaggctggccaggtcacgaccagtgtcacncatgcacctgcctgggtcacagggaatgccacaaccccaccaatgcctgaacaggggattgcagagatacaggaagaacaagtgaccccctccaccgatgtgctggtgaccctgagcaccccaggcattgacagatgcgctgctggagccaccaacgtctgtggccctggaacctgcgtgaacctccccgatggatacagatgtgtctgcagccctggctaccagctgcaccccagccaggcctactgcacagatgacaacgagtgtctgagggacccctgcaagggaaaagggcgctgcatcaaccgcgtggggtcctactcctgcttctgctaccctggctacactctggccacctcaggggcgacacaggagtgtcaagatatcaatgagtgtgagcagccaggggtgtgcagcggggggcagtgcaccaacaccgagggctcgtaccactgcgagtgtgatcagggctacatcatggtcaggaaaggacactgccaagatatcaacgaatgccgtcaccccggtacctgccctgatgggagatgcgtcaattcccctggctcctacacttgtctggcctgtgaggagggctaccggggccagagtgggagctgtgtagatgtgaatgagtgtctgactcccggggtctgtgcccatggaaagtgcaccaacctagaaggctccttcagatgctcttgtgagcagggctatgaggtcacctcagatgagaagggctgccaagatgtggatgagtgtgccagccgggcctcatgccccacaggcctctgcctcaacacggagggctccttcgcctgctctgcctgtgagaacgggtactgggtgaatgaagacggcactgcctgtgaagacctagatgagtgtgccttcccgggagtctgcccctccggagtctgcaccaacacggctggctccttctcctgcaaggactgcgatgggggctaccggcccagccccctgggtgactcctgtgaagatgtggatgaatgtgaagacccccagagcagctgcctgggaggcgagtgcaagaacactgtgggctcctaccagtgcctctgtccccagggcttccagctggccaatggcaccgtgtgtgaggatgtgaatgagtgcatgggggaggagcactgcgcaccccacggcgagtgcctcaacagccacgggtctttcttctgtctgtgcgcgcctggcttcgtcagcgcagaggggggcaccagctgccaggatgtggacgagtgtgccaccacagacccgtgtgtgggagggcactgtgtcaacaccgagggctccttcaactgtctatgtgagactggcttccagccctccccagagagtggagagtgtgtggatattgacgagtgtgaggactatggagacccggtgtgtggcacctggaagtgtgaaaacagccctggctcctaccgctgtgttctgggctgccagcctggcttccacatggccccgaacggagactgcattgacatagacgagtgcgccaacgacaccatgtgtggcagccacggcttctgtgacaacactgatggctccttccgctgcctctgtgaccagggcttcgagatctctccctcaggctgggactgtgtggatgtgaacgagtgtgagcttatgctggcggtatgtggggccgcgctctgtgagaacgtggagggctccttcctgtgcctctgtgccagtgacctggaggagtacgatgcccaggaggggcactgccgcccacggggggctggaggtcagagtatgtctgaggccccaacgggggaccatgccccggcccccacccgcatggactgctactccgggcagaagggccatgcgccctgctccagtgtcctgggccggaacaccacacaggctgaatgctgctgcacccagggcgctagctggggagatgcctgtgacctctgcccgtctgaggactcagctgaattcagcgagatctgccctagtggaaaaggctacattcctgtggaaggagcctggacgtttggacagaccatgtacacagatgcggatgagtgtgtgatattcgggcctggtctctgcccgaacggccggtgcctcaacaccgtgcctggttatgtctgcctgtgcaatcccggcttccactacgatgcttcccacaagaagtgtgaggatcacgatgagtgccaggacctggcctgtgagaatggcgagtgcgtcaacacggagggctccttccactgcttctgcagccccccgctcaccctggacctcagccagcagcgctgcatgaacagcaccagcagcacggaggacctccctgaccacgacatccacatggacatctgctggaaaaaagtcaccaatgatgtgtgcagcgaacccctgcgtgggcaccgcaccacctacacggaatgctgctgccaggacggcgaggcctggagccagcagtgtgctctgtgtcccccgaggagctctgaggtctatgctcagctgtgcaacgtggctcgcattgaggcagagcgggaggccggggtccacttccggccaggctatgagtatggccccgggcccgatgacctgcactacagcatctatggcccagatggggcccccttctacaactacctgggccccgaggacaccgtccctgagcctgccttccccaacacagccggtcactcagcggaccgcacacccatccttgagtctcctttgcagccctcagaactccagccccactacgtggccagccatccagagcccccagccggcttcgaagggcttcaggcggaggagtgcggcatcctgaacggctgtgagaatggccgctgtgtgcgcgtgcgggagggctacacctgtgactgttttgagggcttccagctggatgcggcccacatggcctgcgtagatgtgaatgagtgtgatgacttgaacgggcctgctgtgctctgtgtccatggttactgcgagaacacagagggctcctaccgctgccactgctccccgggatatgtggctgaggcagggcccccccactgcactgccaaggagtagcagtcaggggtcagtgtggcaactacctggaaatggcctccagtcacaggcaggggccttgaggatgatttcctagctgggaagacaccgtgacatcaggccagaggtttccaatcagccttgcctgctttcatctctcccagcttagcctctggctgtaagcttcggtcattgcctccatgcccttgcttggctcaagcaccaccaatcgctttaatgcttcagccaccgcatgaggccctgtccaccacctttcctggccttgctatgggatgcttaccaaaggatggccctcatccaccctcccaagctgtgcgagcatgcaaggccccatggcctcacactgcagacacccctttccagccacaatccaccatcatcctgacgatcccacaactgggacagaggctacatctgccctagggaggtccttcagaatctgtggagcaagaaaggatttggggaagcttggggactgactccagagccccctcctaagaaccatcaccaccactcagccaatctgttctgggccctgattttgccacacctccatcctgtagcccattctctgaccccaaggagtggcagaagatcccttcactcagagaagcaaggctgatattagcttgttgaatgtaagagacacaaatgaagaagaacaaagagcctgagaaagcagcaagaggacatgatgaaaaatacgtggagttgatgagaaaggggagccaaggctttatacgtctaaagaaaatattcagtagctgaatccgcccagtgatagcctgtgggcaccagcagcaagggctgccatgggatacagtacccatctacaaagacctctattacataaacactgcttcttacaggaaacaaacctcttctgggatctccttttgtgaaaaccagtttgatgtgctaaaagtaaaaagtctattttccagtgtggtcttgttcagaagcagccagatttccaatgttgtttttcccctccactcagaaacccctgccctttcccttcagaaaacgatggcaggcattcctctgagtttacaagcagagactcactccaacccaaactagctgggagttcagaaccatggtggaataaagaaatgtgcatctg

SEQ ID NO: 432513 - DNA, 8577 bp, Homo sapiens
  misc_feature (3)..(5): n is a, c, g, or t
  misc_feature (9)..(9): n is a, c, g, or t
  misc_feature (2794)..(2794): n is a, c, g, or t
aannnctgntccccccggtaatgagggggctgagctgtccctccgaggagggggcctggtgtggataaaagagacgaaaaagccgggggaggtttccaaaaataaaaccgtccgggtccccttcagacggctgcaggcacagggaggaggcgcgaaggtgcagcagccgtgcgagcccagctggagtaggagcgcggactcgaggctcggggcgcgcagccctcgttccgccgagagccgggcccccagtcggccgcttcagggccccctagactcagagaagctggccgccgggcggggccgggagaacagcccgcgggcgtccagcgtgccgaccacaaagctcttcgcggtgcccgcgcgcaccactctccagccgccccgcgccatgaggccgcggaccaaagcccgcagcccggggcgcgccctgcggaacccctggagaggcttcctgccgctcaccctggctctcttcgtgggcgcgggtcatgcccaaagggaccccgtagggagatacgagccggctggtggagacgcgaatcgactgcggcgccctgggggcagctacccggcagcggctgcagccaaggtgtacagtctgttccgggagcaggacgcgcctgtcgcgggcttgcagcccgtggagcgggcccagccgggctgggggagccccaggaggcccaccgaggcggaggccaggaggccgtcccgcgcgcagcagtcgcggcgtgtccagccacctgcgcagacccggagaagcactcccctgggccagcagcaaccagcaccccggacccgggccgcgccggctctcccacgcctggggaccccacagcggtctggggctgcgcccccaaccccgccgcgagggcggctcacggggaggaacgtctgcgggggacagtgctgcccaggatggacaacagcaaacagcaccaaccactgtatcaaacccgtttgcgagccgccgtgccagaaccggggctcctgcagccgcccgcagctctgtgtctgccgctctggtttccgtggagcccgctgcgaggaggtcattcccgatgaggaatttgacccccagaactccaggctggcacctcgacgctgggccgagcgttcacccaacctgcgcaggagcagtgcggctggagagggcaccttggccagagcacagccgccagcaccacagtcgccgcccgcaccacagtcgccaccagctgggaccctgagtggcctcagccagacccacccttcccagcagcacgtggggttgtcccgcactgtccgacttcacccgactgccacggccagtagccagctctcttccaacgccctgcccccgggaccaggccttgagcagagagatggcacccaacaggcggtacctctggagcacccctcatccccctgggggctgaacctcacggagaaaatcaagaagatcaagatcgtcttcactcccaccatctgcaagcagacctgtgcccgtggacactgtgccaacagctgtgagaggggcgacaccaccaccctgtacagccagggcggccatgggcacgatcccaagtctggcttccgcatctatttctgccagatcccctgcctgaacggaggccgctgcatcggcagggacgaatgctggtgccccgccaactccaccgggaagttctgccacctgcctatcccgcagccggacagggagcctccagggagggggtcccgccccagggccttgctggaagccccactgaagcagtccactttcacactgccgctctccaaccagctggcctccgtgaacccctccctggtgaaggtgcacattcaccacccacccgaggcctcagtgcagatccaccaggtggcccaggtgcggggcggggtggaggaggccctagtggagaacagcgtggagaccagacccccgccctggctgcctgccagccctggccacagcctctgggacagcaacaacatccctgctcggtctggagagccccctcggccactgcccccagcagcacccaggcctcgaggactgctgggccggtgttacctgaacactgtgaacggacagtgtgccaaccctctgctggagctgactacccaggaggactgctgtggcagtgtgggagccttctggggggtgactttgtgtgccccatgcccacccagaccagcctccccggtgattgagaatggccagctggagtgtcctcaggggtacaagagactgaacctcactcactgccaagatatcaacgagtgcttgaccctgggcctgtgcaaggacgcggagtgtgtgaataccaggggcagctacctgtgcacatgcagacctggcctcatgctggatccatcgcggagccgctgtgtgtcggacaaggcaatctccatgctgcagggactgtgctaccggtcgctggggcccggcacctgcaccctgcctttggcccagcggatcaccaagcagatatgctgctgcagccgcgtgggcaaagcatggggcagcgagtgtgagaaatgccctctgcctggcacagaggccttcagagagatctgccctgccggccacggctacacctacgcgagctccgacatccgcctgtccatgaggaaagccgaggaggaggaactggcaaggcccccaagggagcaagggcagaggagcagcggggcactgcccgggccagcagagaggcagcccctccgggtcgtcacggacacctggcttgaggccgggaccatccctgacaagggtgactctcaggctggccaggtcacgaccagtgtcacncatgcacctgcctgggtcacagggaatgccacaaccccaccaatgcctgaacaggggattgcagagatacaggaagaacaagtgaccccctccaccgatgtgctggtgaccctgagcaccccaggcattgacagatgcgctgctggagccaccaacgtctgtggccctggaacctgcgtgaacctccccgatggatacagatgtgtctgcagccctggctaccagctgcaccccagccaggcctactgcacagatgacaacgagtgtctgagggacccctgcaagggaaaagggcgctgcatcaaccgcgtggggtcctactcctgcttctgctaccctggctacactctggccacctcaggggcgacacaggagtgtcaagatatcaatgagtgtgagcagccaggggtgtgcagcggggggcagtgcaccaacaccgagggctcgtaccactgcgagtgtgatcagggctacatcatggtcaggaaaggacactgccaagatatcaacgaatgccgtcaccccggtacctgccctgatgggagatgcgtcaattcccctggctcctacacttgtctggcctgtgaggagggctaccggggccagagtgggagctgtgtagatgtgaatgagtgtctgactcccggggtctgtgcccatggaaagtgcaccaacctagaaggctccttcagatgctcttgtgagcagggctatgaggtcacctcagatgagaagggctgccaagatgtggatgagtgtgccagccgggcctcatgccccacaggcctctgcctcaacacggagggctccttcgcctgctctgcctgtgagaacgggtactgggtgaatgaagacggcactgcctgtgaagacctagatgagtgtgccttcccgggagtctgcccctccggagtctgcaccaacacggctggctccttctcctgcaaggactgcgatgggggctaccggcccagccccctgggtgactcctgtgaagatgtggatgaatgtgaagacccccagagcagctgcctgggaggcgagtgcaagaacactgtgggctcctaccagtgcctctgtccccagggcttccagctggccaatggcaccgtgtgtgaggatgtgaatgagtgcatgggggaggagcactgcgcaccccacggcgagtgcctcaacagccacgggtctttcttctgtctgtgcgcgcctggcttcgtcagcgcagaggggggcaccagctgccaggatgtggacgagtgtgccaccacagacccgtgtgtgggagggcactgtgtcaacaccgagggctccttcaactgtctatgtgagactggcttccagccctccccagagagtggagagtgtgtggatattgacgagtgtgaggactatggagacccggtgtgtggcacctggaagtgtgaaaacagccctggctcctaccgctgtgttctgggctgccagcctggcttccacatggccccgaacggagactgcattgacatagacgagtgcgccaacgacaccatgtgtggcagccacggcttctgtgacaacactgatggctccttccgctgcctctgtgaccagggcttcgagatctctccctcaggctgggactgtgtggatgtgaacgagtgtgagcttatgctggcggtatgtggggccgcgctctgtgagaacgtggagggctccttcctgtgcctctgtgccagtgacctggaggagtacgatgcccaggaggggcactgccgcccacggggggctggaggtcagagtatgtctgaggccccaacgggggaccatgccccggcccccacccgcatggactgctactccgggcagaagggccatgcgccctgctccagtgtcctgggccggaacaccacacaggctgaatgctgctgcacccagggcgctagctggggagatgcctgtgacctctgcccgtctgaggactcagctgaattcagcgagatctgccctagtggaaaaggctacattcctgtggaaggagcctggacgtttggacagaccatgtacacagatgcggatgagtgtgtgatattcgggcctggtctctgcccgaacggccggtgcctcaacaccgtgcctggttatgtctgcctgtgcaatcccggcttccactacgatgcttcccacaagaagtgtgaggatcacgatgagtgccaggacctggcctgtgagaatggcgagtgcgtcaacacggagggctccttccactgcttctgcagccccccgctcaccctggacctcagccagcagcgctgcatgaacagcaccagcagcacggaggacctccctgaccacgacatccacatggacatctgctggaaaaaagtcaccaatgatgtgtgcagcgaacccctgcgtgggcaccgcaccacctacacggaatgctgctgccaggacggcgaggcctggagccagcagtgtgctctgtgtcccccgaggagctctgaggtctatgctcagctgtgcaacgtggctcgcattgaggcagagcgggaggccggggtccacttccggccaggctatgagtatggccccgggcccgatgacctgcactacagcatctatggcccagatggggcccccttctacaactacctgggccccgaggacaccgtccctgagcctgccttccccaacacagccggtcactcagcggaccgcacacccatccttgagtctcctttgcagccctcagaactccagccccactacgtggccagccatccagagcccccagccggcttcgaagggcttcaggcggaggagtgcggcatcctgaacggctgtgagaatggccgctgtgtgcgcgtgcgggagggctacacctgtgactgttttgagggcttccagctggatgcggcccacatggcctgcgtagatgtgaatgagtgtgatgacttgaacgggcctgctgtgctctgtgtccatggttactgcgagaacacagagggctcctaccgctgccactgctccccgggatatgtggctgaggcagggcccccccactgcactgccaaggagtagcagtcaggggtcagtgtggcaactacctggaaatggcctccagtcacaggcaggggccttgaggatgatttcctagctgggaagacaccgtgacatcaggccagaggtttccaatcagccttgcctgctttcatctctcccagcttagcctctggctgtaagcttcggtcattgcctccatgcccttgcttggctcaagcaccaccaatcgctttaatgcttcagccaccgcatgaggccctgtccaccacctttcctggccttgctatgggatgcttaccaaaggatggccctcatccaccctcccaagctgtgcgagcatgcaaggccccatggcctcacactgcagacacccctttccagccacaatccaccatcatcctgacgatcccacaactgggacagaggctacatctgccctagggaggtccttcagaatctgtggagcaagaaaggatttggggaagcttggggactgactccagagccccctcctaagaaccatcaccaccactcagccaatctgttctgggccctgattttgccacacctccatcctgtagcccattctctgaccccaaggagtggcagaagatcccttcactcagagaagcaaggctgatattagcttgttgaatgtaagagacacaaatgaagaagaacaaagagcctgagaaagcagcaagaggacatgatgaaaaatacgtggagttgatgagaaaggggagccaaggctttatacgtctaaagaaaatattcagtagctgaatccgcccagtgatagcctgtgggcaccagcagcaagggctgccatgggatacagtacccatctacaaagacctctattacataaacactgcttcttacaggaaacaaacctcttctgggatctccttttgtgaaaaccagtttgatgtgctaaaagtaaaaagtctattttccagtgtggtcttgttcagaagcagccagatttccaatgttgtttttcccctccactcagaaacccctgccctttcccttcagaaaacgatggcaggcattcctctgagtttacaagcagagactcactccaacccaaactagctgggagttcagaaccatggtggaataaagaaatgtgcatctggtctcttctgttgtttttatttcatatcagattaaatttctttaccatgttggctaagtctaaatattagagatgaggctgtgcctactccctggccagctctgctgatagcctatgatgggttccaatgggaaatgactctttactattaaaagacaaggaaagctctgacttcgtacttctctgatgaatggcaatgtaaatgaacaaggctccatgtgactggagcatggaagtgaatgctactttcttaatttaatctgccctgtcctacctgctcctctgattgttagccatcacataacttattgaatgcttgccatgtgccaggcactgtgctgagtgccatacatacatttcatttaattatccaataatcctacttactattgtttattctcaatttacaggtgaggaaactgagacatagaaagcttaaataatttgctctaggtccctatactaattgagatgttttcagcagacaaaaataagtcactcttacgcatgtaaaaatattctttcactcataataaaagaaatgcaacttaaaaccatactgagatcctttttaaaactgtcagattggcaaagatcaaaaagcttgttaagactcctagctggcaagcatgtgggaaataggtactctcataacagctgacagaagtacatattgaagaggacaatatggtaatgtccttcaaaattataaaagcactaactctttgatccagtagtttccacttctaggaacttaaccttcagatatattttcaccagatataaaatgacatacgtaagaagttattactgcatcatttgtaatagctaaagattagaaacaattaattgctatggaacccttaaaaaaggtggctctaaattccttaagaaagatatccaaaacaaattaaggggaaaagggagggttgcataacagcatgtaacataacactatttgtctaaagaatggggaaagagaagcggttgtctgttcacctcatccttgccactccgccttatacctcaccatcggagaacttaccatcccccaaatatatcctgctggcactacaccttcgtaactgctgttcccactgcccccacaacactccaatctccaccttcctgccaaccttgagatattgtatgcatatatacatatttcctttgtttaaaatacaaatagcatactatgcatgctgttctgcactttgctttttttttatacttgcaattagagctgcctcatttcattttacagctgtatactattccattgaatggataaaccataatttatttaatcagtccctcactgacagacgtttccattgtttcctgtcttttgctataaataatgctgtaatgaatattcttgtgcatatttcacattaatttatgggattacatctgcaggataaattcttagaaccaatggtggtttgtggggagggtgacagggtggataggtacaggattgggagacttttcactgtatctccttttgtatttttttgaattttgtaccatatgtatcacctattcaaaaaaaataaaatatttttaaatacagttgctggccaaagattgctta

SEQ ID NO: 432514 - DNA, 8144 bp, Homo sapiens
  misc_feature (3)..(5): n is a, c, g, or t
  misc_feature (9)..(9): n is a, c, g, or t
  misc_feature (2794)..(2794): n is a, c, g, or t
aannnctgntccccccggtaatgagggggctgagctgtccctccgaggagggggcctggtgtggataaaagagacgaaaaagccgggggaggtttccaaaaataaaaccgtccgggtccccttcagacggctgcaggcacagggaggaggcgcgaaggtgcagcagccgtgcgagcccagctggagtaggagcgcggactcgaggctcggggcgcgcagccctcgttccgccgagagccgggcccccagtcggccgcttcagggccccctagactcagagaagctggccgccgggcggggccgggagaacagcccgcgggcgtccagcgtgccgaccacaaagctcttcgcggtgcccgcgcgcaccactctccagccgccccgcgccatgaggccgcggaccaaagcccgcagcccggggcgcgccctgcggaacccctggagaggcttcctgccgctcaccctggctctcttcgtgggcgcgggtcatgcccaaagggaccccgtagggagatacgagccggctggtggagacgcgaatcgactgcggcgccctgggggcagctacccggcagcggctgcagccaaggtgtacagtctgttccgggagcaggacgcgcctgtcgcgggcttgcagcccgtggagcgggcccagccgggctgggggagccccaggaggcccaccgaggcggaggccaggaggccgtcccgcgcgcagcagtcgcggcgtgtccagccacctgcgcagacccggagaagcactcccctgggccagcagcaaccagcaccccggacccgggccgcgccggctctcccacgcctggggaccccacagcggtctggggctgcgcccccaaccccgccgcgagggcggctcacggggaggaacgtctgcgggggacagtgctgcccaggatggacaacagcaaacagcaccaaccactgtatcaaacccgtttgcgagccgccgtgccagaaccggggctcctgcagccgcccgcagctctgtgtctgccgctctggtttccgtggagcccgctgcgaggaggtcattcccgatgaggaatttgacccccagaactccaggctggcacctcgacgctgggccgagcgttcacccaacctgcgcaggagcagtgcggctggagagggcaccttggccagagcacagccgccagcaccacagtcgccgcccgcaccacagtcgccaccagctgggaccctgagtggcctcagccagacccacccttcccagcagcacgtggggttgtcccgcactgtccgacttcacccgactgccacggccagtagccagctctcttccaacgccctgcccccgggaccaggccttgagcagagagatggcacccaacaggcggtacctctggagcacccctcatccccctgggggctgaacctcacggagaaaatcaagaagatcaagatcgtcttcactcccaccatctgcaagcagacctgtgcccgtggacactgtgccaacagctgtgagaggggcgacaccaccaccctgtacagccagggcggccatgggcacgatcccaagtctggcttccgcatctatttctgccagatcccctgcctgaacggaggccgctgcatcggcagggacgaatgctggtgccccgccaactccaccgggaagttctgccacctgcctatcccgcagccggacagggagcctccagggagggggtcccgccccagggccttgctggaagccccactgaagcagtccactttcacactgccgctctccaaccagctggcctccgtgaacccctccctggtgaaggtgcacattcaccacccacccgaggcctcagtgcagatccaccaggtggcccaggtgcggggcggggtggaggaggccctagtggagaacagcgtggagaccagacccccgccctggctgcctgccagccctggccacagcctctgggacagcaacaacatccctgctcggtctggagagccccctcggccactgcccccagcagcacccaggcctcgaggactgctgggccggtgttacctgaacactgtgaacggacagtgtgccaaccctctgctggagctgactacccaggaggactgctgtggcagtgtgggagccttctggggggtgactttgtgtgccccatgcccacccagaccagcctccccggtgattgagaatggccagctggagtgtcctcaggggtacaagagactgaacctcactcactgccaagatatcaacgagtgcttgaccctgggcctgtgcaaggacgcggagtgtgtgaataccaggggcagctacctgtgcacatgcagacctggcctcatgctggatccatcgcggagccgctgtgtgtcggacaaggcaatctccatgctgcagggactgtgctaccggtcgctggggcccggcacctgcaccctgcctttggcccagcggatcaccaagcagatatgctgctgcagccgcgtgggcaaagcatggggcagcgagtgtgagaaatgccctctgcctggcacagaggccttcagagagatctgccctgccggccacggctacacctacgcgagctccgacatccgcctgtccatgaggaaagccgaggaggaggaactggcaaggcccccaagggagcaagggcagaggagcagcggggcactgcccgggccagcagagaggcagcccctccgggtcgtcacggacacctggcttgaggccgggaccatccctgacaagggtgactctcaggctggccaggtcacgaccagtgtcacncatgcacctgcctgggtcacagggaatgccacaaccccaccaatgcctgaacaggggattgcagagatacaggaagaacaagtgaccccctccaccgatgtgctggtgaccctgagcaccccaggcattgacagatgcgctgctggagccaccaacgtctgtggccctggaacctgcgtgaacctccccgatggatacagatgtgtctgcagccctggctaccagctgcaccccagccaggcctactgcacagatgacaacgagtgtctgagggacccctgcaagggaaaagggcgctgcatcaaccgcgtggggtcctactcctgcttctgctaccctggctacactctggccacctcaggggcgacacaggagtgtcaagatatcaatgagtgtgagcagccaggggtgtgcagcggggggcagtgcaccaacaccgagggctcgtaccactgcgagtgtgatcagggctacatcatggtcaggaaaggacactgccaagatatcaacgaatgccgtcaccccggtacctgccctgatgggagatgcgtcaattcccctggctcctacacttgtctggcctgtgaggagggctaccggggccagagtgggagctgtgtagatgtgaatgagtgtctgactcccggggtctgtgcccatggaaagtgcaccaacctagaaggctccttcagatgctcttgtgagcagggctatgaggtcacctcagatgagaagggctgccaagatgtggatgagtgtgccagccgggcctcatgccccacaggcctctgcctcaacacggagggctccttcgcctgctctgcctgtgagaacgggtactgggtgaatgaagacggcactgcctgtgaagacctagatgagtgtgccttcccgggagtctgcccctccggagtctgcaccaacacggctggctccttctcctgcaaggactgcgatgggggctaccggcccagccccctgggtgactcctgtgaagatgtggatgaatgtgaagacccccagagcagctgcctgggaggcgagtgcaagaacactgtgggctcctaccagtgcctctgtccccagggcttccagctggccaatggcaccgtgtgtgaggatgtgaatgagtgcatgggggaggagcactgcgcaccccacggcgagtgcctcaacagccacgggtctttcttctgtctgtgcgcgcctggcttcgtcagcgcagaggggggcaccagctgccaggatgtggacgagtgtgccaccacagacccgtgtgtgggagggcactgtgtcaacaccgagggctccttcaactgtctatgtgagactggcttccagccctccccagagagtggagagtgtgtggatattgacgagtgtgaggactatggagacccggtgtgtggcacctggaagtgtgaaaacagccctggctcctaccgctgtgttctgggctgccagcctggcttccacatggccccgaacggagactgcattgacatagacgagtgcgccaacgacaccatgtgtggcagccacggcttctgtgacaacactgatggctccttccgctgcctctgtgaccagggcttcgagatctctccctcaggctgggactgtgtggatgtgaacgagtgtgagcttatgctggcggtatgtggggccgcgctctgtgagaacgtggagggctccttcctgtgcctctgtgccagtgacctggaggagtacgatgcccaggaggggcactgccgcccacggggggctggaggtcagagtatgtctgaggccccaacgggggaccatgccccggcccccacccgcatggactgctactccgggcagaagggccatgcgccctgctccagtgtcctgggccggaacaccacacaggctgaatgctgctgcacccagggcgctagctggggagatgcctgtgacctctgcccgtctgaggactcagctgaattcagcgagatctgccctagtggaaaaggctacattcctgtggaaggagcctggacgtttggacagaccatgtacacagatgcggatgagtgtgtgatattcgggcctggtctctgcccgaacggccggtgcctcaacaccgtgcctggttatgtctgcctgtgcaatcccggcttccactacgatgcttcccacaagaagtgtgaggatcacgatgagtgccaggacctggcctgtgagaatggcgagtgcgtcaacacggagggctccttccactgcttctgcagccccccgctcaccctggacctcagccagcagcgctgcatgaacagcaccagcagcacggaggacctccctgaccacgacatccacatggacatctgctggaaaaaagtcaccaatgatgtgtgcagcgaacccctgcgtgggcaccgcaccacctacacggaatgctgctgccaggacggcgaggcctggagccagcagtgtgctctgtgtcccccgaggagctctgaggtctatgctcagctgtgcaacgtggctcgcattgaggcagagcgggaggccggggtccacttccggccaggctatgagtatggccccgggcccgatgacctgcactacagcatctatggcccagatggggcccccttctacaactacctgggccccgaggacaccgtccctgagcctgccttccccaacacagccggtcactcagcggaccgcacacccatccttgagtctcctttgcagccctcagaactccagccccactacgtggccagccatccagagcccccagccggcttcgaagggcttcaggcggaggagtgcggcatcctgaacggctgtgagaatggccgctgtgtgcgcgtgcgggagggctacacctgtgactgttttgagggcttccagctggatgcggcccacatggcctgcgtagatgtgaatgagtgtgatgacttgaacgggcctgctgtgctctgtgtccatggttactgcgagaacacagagggctcctaccgctgccactgctccccgggatatgtggctgaggcagggcccccccactgcactgccaaggagtagcagtcaggggtcagtgtggcaactacctggaaatggcctccagtcacaggcaggggccttgaggatgatttcctagctgggaagacaccgtgacatcaggccagaggtttccaatcagccttgcctgctttcatctctcccagcttagcctctggctgtaagcttcggtcattgcctccatgcccttgcttggctcaagcaccaccaatcgctttaatgcttcagccaccgcatgaggccctgtccaccacctttcctggccttgctatgggatgcttaccaaaggatggccctcatccaccctcccaagctgtgcgagcatgcaaggccccatggcctcacactgcagacacccctttccagccacaatccaccatcatcctgacgatcccacaactgggacagaggctacatctgccctagggaggtccttcagaatctgtggagcaagaaaggatttggggaagcttggggactgactccagagccccctcctaagaaccatcaccaccactcagccaatctgttctgggccctgattttgccacacctccatcctgtagcccattctctgaccccaaggagtggcagaagatcccttcactcagagaagcaaggctgatattagcttgttgaatgtaagagacacaaatgaagaagaacaaagagcctgagaaagcagcaagaggacatgatgaaaaatacgtggagttgatgagaaaggggagccaaggctttatacgtctaaagaaaatattcagtagctgaatccgcccagtgatagcctgtgggcaccagcagcaagggctgccatgggatacagtacccatctacaaagacctctattacataaacactgcttcttacaggaaacaaacctcttctgggatctccttttgtgaaaaccagtttgatgtgctaaaagtaaaaagtctattttccagtgtggtcttgttcagaagcagccagatttccaatgttgtttttcccctccactcagaaacccctgccctttcccttcagaaaacgatggcaggcattcctctgagtttacaagcagagactcactccaacccaaactagctgggagttcagaaccatggtggaataaagaaatgtgcatctggtctcttctgttgtttttatttcatatcagattaaatttctttaccatgttggctaagtctaaatattagagatgaggctgtgcctactccctggccagctctgctgatagcctatgatgggttccaatgggaaatgactctttactattaaaagacaaggaaagctctgacttcgtacttctctgatgaatggcaatgtaaatgaacaaggctccatgtgactggagcatggaagtgaatgctactttcttaatttaatctgccctgtcctacctgctcctctgattgttagccatcacataacttattgaatgcttgccatgtgccaggcactgtgctgagtgccatacatacatttcatttaattatccaataatcctacttactattgtttattctcaatttacaggtgaggaaactgagacatagaaagcttaaataatttgctctaggtccctatactaattgagatgttttcagcagacaaaaataagtcactcttacgcatgtaaaaatattctttcactcataataaaagaaatgcaacttaaaaccatactgagatcctttttaaaactgtcagattggcaaagatcaaaaagcttgttaagactcctagctggcaagcatgtgggaaataggtactctcataacagctgacagaagtacatattgaagaggacaatatggtaatgtccttcaaaattataaaagcactaactctttgatccagtagtttccacttctaggaacttaaccttcagatatattttcaccagatataaaatgacatacgtaagaagttattactgcatcatttgtaatagctaaagattagaaacaattaattgctatggaacccttaaaaaaggtggctctaaattccttaagaaagatatccaaaacaaattaaggggaaaagggagggttgcataacagcatgtaacataacactatttgtctaaagaatggggaaagagaagcggttgtctgttcacctcatccttgccactccgccttatacctcaccatcggagaacttaccatcccccaaatatatcctgctggcactacaccttcgtaactgctgttcccactgcccccacaacactccaatctccacctagacgtcgctttccacctagacgtcgctttccacctag

SEQ ID NO: 432515 - DNA, 3407 bp, Homo sapiens
cacttcccaaaaacacgatgtgaaggtttaaacaaaacacctcaccccttccccacgcccaaacccaaaaactatgtagcaacacactcctcgaccacccaaaccccagcaggagccgggcattgtggaagcagcgagtctcagcctccctggagccctcatttgaagcccagagcacctctccccatctaaaatgacacatactttttttttcaagagtactgccttttgttctagcatctttccacaagaattttatgatcctctctgcccccacccccacagttccacaggggcaccctttgtccagaagggcgagggtcccagcattagggagagtctggacacagccctcagcctcctcctctctccgatttcctcctcccagagcccccagccggcttcgaagggcttcaggcggaggagtgcggcatcctgaacggctgtgagaatggccgctgtgtgcgcgtgcgggagggctacacctgtgactgttttgagggcttccagctggatgcggcccacatggcctgcgtagatgtgaatgagtgtgatgacttgaacgggcctgctgtgctctgtgtccatggttactgcgagaacacagagggctcctaccgctgccactgctccccgggatatgtggctgaggcagggcccccccactgcactgccaaggagtagcagtcaggggtcagtgtggcaactacctggaaatggcctccagtcacaggcaggggccttgaggatgatttcctagctgggaagacaccgtgacatcaggccagaggtttccaatcagccttgcctgctttcatctctcccagcttagcctctggctgtaagcttcggtcattgcctccatgcccttgcttggctcaagcaccaccaatcgctttaatgcttcagccaccgcatgaggccctgtccaccacctttcctggccttgctatgggatgcttaccaaaggatggccctcatccaccctcccaagctgtgcgagcatgcaaggccccatggcctcacactgcagacacccctttccagccacaatccaccatcatcctgacgatcccacaactgggacagaggctacatctgccctagggaggtccttcagaatctgtggagcaagaaaggatttggggaagcttggggactgactccagagccccctcctaagaaccatcaccaccactcagccaatctgttctgggccctgattttgccacacctccatcctgtagcccattctctgaccccaaggagtggcagaagatcccttcactcagagaagcaaggctgatattagcttgttgaatgtaagagacacaaatgaagaagaacaaagagcctgagaaagcagcaagaggacatgatgaaaaatacgtggagttgatgagaaaggggagccaaggctttatacgtctaaagaaaatattcagtagctgaatccgcccagtgatagcctgtgggcaccagcagcaagggctgccatgggatacagtacccatctacaaagacctctattacataaacactgcttcttacaggaaacaaacctcttctgggatctccttttgtgaaaaccagtttgatgtgctaaaagtaaaaagtctattttccagtgtggtcttgttcagaagcagccagatttccaatgttgtttttcccctccactcagaaacccctgccctttcccttcagaaaacgatggcaggcattcctctgagtttacaagcagagactcactccaacccaaactagctgggagttcagaaccatggtggaataaagaaatgtgcatctggtctcttctgttgtttttatttcatatcagattaaatttctttaccatgttggctaagtctaaatattagagatgaggctgtgcctactccctggccagctctgctgatagcctatgatgggttccaatgggaaatgactctttactattaaaagacaaggaaagctctgacttcgtacttctctgatgaatggcaatgtaaatgaacaaggctccatgtgactggagcatggaagtgaatgctactttcttaatttaatctgccctgtcctacctgctcctctgattgttagccatcacataacttattgaatgcttgccatgtgccaggcactgtgctgagtgccatacatacatttcatttaattatccaataatcctacttactattgtttattctcaatttacaggtgaggaaactgagacatagaaagcttaaataatttgctctaggtccctatactaattgagatgttttcagcagacaaaaataagtcactcttacgcatgtaaaaatattctttcactcataataaaagaaatgcaacttaaaaccatactgagatcctttttaaaactgtcagattggcaaagatcaaaaagcttgttaagactcctagctggcaagcatgtgggaaataggtactctcataacagctgacagaagtacatattgaagaggacaatatggtaatgtccttcaaaattataaaagcactaactctttgatccagtagtttccacttctaggaacttaaccttcagatatattttcaccagatataaaatgacatacgtaagaagttattactgcatcatttgtaatagctaaagattagaaacaattaattgctatggaacccttaaaaaaggtggctctaaattccttaagaaagatatccaaaacaaattaaggggaaaagggagggttgcataacagcatgtaacataacactatttgtctaaagaatggggaaagagaagcggttgtctgttcacctcatccttgccactccgccttatacctcaccatcggagaacttaccatcccccaaatatatcctgctggcactacaccttcgtaactgctgttcccactgcccccacaacactccaatctccaccttcctgccaaccttgagatattgtatgcatatatacatatttcctttgtttaaaatacaaatagcatactatgcatgctgttctgcactttgctttttttttatacttgcaattagagctgcctcatttcattttacagctgtatactattccattgaatggataaaccataatttatttaatcagtccctcactgacagacgtttccattgtttcctgtcttttgctataaataatgctgtaatgaatattcttgtgcatatttcacattaatttatgggattacatctgcaggataaattcttagaaccaatggtggtttgtggggagggtgacagggtggataggtacaggattgggagacttttcactgtatctccttttgtatttttttgaattttgtaccatatgtatcacctattcaaaaaaaataaaatatttttaaatacagttgctggccaaagattgctta

SEQ ID NO: 432516 - DNA, 1956 bp, Homo sapiens
tcgtggaaccggtgtctatcgatgcgtccaagtagtcactacaggcaccgaacacgccggtaatttatgtatttttagtagagacggggtttcaccgtgttagccaggatggtttcgatctcctgacctcgtgatccgcccgcctcggcctcccaaactgcggggattacaggcgtgagccattgcgctcagaagcagccagatttccaatgttgtttttcccctccactcagaaacccctgccctttcccttcagaaaacgatggcaggcattcctctgagtttacaagcagagactcactccaacccaaactagctgggagttcagaaccatggtggaataaagaaatgtgcatctggtctcttctgttgtttttatttcatatcagattaaatttctttaccatgttggctaagtctaaatattagagatgaggctgtgcctactccctggccagctctgctgatagcctatgatgggttccaatgggaaatgactctttactattaaaagacaaggaaagctctgacttcgtacttctctgatgaatggcaatgtaaatgaacaaggctccatgtgactggagcatggaagtgaatgctactttcttaatttaatctgccctgtcctacctgctcctctgattgttagccatcacataacttattgaatgcttgccatgtgccaggcactgtgctgagtgccatacatacatttcatttaattatccaataatcctacttactattgtttattctcaatttacaggtgaggaaactgagacatagaaagcttaaataatttgctctaggtccctatactaattgagatgttttcagcagacaaaaataagtcactcttacgcatgtaaaaatattctttcactcataataaaagaaatgcaacttaaaaccatactgagatcctttttaaaactgtcagattggcaaagatcaaaaagcttgttaagactcctagctggcaagcatgtgggaaataggtactctcataacagctgacagaagtacatattgaagaggacaatatggtaatgtccttcaaaattataaaagcactaactctttgatccagtagtttccacttctaggaacttaaccttcagatatattttcaccagatataaaatgacatacgtaagaagttattactgcatcatttgtaatagctaaagattagaaacaattaattgctatggaacccttaaaaaaggtggctctaaattccttaagaaagatatccaaaacaaattaaggggaaaagggagggttgcataacagcatgtaacataacactatttgtctaaagaatggggaaagagaagcggttgtctgttcacctcatccttgccactccgccttatacctcaccatcggagaacttaccatcccccaaatatatcctgctggcactacaccttcgtaactgctgttcccactgcccccacaacactccaatctccaccttcctgccaaccttgagatattgtatgcatatatacatatttcctttgtttaaaatacaaatagcatactatgcatgctgttctgcactttgctttttttttatacttgcaattagagctgcctcatttcattttacagctgtatactattccattgaatggataaaccataatttatttaatcagtccctcactgacagacgtttccattgtttcctgtcttttgctataaataatgctgtaatgaatattcttgtgcatatttcacattaatttatgggattacatctgcaggataaattcttagaaccaatggtggtttgtggggagggtgacagggtggataggtacaggattgggagacttttcactgtatctccttttgtatttttttgaattttgtaccatatgtatcacctattcaaaaaaaataaaatatttttaaatacagttgctggccaaagattgctta

SEQ ID NO: 432517 - DNA, 1717 bp, Homo sapiens
cagagactcactcccagctagtttgggttggagtgagtctctgcttgtaaactcagaggaatgcctgcccaaactagctgggagttcagaaccatggtggaataaagaaatgtgcatctggtctcttctgttgtttttatttcatatcagattaaatttctttaccatgttggctaagtctaaatattagagatgaggctgtgcctactccctggccagctctgctgatagcctatgatgggttccaatgggaaatgactctttactattaaaagacaaggaaagctctgacttcgtacttctctgatgaatggcaatgtaaatgaacaaggctccatgtgactggagcatggaagtgaatgctactttcttaatttaatctgccctgtcctacctgctcctctgattgttagccatcacataacttattgaatgcttgccatgtgccaggcactgtgctgagtgccatacatacatttcatttaattatccaataatcctacttactattgtttattctcaatttacaggtgaggaaactgagacatagaaagcttaaataatttgctctaggtccctatactaattgagatgttttcagcagacaaaaataagtcactcttacgcatgtaaaaatattctttcactcataataaaagaaatgcaacttaaaaccatactgagatcctttttaaaactgtcagattggcaaagatcaaaaagcttgttaagactcctagctggcaagcatgtgggaaataggtactctcataacagctgacagaagtacatattgaagaggacaatatggtaatgtccttcaaaattataaaagcactaactctttgatccagtagtttccacttctaggaacttaaccttcagatatattttcaccagatataaaatgacatacgtaagaagttattactgcatcatttgtaatagctaaagattagaaacaattaattgctatggaacccttaaaaaaggtggctctaaattccttaagaaagatatccaaaacaaattaaggggaaaagggagggttgcataacagcatgtaacataacactatttgtctaaagaatggggaaagagaagcggttgtctgttcacctcatccttgccactccgccttatacctcaccatcggagaacttaccatcccccaaatatatcctgctggcactacaccttcgtaactgctgttcccactgcccccacaacactccaatctccaccttcctgccaaccttgagatattgtatgcatatatacatatttcctttgtttaaaatacaaatagcatactatgcatgctgttctgcactttgctttttttttatacttgcaattagagctgcctcatttcattttacagctgtatactattccattgaatggataaaccataatttatttaatcagtccctcactgacagacgtttccattgtttcctgtcttttgctataaataatgctgtaatgaatattcttgtgcatatttcacattaatttatgggattacatctgcaggataaattcttagaaccaatggtggtttgtggggagggtgacagggtggataggtacaggattgggagacttttcactgtatctccttttgtatttttttgaattttgtaccatatgtatcacctattcaaaaaaaataaaatatttttaaatacagttgctggccaaagattgctta

SEQ ID NO: 432518 - DNA, 1921 bp, Homo sapiens
  misc_feature (3)..(5): n is a, c, g, or t
  misc_feature (9)..(9): n is a, c, g, or t
aannnctgntccccccggtaatgagggggctgagctgtccctccgaggagggggcctggtgtggataaaagagacgaaaaagccgggggaggtttccaaaaataaaaccgtccgggtccccttcagacggctgcaggcacagggaggaggcgcgaaggtgcagcagccgtgcgagcccagctggagtaggagcgcggactcgaggctcggggcgcgcagccctcgttccgccgagagccgggcccccagtcggccgcttcagggccccctagactcagagaagctggccgccgggcggggccgggagaacagcccgcgggcgtccagcgtgccgaccacaaagctcttcgcggtgcccgcgcgcaccactctccagccgccccgcgccatgaggccgcggaccaaagcccgcagcccggggcgcgccctgcggaacccctggagaggcttcctgccgctcaccctggctctcttcgtgggcgcgggtcatgcccaaagggaccccgtagggagatacgagccggctggtggagacgcgaatcgactgcggcgccctgggggcagctacccggcagcggctgcagccaaggtgtacagtctgttccgggagcaggacgcgcctgtcgcgggcttgcagcccgtggagcgggcccagccgggctgggggagccccaggaggcccaccgaggcggaggccaggaggccgtcccgcgcgcagcagtcgcggcgtgtccagccacctgcgcagacccggagaagcactcccctgggccagcagcaaccagcaccccggacccgggccgcgccggctctcccacgcctggggaccccacagcggtctggggctgcgcccccaaccccgccgcgagggcggctcacggggaggaacgtctgcgggggacagtgctgcccaggatggacaacagcaaacagcaccaaccactgtatcaaacccgtttgcgagccgccgtgccagaaccggggctcctgcagccgcccgcagctctgtgtctgccgctctggtttccgtggagcccgctgcgaggaggtcattcccgatgaggaatttgacccccagaactccaggctggcacctcgacgctgggccgagcgttcacccaacctgcgcaggagcagtgcggctggagagggcaccttggccagagcacagccgccagcaccacagtcgccgcccgcaccacagtcgccaccagctgggaccctgagtggcctcagccagacccacccttcccagcagcacgtggggttgtcccgcactgtccgacttcacccgactgccacggccagtagccagctctcttccaacgccctgcccccgggaccaggccttgagcagagagatggcacccaacaggcggtacctctggagcacccctcatccccctggggtaaggataccctgtcttgggtcctagaagagcagggcctctagaactctcttctcccaccttggcttccccctctgctctcacagaggggctgagttgtcaccttgtccctcattctttcagccaatcaacaaacgcttgttgagcacctgctttgtgccggggtccaggggtcctaaaccggtggacctggacttcaccccgttgcaacctttagacctagactgctctatttctgcccaatctatcatcccctcctgcctttgcttccctcatatcccgctgtgaacctcaactccctggtcccactcgttccacctcatccctcctacaaaccccaactctcctggatcaacccaaccagttgttacctcagcacctacagctgcgcctctgcttcccacagaatctctgtggattcacgccatggcacactctttgttattgcctgacaacccctccctgtgtgcctggacattttctccctccatttctcagagcagctactccag

SEQ ID NO: 432519 - DNA, 473 bp, Homo sapiens
gacttcagcctctggctgtcacacttagggtttcactctagggcagtggccagggcttactaaccagagaggtggaggcagccagcagaggcacctgggctccctacagcactctcctttgtttcctcttagatgtgaatgagtgtgatgacttgaacgggcctgctgtgctctgtgtccatggttactgcgagaacacagagggctcctaccgctgccactgctccccgggatatgtggctgaggcagggcccccccactgcactgccaaggagtagcagtcaggggtcagtgtggcaactacctggaaatggcctccagtcacaggcaggggccttgaggatgatttcctagctgggaagacaccgtgacatcaggccagaggtttccaatcagccttgcctgctttcatctctcccagcttagcctctggctgtaagcttcggtcattgcctccatgcccttgcttggct

SEQ ID NO: 432520 - DNA, 364 bp, Homo sapiens
tgccccgccaactccaccgggaagttctgccacctgcctatcccgcagccggacagggagcctccagggagggggtcccgccccagggccttgctggaagccccactgaagcagtccactttcacactgccgctctccaaccagctgggtgagtgccggcacagctgggccggcgggaccctgggaggagtgccagttgggtggaggctgtcaccatggctgtgacagggatagggaagctgcctgtagtccttcctttatgatcaaacctccctctttctcctggccctcagcgctaagtttcattccctcaacttctcagccccctcccatcggaatttatcgacttgtttttgccctttcc

SEQ ID NO: 432521 - DNA, 442 bp, Homo sapiens
atgggctactcagggcccagaggaagctacacaggaccctaacagggaagggacccgtggctgggtctgctgacagccatctctactctagatgtggacgagtgtgccaccacagacccgtgtgtgggagggcactgtgtcaacaccgagggctccttcaactgtctatgtgagactggcttccagccctccccagagagtggagagtgtgtgggtaagggctctggggggagggcacagggctctgcccacatctgcccatctctacactgcctggtccttagctcccatggagcagagcactttccacagatgaagtgtccaacaaatagtgtatgtattgagactcagggctcaggggctgtccaaggatgacaaaatgaagacaatcatcatcttcgtgctggcagagcacacaatctagttttaaaggccaaattga

SEQ ID NO: 432522 - DNA, 426 bp, Homo sapiens
aatacgtggagttgatgagaaaggggagccaaggctttatacgtctaaagaaaatattcagtagctgaatccgcccagtgatagcctgtgggcaccagcagcaagggctgccatgggatacagtacccatctacaaagacctctattacataaacactgcttcttacaggaaacaaacctcttctgggatctccttttgtgaaaaccagtttgatgtgctaaaagtaaaaagtctattttccagtgtggtcttgttcagaagcagccagatttccaatgttgtttttcccctccactcagaaacccctgccctttcccttcagaaaacgatggcaggcattcctctgagtttacaagcagagactcactccaacccaaactagctgggagttcagaaccatggtggaataaagaaatgtgcatctg

SEQ ID NO: 432523 - DNA, 3700 bp, Homo sapiens
cattgaatcccagtcctaacagaagtactgcgaatcttgtggcctcattctgaacaaaagggattagagaagaaaaatctcttgatataaggcttgaaagcaagggcaggcaatcttggttgtgaatattttctgatttttccagaaatcaagcagaagattgagctgctgatgtcagttaactctgagaagtcgtcctcttcagaaaggccggagcctcaacagaaagctcctttagttcctcctcctccaccgccaccaccaccaccaccgccacctttgccagaccccacacccccggagccagaggaggagatcctgggatcagatgatgaggagcaagaggaccctgcggactactgcaaaggtggatatcatccagtgaaaattggagacctcttcaatggccggtatcatgttattagaaagcttggatgggggcacttctctactgtctggctgtgctgggatatgcaggggaaaagatttgttgcaatgaaagttgtaaaaagtgcccagcattatacggagacagccttggatgaaataaaattgctcaaatgtgttcgagaaagtgatcccagtgacccaaacaaagacatggtggtccagctcattgacgacttcaagatttcaggcatgaatgggatacatgtctgcatggtcttcgaagtacttggccaccatctcctcaagtggatcatcaaatccaactatcaaggcctcccagtacgttgtgtgaagagtatcattcgacaggtccttcaagggttagattacttacacagtaagtgcaagatcattcatactgacataaagccggaaaatatcttgatgtgtgtggatgatgcatatgtgagaagaatggcagctgaggccactgagtggcagaaagcaggtgctcctcctccttcagggtctgcagtgagtacggctccacagcagaaacctataggaaaaatatctaaaaacaaaaagaaaaaactgaaaaagaaacagaagaggcaggctgagttattggagaagcgcctgcaggagatagaagaattggagcgagaagctgaaaggaaaataatagaagaaaacatcacctcagctgcaccttccaatgaccaggatggcgaatactgcccagaggtgaaactaaaaacaacaggattagaggaggcggctgaggcagagactgcaaaggacaatggtgaagctgaggaccaggaagagaaagaagatgctgagaaagaaaacattgaaaaagatgaagatgatgtagatcaggaacttgcgaacatagaccctacgtggatagaatcacctaaaaccaatggccatattgagaatggcccattctcactggagcagcaactggacgatgaagatgatgatgaagaagactgcccaaatcctgaggaatataatcttgatgagccaaatgcagaaagtgattacacatatagcagctcctatgaacaattcaatggtgaattgccaaatggacgacataaaattcccgagtcacagttcccagagttttccacctcgttgttctctggatccttagaacctgtggcctgcggctctgtgctttctgagggatcaccacttactgagcaagaggagagcagtccatcccatgacagaagcagaacggtttcagcctccagtactggggatttgccaaaagcaaaaacccgggcagctgacttgttggtgaatcccctggatccgcggaatgcagataaaattagagtaaaaattgctgacctgggaaatgcttgttgggtgcataaacacttcacggaagacatccagacgcgtcagtaccgctccatagaggttttaataggagcggggtacagcacccctgcggacatctggagcacggcgtgtatggcatttgagctggcaacgggagattatttgtttgaaccacattctggggaagactattccagagacgaagaccacatagcccacatcatagagctgctaggcagtattccaaggcactttgctctatctggaaaatattctcgggaattcttcaatcgcagaggagaactgcgacacatcaccaagctgaagccctggagcctctttgatgtacttgtggaaaagtatggctggccccatgaagatgctgcacagtttacagatttcctgatcccgatgttagaaatggttccagaaaaacgagcctcagctggcgaatgccttcggcatccttggttgaattcttagcaaattctaccaatattgcattctgagctagcaaatgttcccagtacattggacctaaacggtgactctcattctttaacaggattacaagtgagctggcttcatcctcagacctttattttgctttgaggtactgttgtttgacattttgctttttgtgcactgtgatcctggggaagggtagtcttttgtcttcagctaagtagtttactgaccattttcttctggaaacaataacatgtctctaagcattgtttcttgtgttgtgtgacattcaaatgtcatttttttgaatgaaaaatactttcccctttgtgttttggcaggttttgtaactatttatgaagaaatattttagctgagtactatataatttacaatcttaagaaattatcaagttggaaccaagaaatagcaaggaaatgtacaattttatcttctggcaaagggacatcattcctgtattatagtgtatgtaaatgcaccctgtaaatgttactttccattaaatatgggagggggactcaaatttcagaaaagctaccaagtcttgagtgctttgtagcctatgttgcatgtagcggactttaactgctccaaggagttgtgcaaacttttcattccataacagtcttttcacattggattttaaacaaagtggctctgggttataagatgtcattctctatatggcactttaaaggaagaaaagatatgtttctcattctaaaatatgcattataatttagcagtcccatttgtgattttgcatatttttaaaagtacttttaaagaagagcaatttccctttaaaaatgtgatggctcagtaccatgtcatgttgcctcctctgggcgctgtaagttaagctctacatagattaaattggagaaacgtgttaattgtgtggaatgaaaaaatacatatatttttggaaaagcatgatcatgcttgtctagaacacaaggtatggtatatacaatttgcagtgcagtgggcagaatacttctcacagctcaaagataacagtgatcacattcattccataggtagctttacgtgtggctacaacaaattttactagctttttcattgtctttccatgaaacgaagttgagaaaatgattttccctttgcaggttgcacacagttttgtttatgcatttccttaaaattaattgtagactccaggatacaaaccatagtaggcaatacaattttagaatgtaatatatagaggtatatttagcctcttttagaagtcagtggattgaatgtctttttattttaaattttacattcattaaggtgcctcgtttttgactttgtccattaacatttatccatatgcctttgcaataactagattgtgaaaagctaacaagtgttgtaacaataatccattgtttgaggtgcttgcagttgtcttaaaaattaaagtgttttggtttttttttttcca

SEQ ID NO: 432524 - DNA, 1067 bp, Homo sapiens
accgttaatgtgtgtcttctcttccccagtgctggccattcaggcccgaaagcggaggccgaaaagagagaaacatccgaaaaaaaatcaagcagaagattgagctgctgatgtcagttaactctgagaagtcgtcctcttcagaaaggccggagcctcaacagaaagctcctttagttcctcctcctccaccgccaccaccaccaccaccgccacctttgccagaccccacacccccggagccagaggaggagatcctgggatcagatgatgaggagcaagaggaccctgcggactactgcaaaggtggatatcatccagtgaaaattggagacctcttcaatggccggtatcatgttattagaaagcttggatgggggcacttctctactgtctggctgtgctgggatatgcaggggaaaagatttgttgcaatgaaagttgtaaaaagtgcccagcattatacggagacagccttggatgaaataaaattgctcaaatgtgttcgagaaagtgatcccagtgacccaaacaaagacatggtggtccagctcattgacgacttcaagatttcaggcatgaatgggatacatgtctgcatggtcttcgaagtacttggccaccatctcctcaagtggatcatcaaatccaactatcaaggcctcccagtacgttgtgtgaagagtatcattcgacaggtgagacttttgacggcagcccctaggccctagtacctaattggttaggctttcaacatgaatgctgtttacaaatatgtatatgtattacatatgtatcagtgcataatgtatatatgttatgtatgttacatatgtatcagtgcataacattttgaactcttattaagtcagtatttaatgatattttgtgttgtgaagggaacaacatgtaattgtcaggcatacgttttttgcctgtcgttttttttttttaaggtatgtgacatggtacaattacattgtttttgttcagtatctactataaaacatccacttagttcattaggaagtaatttagaagaaataacttactgggtttatttacta

SEQ ID NO: 432525 - DNA, 970 bp, Homo sapiens
atagcctcccaaagtgctgggattacaggtgtgagccacggcaccaggcctcatcccattacattctaaagattgtgtcaaaatgagttatgcttcttgtgaggtgatgggaccgttatatctctccagtgtctgtggtacaacagactaaaagatgaatatatttaatttcttaatgtttcttttgctaattttccttagctagcaatatatgtgttagctttagtgtctttttaggttcagattatttttggtagaccttaaaaaatgagaagataaaggatatccgaaagaagccttaaggtagatcctttacttggaagtatcaggctcttccacctgactccactcataataaaaaatgaaaacaaaagtggttgacgtagcaaagattttaacttttaaagcttgatagagctttgcaggtttaggaagataacttcccagtcttcagattgggatggtgagactgtgtggccccacctccatgcaggccatgcagaacacaggactgtagagaaacagaggctcattctcagttccaacaggaggaagagtgcccactgggcagccagtcctgttagggcaaggagcagcccttctggagacatggcagatcttaacgtttcagtgcatatggatgggggagggtgttctggggctggtggaacgtagagggcattcatggtggtgaaagtgggatgtaggagagggtttgggtgatgatggataactgggttcactgtgtgctaactgagctgaacagagtatgaggcgttggcctacattgtctccctggaaagactgctgtcacaggttctcttgctggcattgtgatgcagggctgcgtgaagccctccttacagcgggaggtgggctctgttggagtgggccctgtgcctctgctgtctcctactgctaacgtgaggcatcagctgaggagggatggggatgaactattttaggcagg

SEQ ID NO: 432526 - DNA, 392 bp, Homo sapiens
  misc_feature (7)..(7): n is a, c, g, or t
gccattngttggaccatggcaaatttaaaaccaaaggttttcttgcagctggtacccatcccatgtctcacagcccctggccactgacagatcagcagatgtcacccacatgggcttctgagaaagctcttaatttctttatgaaatttgcatgctaagtttttctaatgaggctgtaggtttccatgtaaattctgtgatagatagtggctgtagactggtgatgctatccgtgatttctatgagaaacatccttacaagaaccatagggcataatttatatcttccctaagtgtaaaaggatttttatcagggtgatagtatacttgaatgaaatttgtctaatgcagtttttgcttatgttggaaaataaactagattatgaattttta

SEQ ID NO: 432527 - DNA, 3688 bp, Homo sapiens
ggcggcggcgcaggcgcggttctcgtctcctcccggccggcggagcgagtggaggctgcagcccagctcgtctcggcgcccgcgtcgccgtcgcgaagccccccgccccgcttccgccgcgtcggaatgagctcccggaaagtgctggccattcaggcccgaaagcggaggccgaaaagagagaaacatccgaaaaagccggagcctcaacagaaagctcctttagttcctcctcctccaccgccaccaccaccaccaccgccacctttgccagaccccacacccccggagccagaggaggagatcctgggatcagatgatgaggagcaagaggaccctgcggactactgcaaaggtggatatcatccagtgaaaattggagacctcttcaatggccggtatcatgttattagaaagcttggatgggggcacttctctactgtctggctgtgctgggatatgcaggggaaaagatttgttgcaatgaaagttgtaaaaagtgcccagcattatacggagacagccttggatgaaataaaattgctcaaatgtgttcgagaaagtgatcccagtgacccaaacaaagacatggtggtccagctcattgacgacttcaagatttcaggcatgaatgggatacatgtctgcatggtcttcgaagtacttggccaccatctcctcaagtggatcatcaaatccaactatcaaggcctcccagtacgttgtgtgaagagtatcattcgacaggtccttcaagggttagattacttacacagtaagtgcaagatcattcatactgacataaagccggaaaatatcttgatgtgtgtggatgatgcatatgtgagaagaatggcagctgaggccactgagtggcagaaagcaggtgctcctcctccttcagggtctgcagtgagtacggctccacagcagaaacctataggaaaaatatctaaaaacaaaaagaaaaaactgaaaaagaaacagaagaggcaggctgagttattggagaagcgcctgcaggagatagaagaattggagcgagaagctgaaaggaaaataatagaagaaaacatcacctcagctgcaccttccaatgaccaggatggcgaatactgcccagaggtgaaactaaaaacaacaggattagaggaggcggctgaggcagagactgcaaaggacaatggtgaagctgaggaccaggaagagaaagaagatgctgagaaagaaaacattgaaaaagatgaagatgatgtagatcaggaacttgcgaacatagaccctacgtggatagaatcacctaaaaccaatggccatattgagaatggcccattctcactggagcagcaactggacgatgaagatgatgatgaagaagactgcccaaatcctgaggaatataatcttgatgagccaaatgcagaaagtgattacacatatagcagctcctatgaacaattcaatggtgaattgccaaatggacgacataaaattcccgagtcacagttcccagagttttccacctcgttgttctctggatccttagaacctgtggcctgcggctctgtgctttctgagggatcaccacttactgagcaagaggagagcagtccatcccatgacagaagcagaacggtttcagcctccagtactggggatttgccaaaagcaaaaacccgggcagctgacttgttggtgaatcccctggatccgcggaatgcagataaaattagagtaaaaattgctgacctgggaaatgcttgttgggtgcataaacacttcacggaagacatccagacgcgtcagtaccgctccatagaggttttaataggagcggggtacagcacccctgcggacatctggagcacggcgtgtatggcatttgagctggcaacgggagattatttgtttgaaccacattctggggaagactattccagagacgaagaccacatagcccacatcatagagctgctaggcagtattccaaggcactttgctctatctggaaaatattctcgggaattcttcaatcgcagaggagaactgcgacacatcaccaagctgaagccctggagcctctttgatgtacttgtggaaaagtatggctggccccatgaagatgctgcacagtttacagatttcctgatcccgatgttagaaatggttccagaaaaacgagcctcagctggcgaatgccttcggcatccttggttgaattcttagcaaattctaccaatattgcattctgagctagcaaatgttcccagtacattggacctaaacggtgactctcattctttaacaggattacaagtgagctggcttcatcctcagacctttattttgctttgaggtactgttgtttgacattttgctttttgtgcactgtgatcctggggaagggtagtcttttgtcttcagctaagtagtttactgaccattttcttctggaaacaataacatgtctctaagcattgtttcttgtgttgtgtgacattcaaatgtcatttttttgaatgaaaaatactttcccctttgtgttttggcaggttttgtaactatttatgaagaaatattttagctgagtactatataatttacaatcttaagaaattatcaagttggaaccaagaaatagcaaggaaatgtacaattttatcttctggcaaagggacatcattcctgtattatagtgtatgtaaatgcaccctgtaaatgttactttccattaaatatgggagggggactcaaatttcagaaaagctaccaagtcttgagtgctttgtagcctatgttgcatgtagcggactttaactgctccaaggagttgtgcaaacttttcattccataacagtcttttcacattggattttaaacaaagtggctctgggttataagatgtcattctctatatggcactttaaaggaagaaaagatatgtttctcattctaaaatatgcattataatttagcagtcccatttgtgattttgcatatttttaaaagtacttttaaagaagagcaatttccctttaaaaatgtgatggctcagtaccatgtcatgttgcctcctctgggcgctgtaagttaagctctacatagattaaattggagaaacgtgttaattgtgtggaatgaaaaaatacatatatttttggaaaagcatgatcatgcttgtctagaacacaaggtatggtatatacaatttgcagtgcagtgggcagaatacttctcacagctcaaagataacagtgatcacattcattccataggtagctttacgtgtggctacaacaaattttactagctttttcattgtctttccatgaaacgaagttgagaaaatgattttccctttgcaggttgcacacagttttgtttatgcatttccttaaaattaattgtagactccaggatacaaaccatagtaggcaatacaattttagaatgtaatatatagaggtatatttagcctcttttagaagtcagtggattgaatgtctttttattttaaattttacattcattaaggtgcctcgtttttgactttgtccattaacatttatccatatgcctttgcaataactagattgtgaaaagctaacaagtgttgtaacaataatccattgtttgaggtgcttgcagttgtcttaaaaattaaagtgttttggtttttttttttcca

SEQ ID NO: 432528 - DNA, 4621 bp, Homo sapiens
  misc_feature (4364)..(4364): n is a, c, g, or t
ggcggcggcgcaggcgcggttctcgtctcctcccggccggcggagcgagtggaggctgcagcccagctcgtctcggcgcccgcgtcgccgtcgcgaagccccccgccccgcttccgccgcgtcggaatgagctcccggaaagtgctggccattcaggcccgaaagcggaggccgaaaagagagaaacatccgaaaaagccggagcctcaacagaaagctcctttagttcctcctcctccaccgccaccaccaccaccaccgccacctttgccagaccccacacccccggagccagaggaggagatcctgggatcagatgatgaggagcaagaggaccctgcggactactgcaaaggtggatatcatccagtgaaaattggagacctcttcaatggccggtatcatgttattagaaagcttggatgggggcacttctctactgtctggctgtgctgggatatgcaggggaaaagatttgttgcaatgaaagttgtaaaaagtgcccagcattatacggagacagccttggatgaaataaaattgctcaaatgtgttcgagaaagtgatcccagtgacccaaacaaagacatggtggtccagctcattgacgacttcaagatttcaggcatgaatgggatacatgtctgcatggtcttcgaagtacttggccaccatctcctcaagtggatcatcaaatccaactatcaaggcctcccagtacgttgtgtgaagagtatcattcgacaggtccttcaagggttagattacttacacagtaagtgcaagatcattcatactgacataaagccggaaaatatcttgatgtgtgtggatgatgcatatgtgagaagaatggcagctgaggccactgagtggcagaaagcaggtgctcctcctccttcagggtctgcagtgagtacggctccacagcagaaacctataggaaaaatatctaaaaacaaaaagaaaaaactgaaaaagaaacagaagaggcaggctgagttattggagaagcgcctgcaggagatagaagaattggagcgagaagctgaaaggaaaataatagaagaaaacatcacctcagctgcaccttccaatgaccaggatggcgaatactgcccagaggtgaaactaaaaacaacaggattagaggaggcggctgaggcagagactgcaaaggacaatggtgaagctgaggaccaggaagagaaagaagatgctgagaaagaaaacattgaaaaagatgaagatgatgtagatcaggaacttgcgaacatagaccctacgtggatagaatcacctaaaaccaatggccatattgagaatggcccattctcactggagcagcaactggacgatgaagatgatgatgaagaagactgcccaaatcctgaggaatataatcttgatgagccaaatgcagaaagtgattacacatatagcagctcctatgaacaattcaatggtgaattgccaaatggacgacataaaattcccgagtcacagttcccagagttttccacctcgttgttctctggatccttagaacctgtggcctgcggctctgtgctttctgagggatcaccacttactgagcaagaggagagcagtccatcccatgacagaagcagaacggtttcagcctccagtactggggatttgccaaaagcaaaaacccgggcagctgacttgttggtgaatcccctggatccgcggaatgcagataaaattagagtaaaaattgctgacctgggaaatgcttgttgggtgcataaacacttcacggaagacatccagacgcgtcagtaccgctccatagaggttttaataggagcggggtacagcacccctgcggacatctggagcacggcgtgtatggcatttgagctggcaacgggagattatttgtttgaaccacattctggggaagactattccagagacgaagaccacatagcccacatcatagagctgctaggcagtattccaaggcactttgctctatctggaaaatattctcgggaattcttcaatcgcagaggagaactgcgacacatcaccaagctgaagccctggagcctctttgatgtacttgtggaaaagtatggctggccccatgaagatgctgcacagtttacagatttcctgatcccgatgttagaaatggttccagaaaaacgagcctcagctggcgaatgccttcggcatccttggttgaattcttagcaaattctaccaatattgcattctgagctagcaaatgttcccagtacattggacctaaacggtgactctcattctttaacaggattacaagtgagctggcttcatcctcagacctttattttgctttgaggtactgttgtttgacattttgctttttgtgcactgtgatcctggggaagggtagtcttttgtcttcagctaagtagtttactgaccattttcttctggaaacaataacatgtctctaagcattgtttcttgtgttgtgtgacattcaaatgtcatttttttgaatgaaaaatactttcccctttgtgttttggcaggttttgtaactatttatgaagaaatattttagctgagtactatataatttacaatcttaagaaattatcaagttggaaccaagaaatagcaaggaaatgtacaattttatcttctggcaaagggacatcattcctgtattatagtgtatgtaaatgcaccctgtaaatgttactttccattaaatatgggagggggactcaaatttcagaaaagctaccaagtcttgagtgctttgtagcctatgttgcatgtagcggactttaactgctccaaggagttgtgcaaacttttcattccataacagtcttttcacattggattttaaacaaagtggctctgggttataagatgtcattctctatatggcactttaaaggaagaaaagatatgtttctcattctaaaatatgcattataatttagcagtcccatttgtgattttgcatatttttaaaagtacttttaaagaagagcaatttccctttaaaaatgtgatggctcagtaccatgtcatgttgcctcctctgggcgctgtaagttaagctctacatagattaaattggagaaacgtgttaattgtgtggaatgaaaaaatacatatatttttggaaaagcatgatcatgcttgtctagaacacaaggtatggtatatacaatttgcagtgcagtgggcagaatacttctcacagctcaaagataacagtgatcacattcattccataggtagctttacgtgtggctacaacaaattttactagctttttcattgtctttccatgaaacgaagttgagaaaatgattttccctttgcaggttgcacacagttttgtttatgcatttccttaaaattaattgtagactccaggatacaaaccatagtaggcaatacaattttagaatgtaatatatagaggtatatttagcctcttttagaagtcagtggattgaatgtctttttattttaaattttacattcattaaggtgcctcgtttttgactttgtccattaacatttatccatatgcctttgcaataactagattgtgaaaagctaacaagtgttgtaacaataatccattgtttgaggtgcttgcagttgtcttaaaaattaaagtgttttggtttttttttttccacagacattgccttggtcattgccctataaatgatagaatcaatgaacatttgctatcagagtagtgtcactaaaactaaataccagcattcctgttgcagcagatgtagttgtagaacatgcattgaggcgtattataaggaaatcatttattgttttttaagggcagaagggatttaggagaaaagctacagtatagattgattctctagaatatcaatgatcccttttcatccatggttcatcaaaaacatactaactgcatttgtttgatcattgcaaatttaaaacaaaacagcatttgctgttaggaaacaagacacataatcctcttaggaattaccattatatcacattaccactgtgaggtagaatggatcattcattaatttctttatgaaatttgcatgctaagtttttctaatgaggctgtaggtttccatgtaaattctgtgatagatagtggctgtagactggtgatgctatccgtgatttctatgagaaacatccttacaagaaccatagggcataatttatatcttccctaagtgtaaaaggatttttatcagggtgatagtatacttgaatgaaatttgtctaatgcagtttttgcttatgttggaaaataaactagattatgaatttttaaaaaaaaaaaaacaaaaaaaaaacaaacnttggtgggccggctcaggccttgagagaaaagttttcaaacaccatttcttgtgggcgcgcgggggcccatgtggtttacttgaccttggccaaaggtggtccaaaggaaaatcgtgcgcctggacatgcgtgtggtttcctcccaaataaaaaacgcgcggggacaccgaggtgcttggacaattccagatgggtccgcgccatacgggtccaccaccggtccaggagccgtactacggacgcgggagggggggcg

SEQ ID NO: 432529 - DNA, 4335 bp, Homo sapiens
ggcggcggcgcaggcgcggttctcgtctcctcccggccggcggagcgagtggaggctgcagcccagctcgtctcggcgcccgcgtcgccgtcgcgaagccccccgccccgcttccgccgcgtcggaatgagctcccggaaagtgctggccattcaggcccgaaagcggaggccgaaaagagagaaacatccgaaaaagccggagcctcaacagaaagctcctttagttcctcctcctccaccgccaccaccaccaccaccgccacctttgccagaccccacacccccggagccagaggaggagatcctgggatcagatgatgaggagcaagaggaccctgcggactactgcaaaggtggatatcatccagtgaaaattggagacctcttcaatggccggtatcatgttattagaaagcttggatgggggcacttctctactgtctggctgtgctgggatatgcaggggaaaagatttgttgcaatgaaagttgtaaaaagtgcccagcattatacggagacagccttggatgaaataaaattgctcaaatgtgttcgagaaagtgatcccagtgacccaaacaaagacatggtggtccagctcattgacgacttcaagatttcaggcatgaatgggatacatgtctgcatggtcttcgaagtacttggccaccatctcctcaagtggatcatcaaatccaactatcaaggcctcccagtacgttgtgtgaagagtatcattcgacaggtccttcaagggttagattacttacacagtaagtgcaagatcattcatactgacataaagccggaaaatatcttgatgtgtgtggatgatgcatatgtgagaagaatggcagctgaggccactgagtggcagaaagcaggtgctcctcctccttcagggtctgcagtgagtacggctccacagcagaaacctataggaaaaatatctaaaaacaaaaagaaaaaactgaaaaagaaacagaagaggcaggctgagttattggagaagcgcctgcaggagatagaagaattggagcgagaagctgaaaggaaaataatagaagaaaacatcacctcagctgcaccttccaatgaccaggatggcgaatactgcccagaggtgaaactaaaaacaacaggattagaggaggcggctgaggcagagactgcaaaggacaatggtgaagctgaggaccaggaagagaaagaagatgctgagaaagaaaacattgaaaaagatgaagatgatgtagatcaggaacttgcgaacatagaccctacgtggatagaatcacctaaaaccaatggccatattgagaatggcccattctcactggagcagcaactggacgatgaagatgatgatgaagaagactgcccaaatcctgaggaatataatcttgatgagccaaatgcagaaagtgattacacatatagcagctcctatgaacaattcaatggtgaattgccaaatggacgacataaaattcccgagtcacagttcccagagttttccacctcgttgttctctggatccttagaacctgtggcctgcggctctgtgctttctgagggatcaccacttactgagcaagaggagagcagtccatcccatgacagaagcagaacggtttcagcctccagtactggggatttgccaaaagcaaaaacccgggcagctgacttgttggtgaatcccctggatccgcggaatgcagataaaattagagtaaaaattgctgacctgggaaatgcttgttgggtgcataaacacttcacggaagacatccagacgcgtcagtaccgctccatagaggttttaataggagcggggtacagcacccctgcggacatctggagcacggcgtgtatggcatttgagctggcaacgggagattatttgtttgaaccacattctggggaagactattccagagacgaagaccacatagcccacatcatagagctgctaggcagtattccaaggcactttgctctatctggaaaatattctcgggaattcttcaatcgcagaggagaactgcgacacatcaccaagctgaagccctggagcctctttgatgtacttgtggaaaagtatggctggccccatgaagatgctgcacagtttacagatttcctgatcccgatgttagaaatggttccagaaaaacgagcctcagctggcgaatgccttcggcatccttggttgaattcttagcaaattctaccaatattgcattctgagctagcaaatgttcccagtacattggacctaaacggtgactctcattctttaacaggattacaagtgagctggcttcatcctcagacctttattttgctttgaggtactgttgtttgacattttgctttttgtgcactgtgatcctggggaagggtagtcttttgtcttcagctaagtagtttactgaccattttcttctggaaacaataacatgtctctaagcattgtttcttgtgttgtgtgacattcaaatgtcatttttttgaatgaaaaatactttcccctttgtgttttggcaggttttgtaactatttatgaagaaatattttagctgagtactatataatttacaatcttaagaaattatcaagttggaaccaagaaatagcaaggaaatgtacaattttatcttctggcaaagggacatcattcctgtattatagtgtatgtaaatgcaccctgtaaatgttactttccattaaatatgggagggggactcaaatttcagaaaagctaccaagtcttgagtgctttgtagcctatgttgcatgtagcggactttaactgctccaaggagttgtgcaaacttttcattccataacagtcttttcacattggattttaaacaaagtggctctgggttataagatgtcattctctatatggcactttaaaggaagaaaagatatgtttctcattctaaaatatgcattataatttagcagtcccatttgtgattttgcatatttttaaaagtacttttaaagaagagcaatttccctttaaaaatgtgatggctcagtaccatgtcatgttgcctcctctgggcgctgtaagttaagctctacatagattaaattggagaaacgtgttaattgtgtggaatgaaaaaatacatatatttttggaaaagcatgatcatgcttgtctagaacacaaggtatggtatatacaatttgcagtgcagtgggcagaatacttctcacagctcaaagataacagtgatcacattcattccataggtagctttacgtgtggctacaacaaattttactagctttttcattgtctttccatgaaacgaagttgagaaaatgattttccctttgcaggttgcacacagttttgtttatgcatttccttaaaattaattgtagactccaggatacaaaccatagtaggcaatacaattttagaatgtaatatatagaggtatatttagcctcttttagaagtcagtggattgaatgtctttttattttaaattttacattcattaaggtgcctcgtttttgactttgtccattaacatttatccatatgcctttgcaataactagattgtgaaaagctaacaagtgttgtaacaataatccattgtttgaggtgcttgcagttgtcttaaaaattaaagtgttttggtttttttttttccacagacattgccttggtcattgccctataaatgatagaatcaatgaacatttgctatcagagtagtgtcactaaaactaaataccagcattcctgttgcagcagatgtagttgtagaacatgcattgaggcgtattataaggaaatcatttattgttttttaagggcagaagggatttaggagaaaagctacagtatagattgattctctagaatatcaatgatcccttttcatccatggttcatcaaaaacatactaactgcatttgtttgatcattgcaaatttaaaacaaaacagcatttgctgttaggaaacaagacacataatcctcttaggaattaccattatatcacattaccactgtgaggtagaatggatcattcattaatttctttatgaaatttgcatgctaagtttttctaatgaggctgtaggtttccatgtaaattctgtgatagatagtggctgtagactggtgatgctatccgtgatttctatgagaaacatccttacaagaaccatagggcataatttatatcttccctaagtgtaaaaggatttttatcagggtgatagtatacttgaatgaaatttgtctaatgcagtttttgcttatgttggaaaataaactagattatgaattttta

SEQ ID NO: 432530 - DNA, 3950 bp, Homo sapiens
ggcggcggcgcaggcgcggttctcgtctcctcccggccggcggagcgagtggaggctgcagcccagctcgtctcggcgcccgcgtcgccgtcgcgaagccccccgccccgcttccgccgcgtcggaatgagctcccggaaagtgctggccattcaggcccgaaagcggaggccgaaaagagagaaacatccgaaaaagccggagcctcaacagaaagctcctttagttcctcctcctccaccgccaccaccaccaccaccgccacctttgccagaccccacacccccggagccagaggaggagatcctgggatcagatgatgaggagcaagaggaccctgcggactactgcaaaggtggatatcatccagtgaaaattggagacctcttcaatggccggtatcatgttattagaaagcttggatgggggcacttctctactgtctggctgtgctgggatatgcaggggaaaagatttgttgcaatgaaagttgtaaaaagtgcccagcattatacggagacagccttggatgaaataaaattgctcaaatgtgttcgagaaagtgatcccagtgacccaaacaaagacatggtggtccagctcattgacgacttcaagatttcaggcatgaatgggatacatgtctgcatggtcttcgaagtacttggccaccatctcctcaagtggatcatcaaatccaactatcaaggcctcccagtacgttgtgtgaagagtatcattcgacaggtccttcaagggttagattacttacacagtaagtgcaagatcattcatactgacataaagccggaaaatatcttgatgtgtgtggatgatgcatatgtgagaagaatggcagctgaggccactgagtggcagaaagcaggtgctcctcctccttcagggtctgcagtgagtacggctccacagcagaaacctataggaaaaatatctaaaaacaaaaagaaaaaactgaaaaagaaacagaagaggcaggctgagttattggagaagcgcctgcaggagatagaagaattggagcgagaagctgaaaggaaaataatagaagaaaacatcacctcagctgcaccttccaatgaccaggatggcgaatactgcccagaggtgaaactaaaaacaacaggattagaggaggcggctgaggcagagactgcaaaggacaatggtgaagctgaggaccaggaagagaaagaagatgctgagaaagaaaacattgaaaaagatgaagatgatgtagatcaggaacttgcgaacatagaccctacgtggatagaatcacctaaaaccaatggccatattgagaatggcccattctcactggagcagcaactggacgatgaagatgatgatgaagaagactgcccaaatcctgaggaatataatcttgatgagccaaatgcagaaagtgattacacatatagcagctcctatgaacaattcaatggtgaattgccaaatggacgacataaaattcccgagtcacagttcccagagttttccacctcgttgttctctggatccttagaacctgtggcctgcggctctgtgctttctgagggatcaccacttactgagcaagaggagagcagtccatcccatgacagaagcagaacggtttcagcctccagtactggggatttgccaaaagcaaaaacccgggcagctgacttgttggtgaatcccctggatccgcggaatgcagataaaattagagtaaaaattgctgacctgggaaatgcttgttgggtgcataaacacttcacggaagacatccagacgcgtcagtaccgctccatagaggttttaataggagcggggtacagcacccctgcggacatctggagcacggcgtgtatggcatttgagctggcaacgggagattatttgtttgaaccacattctggggaagactattccagagacgaagaccacatagcccacatcatagagctgctaggcagtattccaaggcactttgctctatctggaaaatattctcgggaattcttcaatcgcagaggagaactgcgacacatcaccaagctgaagccctggagcctctttgatgtacttgtggaaaagtatggctggccccatgaagatgctgcacagtttacagatttcctgatcccgatgttagaaatggttccagaaaaacgagcctcagctggcgaatgccttcggcatccttggttgaattcttagcaaattctaccaatattgcattctgagctagcaaatgttcccagtacattggacctaaacggtgactctcattctttaacaggattacaagtgagctggcttcatcctcagacctttattttgctttgaggtactgttgtttgacattttgctttttgtgcactgtgatcctggggaagggtagtcttttgtcttcagctaagtagtttactgaccattttcttctggaaacaataacatgtctctaagcattgtttcttgtgttgtgtgacattcaaatgtcatttttttgaatgaaaaatactttcccctttgtgttttggcaggttttgtaactatttatgaagaaatattttagctgagtactatataatttacaatcttaagaaattatcaagttggaaccaagaaatagcaaggaaatgtacaattttatcttctggcaaagggacatcattcctgtattatagtgtatgtaaatgcaccctgtaaatgttactttccattaaatatgggagggggactcaaatttcagaaaagctaccaagtcttgagtgctttgtagcctatgttgcatgtagcggactttaactgctccaaggagttgtgcaaacttttcattccataacagtcttttcacattggattttaaacaaagtggctctgggttataagatgtcattctctatatggcactttaaaggaagaaaagatatgtttctcattctaaaatatgcattataatttagcagtcccatttgtgattttgcatatttttaaaagtacttttaaagaagagcaatttccctttaaaaatgtgatggctcagtaccatgtcatgttgcctcctctgggcgctgtaagttaagctctacatagattaaattggagaaacgtgttaattgtgtggaatgaaaaaatacatatatttttggaaaagcatgatcatgcttgtctagaacacaaggtatggtatatacaatttgcagtgcagtgggcagaatacttctcacagctcaaagataacagtgatcacattcattccataggtagctttacgtgtggctacaacaaattttactagctttttcattgtctttccatgaaacgaagttgagaaaatgattttccctttgcaggttgcacacagttttgtttatgcatttccttaaaattaattgtagactccaggatacaaaccatagtaggcaatacaattttagaatgtaatatatagaggtatatttagcctcttttagaagtcagtggattgaatgtctttttattttaaattttacattcattaaggtgcctcgtttttgactttgtccattaacatttatccatatgcctttgcaataactagattgtgaaaagctaacaagtgttgtaacaataatccattgtttgaggtgcttgcagttgtcttaaaaattaaagtgttttggtttttttttttccaaaaaaaaaaaaacaaaaaaaaaacagacagagaaaaaacaaaaaaaaacctccccagaggcgcgggagatccggcgacgcaaaaggggcgcgagagcaactaccagagaggggggacgccggagaccaacgttttgtggtgcccctctaaagggaggggggaaatataacagagctgggggaaaaaccagggggcacaaagtggtacctgggtggaaactgggatccccggcacaaattccccccaaatttccgaaacacgc

SEQ ID NO: 432531 - DNA, 3752 bp, Homo sapiens
ggcggcggcgcaggcgcggttctcgtctcctcccggccggcggagcgagtggaggctgcagcccagctcgtctcggcgcccgcgtcgccgtcgcgaagccccccgccccgcttccgccgcgtcggaatgagctcccggaaagtgctggccattcaggcccgaaagcggaggccgaaaagagagaaacatccgaaaaaaaatcaagcagaagattgagctgctgatgtcagttaactctgagaagtcgtcctcttcagaaaggccggagcctcaacagaaagctcctttagttcctcctcctccaccgccaccaccaccaccaccgccacctttgccagaccccacacccccggagccagaggaggagatcctgggatcagatgatgaggagcaagaggaccctgcggactactgcaaaggtggatatcatccagtgaaaattggagacctcttcaatggccggtatcatgttattagaaagcttggatgggggcacttctctactgtctggctgtgctgggatatgcaggggaaaagatttgttgcaatgaaagttgtaaaaagtgcccagcattatacggagacagccttggatgaaataaaattgctcaaatgtgttcgagaaagtgatcccagtgacccaaacaaagacatggtggtccagctcattgacgacttcaagatttcaggcatgaatgggatacatgtctgcatggtcttcgaagtacttggccaccatctcctcaagtggatcatcaaatccaactatcaaggcctcccagtacgttgtgtgaagagtatcattcgacaggtccttcaagggttagattacttacacagtaagtgcaagatcattcatactgacataaagccggaaaatatcttgatgtgtgtggatgatgcatatgtgagaagaatggcagctgaggccactgagtggcagaaagcaggtgctcctcctccttcagggtctgcagtgagtacggctccacagcagaaacctataggaaaaatatctaaaaacaaaaagaaaaaactgaaaaagaaacagaagaggcaggctgagttattggagaagcgcctgcaggagatagaagaattggagcgagaagctgaaaggaaaataatagaagaaaacatcacctcagctgcaccttccaatgaccaggatggcgaatactgcccagaggtgaaactaaaaacaacaggattagaggaggcggctgaggcagagactgcaaaggacaatggtgaagctgaggaccaggaagagaaagaagatgctgagaaagaaaacattgaaaaagatgaagatgatgtagatcaggaacttgcgaacatagaccctacgtggatagaatcacctaaaaccaatggccatattgagaatggcccattctcactggagcagcaactggacgatgaagatgatgatgaagaagactgcccaaatcctgaggaatataatcttgatgagccaaatgcagaaagtgattacacatatagcagctcctatgaacaattcaatggtgaattgccaaatggacgacataaaattcccgagtcacagttcccagagttttccacctcgttgttctctggatccttagaacctgtggcctgcggctctgtgctttctgagggatcaccacttactgagcaagaggagagcagtccatcccatgacagaagcagaacggtttcagcctccagtactggggatttgccaaaagcaaaaacccgggcagctgacttgttggtgaatcccctggatccgcggaatgcagataaaattagagtaaaaattgctgacctgggaaatgcttgttgggtgcataaacacttcacggaagacatccagacgcgtcagtaccgctccatagaggttttaataggagcggggtacagcacccctgcggacatctggagcacggcgtgtatggcatttgagctggcaacgggagattatttgtttgaaccacattctggggaagactattccagagacgaagaccacatagcccacatcatagagctgctaggcagtattccaaggcactttgctctatctggaaaatattctcgggaattcttcaatcgcagaggagaactgcgacacatcaccaagctgaagccctggagcctctttgatgtacttgtggaaaagtatggctggccccatgaagatgctgcacagtttacagatttcctgatcccgatgttagaaatggttccagaaaaacgagcctcagctggcgaatgccttcggcatccttggttgaattcttagcaaattctaccaatattgcattctgagctagcaaatgttcccagtacattggacctaaacggtgactctcattctttaacaggattacaagtgagctggcttcatcctcagacctttattttgctttgaggtactgttgtttgacattttgctttttgtgcactgtgatcctggggaagggtagtcttttgtcttcagctaagtagtttactgaccattttcttctggaaacaataacatgtctctaagcattgtttcttgtgttgtgtgacattcaaatgtcatttttttgaatgaaaaatactttcccctttgtgttttggcaggttttgtaactatttatgaagaaatattttagctgagtactatataatttacaatcttaagaaattatcaagttggaaccaagaaatagcaaggaaatgtacaattttatcttctggcaaagggacatcattcctgtattatagtgtatgtaaatgcaccctgtaaatgttactttccattaaatatgggagggggactcaaatttcagaaaagctaccaagtcttgagtgctttgtagcctatgttgcatgtagcggactttaactgctccaaggagttgtgcaaacttttcattccataacagtcttttcacattggattttaaacaaagtggctctgggttataagatgtcattctctatatggcactttaaaggaagaaaagatatgtttctcattctaaaatatgcattataatttagcagtcccatttgtgattttgcatatttttaaaagtacttttaaagaagagcaatttccctttaaaaatgtgatggctcagtaccatgtcatgttgcctcctctgggcgctgtaagttaagctctacatagattaaattggagaaacgtgttaattgtgtggaatgaaaaaatacatatatttttggaaaagcatgatcatgcttgtctagaacacaaggtatggtatatacaatttgcagtgcagtgggcagaatacttctcacagctcaaagataacagtgatcacattcattccataggtagctttacgtgtggctacaacaaattttactagctttttcattgtctttccatgaaacgaagttgagaaaatgattttccctttgcaggttgcacacagttttgtttatgcatttccttaaaattaattgtagactccaggatacaaaccatagtaggcaatacaattttagaatgtaatatatagaggtatatttagcctcttttagaagtcagtggattgaatgtctttttattttaaattttacattcattaaggtgcctcgtttttgactttgtccattaacatttatccatatgcctttgcaataactagattgtgaaaagctaacaagtgttgtaacaataatccattgtttgaggtgcttgcagttgtcttaaaaattaaagtgttttggtttttttttttcca

SEQ ID NO: 432532 - DNA, 3706 bp, Homo sapiens
cttggatcagcggactctgggggaagccagccactcaagcagtcctatgaaggggtccgtgcagtgaggaaatgaggcctctgcaacagctatgcaagtgaattatcttggtaacaggtctttcagcctccgtcaagccttcagatgactgcggcctcaagtgacatcttgactcaccagctaaactgctcccaaattgctggaccacaaaaactgccggagcctcaacagaaagctcctttagttcctcctcctccaccgccaccaccaccaccaccgccacctttgccagaccccacacccccggagccagaggaggagatcctgggatcagatgatgaggagcaagaggaccctgcggactactgcaaaggtggatatcatccagtgaaaattggagacctcttcaatggccggtatcatgttattagaaagcttggatgggggcacttctctactgtctggctgtgctgggatatgcaggggaaaagatttgttgcaatgaaagttgtaaaaagtgcccagcattatacggagacagccttggatgaaataaaattgctcaaatgtgttcgagaaagtgatcccagtgacccaaacaaagacatggtggtccagctcattgacgacttcaagatttcaggcatgaatgggatacatgtctgcatggtcttcgaagtacttggccaccatctcctcaagtggatcatcaaatccaactatcaaggcctcccagtacgttgtgtgaagagtatcattcgacaggtccttcaagggttagattacttacacagtaagtgcaagatcattcatactgacataaagccggaaaatatcttgatgtgtgtggatgatgcatatgtgagaagaatggcagctgaggccactgagtggcagaaagcaggtgctcctcctccttcagggtctgcagtgagtacggctccacagcagaaacctataggaaaaatatctaaaaacaaaaagaaaaaactgaaaaagaaacagaagaggcaggctgagttattggagaagcgcctgcaggagatagaagaattggagcgagaagctgaaaggaaaataatagaagaaaacatcacctcagctgcaccttccaatgaccaggatggcgaatactgcccagaggtgaaactaaaaacaacaggattagaggaggcggctgaggcagagactgcaaaggacaatggtgaagctgaggaccaggaagagaaagaagatgctgagaaagaaaacattgaaaaagatgaagatgatgtagatcaggaacttgcgaacatagaccctacgtggatagaatcacctaaaaccaatggccatattgagaatggcccattctcactggagcagcaactggacgatgaagatgatgatgaagaagactgcccaaatcctgaggaatataatcttgatgagccaaatgcagaaagtgattacacatatagcagctcctatgaacaattcaatggtgaattgccaaatggacgacataaaattcccgagtcacagttcccagagttttccacctcgttgttctctggatccttagaacctgtggcctgcggctctgtgctttctgagggatcaccacttactgagcaagaggagagcagtccatcccatgacagaagcagaacggtttcagcctccagtactggggatttgccaaaagcaaaaacccgggcagctgacttgttggtgaatcccctggatccgcggaatgcagataaaattagagtaaaaattgctgacctgggaaatgcttgttgggtgcataaacacttcacggaagacatccagacgcgtcagtaccgctccatagaggttttaataggagcggggtacagcacccctgcggacatctggagcacggcgtgtatggcatttgagctggcaacgggagattatttgtttgaaccacattctggggaagactattccagagacgaagaccacatagcccacatcatagagctgctaggcagtattccaaggcactttgctctatctggaaaatattctcgggaattcttcaatcgcagaggagaactgcgacacatcaccaagctgaagccctggagcctctttgatgtacttgtggaaaagtatggctggccccatgaagatgctgcacagtttacagatttcctgatcccgatgttagaaatggttccagaaaaacgagcctcagctggcgaatgccttcggcatccttggttgaattcttagcaaattctaccaatattgcattctgagctagcaaatgttcccagtacattggacctaaacggtgactctcattctttaacaggattacaagtgagctggcttcatcctcagacctttattttgctttgaggtactgttgtttgacattttgctttttgtgcactgtgatcctggggaagggtagtcttttgtcttcagctaagtagtttactgaccattttcttctggaaacaataacatgtctctaagcattgtttcttgtgttgtgtgacattcaaatgtcatttttttgaatgaaaaatactttcccctttgtgttttggcaggttttgtaactatttatgaagaaatattttagctgagtactatataatttacaatcttaagaaattatcaagttggaaccaagaaatagcaaggaaatgtacaattttatcttctggcaaagggacatcattcctgtattatagtgtatgtaaatgcaccctgtaaatgttactttccattaaatatgggagggggactcaaatttcagaaaagctaccaagtcttgagtgctttgtagcctatgttgcatgtagcggactttaactgctccaaggagttgtgcaaacttttcattccataacagtcttttcacattggattttaaacaaagtggctctgggttataagatgtcattctctatatggcactttaaaggaagaaaagatatgtttctcattctaaaatatgcattataatttagcagtcccatttgtgattttgcatatttttaaaagtacttttaaagaagagcaatttccctttaaaaatgtgatggctcagtaccatgtcatgttgcctcctctgggcgctgtaagttaagctctacatagattaaattggagaaacgtgttaattgtgtggaatgaaaaaatacatatatttttggaaaagcatgatcatgcttgtctagaacacaaggtatggtatatacaatttgcagtgcagtgggcagaatacttctcacagctcaaagataacagtgatcacattcattccataggtagctttacgtgtggctacaacaaattttactagctttttcattgtctttccatgaaacgaagttgagaaaatgattttccctttgcaggttgcacacagttttgtttatgcatttccttaaaattaattgtagactccaggatacaaaccatagtaggcaatacaattttagaatgtaatatatagaggtatatttagcctcttttagaagtcagtggattgaatgtctttttattttaaattttacattcattaaggtgcctcgtttttgactttgtccattaacatttatccatatgcctttgcaataactagattgtgaaaagctaacaagtgttgtaacaataatccattgtttgaggtgcttgcagttgtcttaaaaattaaagtgttttggtttttttttttcca

SEQ ID NO: 432533 - DNA, 4590 bp, Homo sapiens
atagcctcccaaagtgctgggattacaggtgtgagccacggcaccaggcctcatcccattacattctaaagattgtgtcaaaatgagttatgcttcttgtgaggtgatgggaccgttatatctctccagtgtctgtggtacaacagactaaaagatgaatatatttaatttcttaatgtttcttttgctaattttccttagctagcaatatatgtgttagctttagtgtctttttaggttcagattatttttggtagaccttaaaaaatgagaagataaaggatatccgaaagaagccttaaggtagatcctttacttggaagtatcaggctcttccacctgactccactcataataaaaaatgaaaacaaaagtggttgacgtagcaaagattttaacttttaaagcttgatagagctttgcaggtttaggaagataacttcccagtcttcagattgggatggtgagactgtgtggccccacctccatgcaggccatgcagaacacaggactgtagagaaacagaggctcattctcagttccaacaggaggaagagtgcccactgggcagccagtcctgttagggcaaggagcagcccttctggagacatggcagatcttaacgtttcagtgcatatggatgggggagggtgttctggggctggtggaacgtagagggcattcatggtggtgaaagtgggatgtaggagagggtttgggtgatgatggataactgggttcactgtgtgctaactgagctgaacagagtatgaggcgttggcctacattgtctccctggaaagactgctgtcacaggttctcttgctggcattgtgatgcagggctgcgtgaagccctccttacagcgggaggtgggctctgttggagtgggccctgtgcctctgctgtctcctactgctaacagtgaacaaccaaggcgatgggctgtaggatgttgatacatctgaggggccagatggccaccatatcagggaaagccaatgtgttttgaaaaatatgcaaatgttcaataagaaatcaagcagaagattgagctgctgatgtcagttaactctgagaagtcgtcctcttcagaaaggccggagcctcaacagaaagctcctttagttcctcctcctccaccgccaccaccaccaccaccgccacctttgccagaccccacacccccggagccagaggaggagatcctgggatcagatgatgaggagcaagaggaccctgcggactactgcaaaggtggatatcatccagtgaaaattggagacctcttcaatggccggtatcatgttattagaaagcttggatgggggcacttctctactgtctggctgtgctgggatatgcaggggaaaagatttgttgcaatgaaagttgtaaaaagtgcccagcattatacggagacagccttggatgaaataaaattgctcaaatgtgttcgagaaagtgatcccagtgacccaaacaaagacatggtggtccagctcattgacgacttcaagatttcaggcatgaatgggatacatgtctgcatggtcttcgaagtacttggccaccatctcctcaagtggatcatcaaatccaactatcaaggcctcccagtacgttgtgtgaagagtatcattcgacaggtccttcaagggttagattacttacacagtaagtgcaagatcattcatactgacataaagccggaaaatatcttgatgtgtgtggatgatgcatatgtgagaagaatggcagctgaggccactgagtggcagaaagcaggtgctcctcctccttcagggtctgcagtgagtacggctccacagcagaaacctataggaaaaatatctaaaaacaaaaagaaaaaactgaaaaagaaacagaagaggcaggctgagttattggagaagcgcctgcaggagatagaagaattggagcgagaagctgaaaggaaaataatagaagaaaacatcacctcagctgcaccttccaatgaccaggatggcgaatactgcccagaggtgaaactaaaaacaacaggattagaggaggcggctgaggcagagactgcaaaggacaatggtgaagctgaggaccaggaagagaaagaagatgctgagaaagaaaacattgaaaaagatgaagatgatgtagatcaggaacttgcgaacatagaccctacgtggatagaatcacctaaaaccaatggccatattgagaatggcccattctcactggagcagcaactggacgatgaagatgatgatgaagaagactgcccaaatcctgaggaatataatcttgatgagccaaatgcagaaagtgattacacatatagcagctcctatgaacaattcaatggtgaattgccaaatggacgacataaaattcccgagtcacagttcccagagttttccacctcgttgttctctggatccttagaacctgtggcctgcggctctgtgctttctgagggatcaccacttactgagcaagaggagagcagtccatcccatgacagaagcagaacggtttcagcctccagtactggggatttgccaaaagcaaaaacccgggcagctgacttgttggtgaatcccctggatccgcggaatgcagataaaattagagtaaaaattgctgacctgggaaatgcttgttgggtgcataaacacttcacggaagacatccagacgcgtcagtaccgctccatagaggttttaataggagcggggtacagcacccctgcggacatctggagcacggcgtgtatggcatttgagctggcaacgggagattatttgtttgaaccacattctggggaagactattccagagacgaagaccacatagcccacatcatagagctgctaggcagtattccaaggcactttgctctatctggaaaatattctcgggaattcttcaatcgcagaggagaactgcgacacatcaccaagctgaagccctggagcctctttgatgtacttgtggaaaagtatggctggccccatgaagatgctgcacagtttacagatttcctgatcccgatgttagaaatggttccagaaaaacgagcctcagctggcgaatgccttcggcatccttggttgaattcttagcaaattctaccaatattgcattctgagctagcaaatgttcccagtacattggacctaaacggtgactctcattctttaacaggattacaagtgagctggcttcatcctcagacctttattttgctttgaggtactgttgtttgacattttgctttttgtgcactgtgatcctggggaagggtagtcttttgtcttcagctaagtagtttactgaccattttcttctggaaacaataacatgtctctaagcattgtttcttgtgttgtgtgacattcaaatgtcatttttttgaatgaaaaatactttcccctttgtgttttggcaggttttgtaactatttatgaagaaatattttagctgagtactatataatttacaatcttaagaaattatcaagttggaaccaagaaatagcaaggaaatgtacaattttatcttctggcaaagggacatcattcctgtattatagtgtatgtaaatgcaccctgtaaatgttactttccattaaatatgggagggggactcaaatttcagaaaagctaccaagtcttgagtgctttgtagcctatgttgcatgtagcggactttaactgctccaaggagttgtgcaaacttttcattccataacagtcttttcacattggattttaaacaaagtggctctgggttataagatgtcattctctatatggcactttaaaggaagaaaagatatgtttctcattctaaaatatgcattataatttagcagtcccatttgtgattttgcatatttttaaaagtacttttaaagaagagcaatttccctttaaaaatgtgatggctcagtaccatgtcatgttgcctcctctgggcgctgtaagttaagctctacatagattaaattggagaaacgtgttaattgtgtggaatgaaaaaatacatatatttttggaaaagcatgatcatgcttgtctagaacacaaggtatggtatatacaatttgcagtgcagtgggcagaatacttctcacagctcaaagataacagtgatcacattcattccataggtagctttacgtgtggctacaacaaattttactagctttttcattgtctttccatgaaacgaagttgagaaaatgattttccctttgcaggttgcacacagttttgtttatgcatttccttaaaattaattgtagactccaggatacaaaccatagtaggcaatacaattttagaatgtaatatatagaggtatatttagcctcttttagaagtcagtggattgaatgtctttttattttaaattttacattcattaaggtgcctcgtttttgactttgtccattaacatttatccatatgcctttgcaataactagattgtgaaaagctaacaagtgttgtaacaataatccattgtttgaggtgcttgcagttgtcttaaaaattaaagtgttttggtttttttttttcca

SEQ ID NO: 432534 - DNA, 3774 bp, Homo sapiens
cttggatcagcggactctgggggaagccagccactcaagcagtcctatgaaggggtccgtgcagtgaggaaatgaggcctctgcaacagctatgcaagtgaattatcttggtaacaggtctttcagcctccgtcaagccttcagatgactgcggcctcaagtgacatcttgactcaccagctaaactgctcccaaattgctggaccacaaaaactgtggagtacatcctgctgcttcaagggtagaagactcctcactgctttccttcatgagatttcaaagggccggagcctcaacagaaagctcctttagttcctcctcctccaccgccaccaccaccaccaccgccacctttgccagaccccacacccccggagccagaggaggagatcctgggatcagatgatgaggagcaagaggaccctgcggactactgcaaaggtggatatcatccagtgaaaattggagacctcttcaatggccggtatcatgttattagaaagcttggatgggggcacttctctactgtctggctgtgctgggatatgcaggggaaaagatttgttgcaatgaaagttgtaaaaagtgcccagcattatacggagacagccttggatgaaataaaattgctcaaatgtgttcgagaaagtgatcccagtgacccaaacaaagacatggtggtccagctcattgacgacttcaagatttcaggcatgaatgggatacatgtctgcatggtcttcgaagtacttggccaccatctcctcaagtggatcatcaaatccaactatcaaggcctcccagtacgttgtgtgaagagtatcattcgacaggtccttcaagggttagattacttacacagtaagtgcaagatcattcatactgacataaagccggaaaatatcttgatgtgtgtggatgatgcatatgtgagaagaatggcagctgaggccactgagtggcagaaagcaggtgctcctcctccttcagggtctgcagtgagtacggctccacagcagaaacctataggaaaaatatctaaaaacaaaaagaaaaaactgaaaaagaaacagaagaggcaggctgagttattggagaagcgcctgcaggagatagaagaattggagcgagaagctgaaaggaaaataatagaagaaaacatcacctcagctgcaccttccaatgaccaggatggcgaatactgcccagaggtgaaactaaaaacaacaggattagaggaggcggctgaggcagagactgcaaaggacaatggtgaagctgaggaccaggaagagaaagaagatgctgagaaagaaaacattgaaaaagatgaagatgatgtagatcaggaacttgcgaacatagaccctacgtggatagaatcacctaaaaccaatggccatattgagaatggcccattctcactggagcagcaactggacgatgaagatgatgatgaagaagactgcccaaatcctgaggaatataatcttgatgagccaaatgcagaaagtgattacacatatagcagctcctatgaacaattcaatggtgaattgccaaatggacgacataaaattcccgagtcacagttcccagagttttccacctcgttgttctctggatccttagaacctgtggcctgcggctctgtgctttctgagggatcaccacttactgagcaagaggagagcagtccatcccatgacagaagcagaacggtttcagcctccagtactggggatttgccaaaagcaaaaacccgggcagctgacttgttggtgaatcccctggatccgcggaatgcagataaaattagagtaaaaattgctgacctgggaaatgcttgttgggtgcataaacacttcacggaagacatccagacgcgtcagtaccgctccatagaggttttaataggagcggggtacagcacccctgcggacatctggagcacggcgtgtatggcatttgagctggcaacgggagattatttgtttgaaccacattctggggaagactattccagagacgaagaccacatagcccacatcatagagctgctaggcagtattccaaggcactttgctctatctggaaaatattctcgggaattcttcaatcgcagaggagaactgcgacacatcaccaagctgaagccctggagcctctttgatgtacttgtggaaaagtatggctggccccatgaagatgctgcacagtttacagatttcctgatcccgatgttagaaatggttccagaaaaacgagcctcagctggcgaatgccttcggcatccttggttgaattcttagcaaattctaccaatattgcattctgagctagcaaatgttcccagtacattggacctaaacggtgactctcattctttaacaggattacaagtgagctggcttcatcctcagacctttattttgctttgaggtactgttgtttgacattttgctttttgtgcactgtgatcctggggaagggtagtcttttgtcttcagctaagtagtttactgaccattttcttctggaaacaataacatgtctctaagcattgtttcttgtgttgtgtgacattcaaatgtcatttttttgaatgaaaaatactttcccctttgtgttttggcaggttttgtaactatttatgaagaaatattttagctgagtactatataatttacaatcttaagaaattatcaagttggaaccaagaaatagcaaggaaatgtacaattttatcttctggcaaagggacatcattcctgtattatagtgtatgtaaatgcaccctgtaaatgttactttccattaaatatgggagggggactcaaatttcagaaaagctaccaagtcttgagtgctttgtagcctatgttgcatgtagcggactttaactgctccaaggagttgtgcaaacttttcattccataacagtcttttcacattggattttaaacaaagtggctctgggttataagatgtcattctctatatggcactttaaaggaagaaaagatatgtttctcattctaaaatatgcattataatttagcagtcccatttgtgattttgcatatttttaaaagtacttttaaagaagagcaatttccctttaaaaatgtgatggctcagtaccatgtcatgttgcctcctctgggcgctgtaagttaagctctacatagattaaattggagaaacgtgttaattgtgtggaatgaaaaaatacatatatttttggaaaagcatgatcatgcttgtctagaacacaaggtatggtatatacaatttgcagtgcagtgggcagaatacttctcacagctcaaagataacagtgatcacattcattccataggtagctttacgtgtggctacaacaaattttactagctttttcattgtctttccatgaaacgaagttgagaaaatgattttccctttgcaggttgcacacagttttgtttatgcatttccttaaaattaattgtagactccaggatacaaaccatagtaggcaatacaattttagaatgtaatatatagaggtatatttagcctcttttagaagtcagtggattgaatgtctttttattttaaattttacattcattaaggtgcctcgtttttgactttgtccattaacatttatccatatgcctttgcaataactagattgtgaaaagctaacaagtgttgtaacaataatccattgtttgaggtgcttgcagttgtcttaaaaattaaagtgttttggtttttttttttcca

SEQ ID NO: 432535 - DNA, 3770 bp, Homo sapiens
cttggatcagcggactctgggggaagccagccactcaagcagtcctatgaaggggtccgtgcagtgaggaaatgaggcctctgcaacagctatgcaagtgaattatcttggtaacaggtctttcagcctccgtcaagccttcagatgactgcggcctcaagtgacatcttgactcaccagctaaactgctcccaaattgctggaccacaaaaactaaatcaagcagaagattgagctgctgatgtcagttaactctgagaagtcgtcctcttcagaaaggccggagcctcaacagaaagctcctttagttcctcctcctccaccgccaccaccaccaccaccgccacctttgccagaccccacacccccggagccagaggaggagatcctgggatcagatgatgaggagcaagaggaccctgcggactactgcaaaggtggatatcatccagtgaaaattggagacctcttcaatggccggtatcatgttattagaaagcttggatgggggcacttctctactgtctggctgtgctgggatatgcaggggaaaagatttgttgcaatgaaagttgtaaaaagtgcccagcattatacggagacagccttggatgaaataaaattgctcaaatgtgttcgagaaagtgatcccagtgacccaaacaaagacatggtggtccagctcattgacgacttcaagatttcaggcatgaatgggatacatgtctgcatggtcttcgaagtacttggccaccatctcctcaagtggatcatcaaatccaactatcaaggcctcccagtacgttgtgtgaagagtatcattcgacaggtccttcaagggttagattacttacacagtaagtgcaagatcattcatactgacataaagccggaaaatatcttgatgtgtgtggatgatgcatatgtgagaagaatggcagctgaggccactgagtggcagaaagcaggtgctcctcctccttcagggtctgcagtgagtacggctccacagcagaaacctataggaaaaatatctaaaaacaaaaagaaaaaactgaaaaagaaacagaagaggcaggctgagttattggagaagcgcctgcaggagatagaagaattggagcgagaagctgaaaggaaaataatagaagaaaacatcacctcagctgcaccttccaatgaccaggatggcgaatactgcccagaggtgaaactaaaaacaacaggattagaggaggcggctgaggcagagactgcaaaggacaatggtgaagctgaggaccaggaagagaaagaagatgctgagaaagaaaacattgaaaaagatgaagatgatgtagatcaggaacttgcgaacatagaccctacgtggatagaatcacctaaaaccaatggccatattgagaatggcccattctcactggagcagcaactggacgatgaagatgatgatgaagaagactgcccaaatcctgaggaatataatcttgatgagccaaatgcagaaagtgattacacatatagcagctcctatgaacaattcaatggtgaattgccaaatggacgacataaaattcccgagtcacagttcccagagttttccacctcgttgttctctggatccttagaacctgtggcctgcggctctgtgctttctgagggatcaccacttactgagcaagaggagagcagtccatcccatgacagaagcagaacggtttcagcctccagtactggggatttgccaaaagcaaaaacccgggcagctgacttgttggtgaatcccctggatccgcggaatgcagataaaattagagtaaaaattgctgacctgggaaatgcttgttgggtgcataaacacttcacggaagacatccagacgcgtcagtaccgctccatagaggttttaataggagcggggtacagcacccctgcggacatctggagcacggcgtgtatggcatttgagctggcaacgggagattatttgtttgaaccacattctggggaagactattccagagacgaagaccacatagcccacatcatagagctgctaggcagtattccaaggcactttgctctatctggaaaatattctcgggaattcttcaatcgcagaggagaactgcgacacatcaccaagctgaagccctggagcctctttgatgtacttgtggaaaagtatggctggccccatgaagatgctgcacagtttacagatttcctgatcccgatgttagaaatggttccagaaaaacgagcctcagctggcgaatgccttcggcatccttggttgaattcttagcaaattctaccaatattgcattctgagctagcaaatgttcccagtacattggacctaaacggtgactctcattctttaacaggattacaagtgagctggcttcatcctcagacctttattttgctttgaggtactgttgtttgacattttgctttttgtgcactgtgatcctggggaagggtagtcttttgtcttcagctaagtagtttactgaccattttcttctggaaacaataacatgtctctaagcattgtttcttgtgttgtgtgacattcaaatgtcatttttttgaatgaaaaatactttcccctttgtgttttggcaggttttgtaactatttatgaagaaatattttagctgagtactatataatttacaatcttaagaaattatcaagttggaaccaagaaatagcaaggaaatgtacaattttatcttctggcaaagggacatcattcctgtattatagtgtatgtaaatgcaccctgtaaatgttactttccattaaatatgggagggggactcaaatttcagaaaagctaccaagtcttgagtgctttgtagcctatgttgcatgtagcggactttaactgctccaaggagttgtgcaaacttttcattccataacagtcttttcacattggattttaaacaaagtggctctgggttataagatgtcattctctatatggcactttaaaggaagaaaagatatgtttctcattctaaaatatgcattataatttagcagtcccatttgtgattttgcatatttttaaaagtacttttaaagaagagcaatttccctttaaaaatgtgatggctcagtaccatgtcatgttgcctcctctgggcgctgtaagttaagctctacatagattaaattggagaaacgtgttaattgtgtggaatgaaaaaatacatatatttttggaaaagcatgatcatgcttgtctagaacacaaggtatggtatatacaatttgcagtgcagtgggcagaatacttctcacagctcaaagataacagtgatcacattcattccataggtagctttacgtgtggctacaacaaattttactagctttttcattgtctttccatgaaacgaagttgagaaaatgattttccctttgcaggttgcacacagttttgtttatgcatttccttaaaattaattgtagactccaggatacaaaccatagtaggcaatacaattttagaatgtaatatatagaggtatatttagcctcttttagaagtcagtggattgaatgtctttttattttaaattttacattcattaaggtgcctcgtttttgactttgtccattaacatttatccatatgcctttgcaataactagattgtgaaaagctaacaagtgttgtaacaataatccattgtttgaggtgcttgcagttgtcttaaaaattaaagtgttttggtttttttttttcca

SEQ ID NO: 432536 - DNA, 3575 bp, Homo sapiens
accgttaatgtgtgtcttctcttccccagtgctggccattcaggcccgaaagcggaggccgaaaagagagaaacatccgaaaaagccggagcctcaacagaaagctcctttagttcctcctcctccaccgccaccaccaccaccaccgccacctttgccagaccccacacccccggagccagaggaggagatcctgggatcagatgatgaggagcaagaggaccctgcggactactgcaaaggtggatatcatccagtgaaaattggagacctcttcaatggccggtatcatgttattagaaagcttggatgggggcacttctctactgtctggctgtgctgggatatgcaggggaaaagatttgttgcaatgaaagttgtaaaaagtgcccagcattatacggagacagccttggatgaaataaaattgctcaaatgtgttcgagaaagtgatcccagtgacccaaacaaagacatggtggtccagctcattgacgacttcaagatttcaggcatgaatgggatacatgtctgcatggtcttcgaagtacttggccaccatctcctcaagtggatcatcaaatccaactatcaaggcctcccagtacgttgtgtgaagagtatcattcgacaggtccttcaagggttagattacttacacagtaagtgcaagatcattcatactgacataaagccggaaaatatcttgatgtgtgtggatgatgcatatgtgagaagaatggcagctgaggccactgagtggcagaaagcaggtgctcctcctccttcagggtctgcagtgagtacggctccacagcagaaacctataggaaaaatatctaaaaacaaaaagaaaaaactgaaaaagaaacagaagaggcaggctgagttattggagaagcgcctgcaggagatagaagaattggagcgagaagctgaaaggaaaataatagaagaaaacatcacctcagctgcaccttccaatgaccaggatggcgaatactgcccagaggtgaaactaaaaacaacaggattagaggaggcggctgaggcagagactgcaaaggacaatggtgaagctgaggaccaggaagagaaagaagatgctgagaaagaaaacattgaaaaagatgaagatgatgtagatcaggaacttgcgaacatagaccctacgtggatagaatcacctaaaaccaatggccatattgagaatggcccattctcactggagcagcaactggacgatgaagatgatgatgaagaagactgcccaaatcctgaggaatataatcttgatgagccaaatgcagaaagtgattacacatatagcagctcctatgaacaattcaatggtgaattgccaaatggacgacataaaattcccgagtcacagttcccagagttttccacctcgttgttctctggatccttagaacctgtggcctgcggctctgtgctttctgagggatcaccacttactgagcaagaggagagcagtccatcccatgacagaagcagaacggtttcagcctccagtactggggatttgccaaaagcaaaaacccgggcagctgacttgttggtgaatcccctggatccgcggaatgcagataaaattagagtaaaaattgctgacctgggaaatgcttgttgggtgcataaacacttcacggaagacatccagacgcgtcagtaccgctccatagaggttttaataggagcggggtacagcacccctgcggacatctggagcacggcgtgtatggcatttgagctggcaacgggagattatttgtttgaaccacattctggggaagactattccagagacgaagaccacatagcccacatcatagagctgctaggcagtattccaaggcactttgctctatctggaaaatattctcgggaattcttcaatcgcagaggagaactgcgacacatcaccaagctgaagccctggagcctctttgatgtacttgtggaaaagtatggctggccccatgaagatgctgcacagtttacagatttcctgatcccgatgttagaaatggttccagaaaaacgagcctcagctggcgaatgccttcggcatccttggttgaattcttagcaaattctaccaatattgcattctgagctagcaaatgttcccagtacattggacctaaacggtgactctcattctttaacaggattacaagtgagctggcttcatcctcagacctttattttgctttgaggtactgttgtttgacattttgctttttgtgcactgtgatcctggggaagggtagtcttttgtcttcagctaagtagtttactgaccattttcttctggaaacaataacatgtctctaagcattgtttcttgtgttgtgtgacattcaaatgtcatttttttgaatgaaaaatactttcccctttgtgttttggcaggttttgtaactatttatgaagaaatattttagctgagtactatataatttacaatcttaagaaattatcaagttggaaccaagaaatagcaaggaaatgtacaattttatcttctggcaaagggacatcattcctgtattatagtgtatgtaaatgcaccctgtaaatgttactttccattaaatatgggagggggactcaaatttcagaaaagctaccaagtcttgagtgctttgtagcctatgttgcatgtagcggactttaactgctccaaggagttgtgcaaacttttcattccataacagtcttttcacattggattttaaacaaagtggctctgggttataagatgtcattctctatatggcactttaaaggaagaaaagatatgtttctcattctaaaatatgcattataatttagcagtcccatttgtgattttgcatatttttaaaagtacttttaaagaagagcaatttccctttaaaaatgtgatggctcagtaccatgtcatgttgcctcctctgggcgctgtaagttaagctctacatagattaaattggagaaacgtgttaattgtgtggaatgaaaaaatacatatatttttggaaaagcatgatcatgcttgtctagaacacaaggtatggtatatacaatttgcagtgcagtgggcagaatacttctcacagctcaaagataacagtgatcacattcattccataggtagctttacgtgtggctacaacaaattttactagctttttcattgtctttccatgaaacgaagttgagaaaatgattttccctttgcaggttgcacacagttttgtttatgcatttccttaaaattaattgtagactccaggatacaaaccatagtaggcaatacaattttagaatgtaatatatagaggtatatttagcctcttttagaagtcagtggattgaatgtctttttattttaaattttacattcattaaggtgcctcgtttttgactttgtccattaacatttatccatatgcctttgcaataactagattgtgaaaagctaacaagtgttgtaacaataatccattgtttgaggtgcttgcagttgtcttaaaaattaaagtgttttggtttttttttttcca

SEQ ID NO: 432537 - DNA, 4079 bp, Homo sapiens
cttggatcagcggactctgggggaagccagccactcaagcagtcctatgaaggggtccgtgcagtgaggaaatgaggcctctgcaacagctatgcaagtgaattatcttggtaacaggtctttcagcctccgtcaagccttcagatgactgcggcctcaagtgacatcttgactcaccagctaaactgctcccaaattgctggaccacaaaaactgtggagtacatcctgctgcttcaagggtagaagactcctcactgctttccttcatgagatttcaaaggagtgaacaaccaaggcgatgggctgtaggatgttgatacatctgaggggccagatggccaccatatcagggaaagccaatgtgttttgaaaaatatgcaaatgttcaataagaaatcaagcagaagattgagctgctgatgtcagttaactctgagaagtcgtcctcttcagaaagagctggcttttaagaagctttctgtctgcctgttcagtgtggccctcactggaggaatgagaagtgcctacacacttagactgcagggtctgagaattttgagggtcatccatgtaggcagctcagcaggccggagcctcaacagaaagctcctttagttcctcctcctccaccgccaccaccaccaccaccgccacctttgccagaccccacacccccggagccagaggaggagatcctgggatcagatgatgaggagcaagaggaccctgcggactactgcaaaggtggatatcatccagtgaaaattggagacctcttcaatggccggtatcatgttattagaaagcttggatgggggcacttctctactgtctggctgtgctgggatatgcaggggaaaagatttgttgcaatgaaagttgtaaaaagtgcccagcattatacggagacagccttggatgaaataaaattgctcaaatgtgttcgagaaagtgatcccagtgacccaaacaaagacatggtggtccagctcattgacgacttcaagatttcaggcatgaatgggatacatgtctgcatggtcttcgaagtacttggccaccatctcctcaagtggatcatcaaatccaactatcaaggcctcccagtacgttgtgtgaagagtatcattcgacaggtccttcaagggttagattacttacacagtaagtgcaagatcattcatactgacataaagccggaaaatatcttgatgtgtgtggatgatgcatatgtgagaagaatggcagctgaggccactgagtggcagaaagcaggtgctcctcctccttcagggtctgcagtgagtacggctccacagcagaaacctataggaaaaatatctaaaaacaaaaagaaaaaactgaaaaagaaacagaagaggcaggctgagttattggagaagcgcctgcaggagatagaagaattggagcgagaagctgaaaggaaaataatagaagaaaacatcacctcagctgcaccttccaatgaccaggatggcgaatactgcccagaggtgaaactaaaaacaacaggattagaggaggcggctgaggcagagactgcaaaggacaatggtgaagctgaggaccaggaagagaaagaagatgctgagaaagaaaacattgaaaaagatgaagatgatgtagatcaggaacttgcgaacatagaccctacgtggatagaatcacctaaaaccaatggccatattgagaatggcccattctcactggagcagcaactggacgatgaagatgatgatgaagaagactgcccaaatcctgaggaatataatcttgatgagccaaatgcagaaagtgattacacatatagcagctcctatgaacaattcaatggtgaattgccaaatggacgacataaaattcccgagtcacagttcccagagttttccacctcgttgttctctggatccttagaacctgtggcctgcggctctgtgctttctgagggatcaccacttactgagcaagaggagagcagtccatcccatgacagaagcagaacggtttcagcctccagtactggggatttgccaaaagcaaaaacccgggcagctgacttgttggtgaatcccctggatccgcggaatgcagataaaattagagtaaaaattgctgacctgggaaatgcttgttgggtgcataaacacttcacggaagacatccagacgcgtcagtaccgctccatagaggttttaataggagcggggtacagcacccctgcggacatctggagcacggcgtgtatggcatttgagctggcaacgggagattatttgtttgaaccacattctggggaagactattccagagacgaagaccacatagcccacatcatagagctgctaggcagtattccaaggcactttgctctatctggaaaatattctcgggaattcttcaatcgcagaggagaactgcgacacatcaccaagctgaagccctggagcctctttgatgtacttgtggaaaagtatggctggccccatgaagatgctgcacagtttacagatttcctgatcccgatgttagaaatggttccagaaaaacgagcctcagctggcgaatgccttcggcatccttggttgaattcttagcaaattctaccaatattgcattctgagctagcaaatgttcccagtacattggacctaaacggtgactctcattctttaacaggattacaagtgagctggcttcatcctcagacctttattttgctttgaggtactgttgtttgacattttgctttttgtgcactgtgatcctggggaagggtagtcttttgtcttcagctaagtagtttactgaccattttcttctggaaacaataacatgtctctaagcattgtttcttgtgttgtgtgacattcaaatgtcatttttttgaatgaaaaatactttcccctttgtgttttggcaggttttgtaactatttatgaagaaatattttagctgagtactatataatttacaatcttaagaaattatcaagttggaaccaagaaatagcaaggaaatgtacaattttatcttctggcaaagggacatcattcctgtattatagtgtatgtaaatgcaccctgtaaatgttactttccattaaatatgggagggggactcaaatttcagaaaagctaccaagtcttgagtgctttgtagcctatgttgcatgtagcggactttaactgctccaaggagttgtgcaaacttttcattccataacagtcttttcacattggattttaaacaaagtggctctgggttataagatgtcattctctatatggcactttaaaggaagaaaagatatgtttctcattctaaaatatgcattataatttagcagtcccatttgtgattttgcatatttttaaaagtacttttaaagaagagcaatttccctttaaaaatgtgatggctcagtaccatgtcatgttgcctcctctgggcgctgtaagttaagctctacatagattaaattggagaaacgtgttaattgtgtggaatgaaaaaatacatatatttttggaaaagcatgatcatgcttgtctagaacacaaggtatggtatatacaatttgcagtgcagtgggcagaatacttctcacagctcaaagataacagtgatcacattcattccataggtagctttacgtgtggctacaacaaattttactagctttttcattgtctttccatgaaacgaagttgagaaaatgattttccctttgcaggttgcacacagttttgtttatgcatttccttaaaattaattgtagactccaggatacaaaccatagtaggcaatacaattttagaatgtaatatatagaggtatatttagcctcttttagaagtcagtggattgaatgtctttttattttaaattttacattcattaaggtgcctcgtttttgactttgtccattaacatttatccatatgcctttgcaataactagattgtgaaaagctaacaagtgttgtaacaataatccattgtttgaggtgcttgcagttgtcttaaaaattaaagtgttttggtttttttttttcca

SEQ ID NO: 432538 - DNA, 4000 bp, Homo sapiens
ggcggcggcgcaggcgcggttctcgtctcctcccggccggcggagcgagtggaggctgcagcccagctcgtctcggcgcccgcgtcgccgtcgcgaagccccccgccccgcttccgccgcgtcggaatgagctcccggaaagtgctggccattcaggcccgaaagcggaggccgaaaagagagaaacatccgaaaaagtggagtacatcctgctgcttcaagggtagaagactcctcactgctttccttcatgagatttcaaaggaagtgttggttttttttttgcctggttcaagtattgaccaagaagatgacagtgatgtggtctcttagagtgaacaaccaaggcgatgggctgtaggatgttgatacatctgaggggccagatggccaccatatcagggaaagccaatgtgttttgaaaaatatgcaaatgttcaataagaaatcaagcagaagattgagctgctgatgtcagttaactctgagaagtcgtcctcttcagaaaggccggagcctcaacagaaagctcctttagttcctcctcctccaccgccaccaccaccaccaccgccacctttgccagaccccacacccccggagccagaggaggagatcctgggatcagatgatgaggagcaagaggaccctgcggactactgcaaaggtggatatcatccagtgaaaattggagacctcttcaatggccggtatcatgttattagaaagcttggatgggggcacttctctactgtctggctgtgctgggatatgcaggggaaaagatttgttgcaatgaaagttgtaaaaagtgcccagcattatacggagacagccttggatgaaataaaattgctcaaatgtgttcgagaaagtgatcccagtgacccaaacaaagacatggtggtccagctcattgacgacttcaagatttcaggcatgaatgggatacatgtctgcatggtcttcgaagtacttggccaccatctcctcaagtggatcatcaaatccaactatcaaggcctcccagtacgttgtgtgaagagtatcattcgacaggtccttcaagggttagattacttacacagtaagtgcaagatcattcatactgacataaagccggaaaatatcttgatgtgtgtggatgatgcatatgtgagaagaatggcagctgaggccactgagtggcagaaagcaggtgctcctcctccttcagggtctgcagtgagtacggctccacagcagaaacctataggaaaaatatctaaaaacaaaaagaaaaaactgaaaaagaaacagaagaggcaggctgagttattggagaagcgcctgcaggagatagaagaattggagcgagaagctgaaaggaaaataatagaagaaaacatcacctcagctgcaccttccaatgaccaggatggcgaatactgcccagaggtgaaactaaaaacaacaggattagaggaggcggctgaggcagagactgcaaaggacaatggtgaagctgaggaccaggaagagaaagaagatgctgagaaagaaaacattgaaaaagatgaagatgatgtagatcaggaacttgcgaacatagaccctacgtggatagaatcacctaaaaccaatggccatattgagaatggcccattctcactggagcagcaactggacgatgaagatgatgatgaagaagactgcccaaatcctgaggaatataatcttgatgagccaaatgcagaaagtgattacacatatagcagctcctatgaacaattcaatggtgaattgccaaatggacgacataaaattcccgagtcacagttcccagagttttccacctcgttgttctctggatccttagaacctgtggcctgcggctctgtgctttctgagggatcaccacttactgagcaagaggagagcagtccatcccatgacagaagcagaacggtttcagcctccagtactggggatttgccaaaagcaaaaacccgggcagctgacttgttggtgaatcccctggatccgcggaatgcagataaaattagagtaaaaattgctgacctgggaaatgcttgttgggtgcataaacacttcacggaagacatccagacgcgtcagtaccgctccatagaggttttaataggagcggggtacagcacccctgcggacatctggagcacggcgtgtatggcatttgagctggcaacgggagattatttgtttgaaccacattctggggaagactattccagagacgaagaccacatagcccacatcatagagctgctaggcagtattccaaggcactttgctctatctggaaaatattctcgggaattcttcaatcgcagaggagaactgcgacacatcaccaagctgaagccctggagcctctttgatgtacttgtggaaaagtatggctggccccatgaagatgctgcacagtttacagatttcctgatcccgatgttagaaatggttccagaaaaacgagcctcagctggcgaatgccttcggcatccttggttgaattcttagcaaattctaccaatattgcattctgagctagcaaatgttcccagtacattggacctaaacggtgactctcattctttaacaggattacaagtgagctggcttcatcctcagacctttattttgctttgaggtactgttgtttgacattttgctttttgtgcactgtgatcctggggaagggtagtcttttgtcttcagctaagtagtttactgaccattttcttctggaaacaataacatgtctctaagcattgtttcttgtgttgtgtgacattcaaatgtcatttttttgaatgaaaaatactttcccctttgtgttttggcaggttttgtaactatttatgaagaaatattttagctgagtactatataatttacaatcttaagaaattatcaagttggaaccaagaaatagcaaggaaatgtacaattttatcttctggcaaagggacatcattcctgtattatagtgtatgtaaatgcaccctgtaaatgttactttccattaaatatgggagggggactcaaatttcagaaaagctaccaagtcttgagtgctttgtagcctatgttgcatgtagcggactttaactgctccaaggagttgtgcaaacttttcattccataacagtcttttcacattggattttaaacaaagtggctctgggttataagatgtcattctctatatggcactttaaaggaagaaaagatatgtttctcattctaaaatatgcattataatttagcagtcccatttgtgattttgcatatttttaaaagtacttttaaagaagagcaatttccctttaaaaatgtgatggctcagtaccatgtcatgttgcctcctctgggcgctgtaagttaagctctacatagattaaattggagaaacgtgttaattgtgtggaatgaaaaaatacatatatttttggaaaagcatgatcatgcttgtctagaacacaaggtatggtatatacaatttgcagtgcagtgggcagaatacttctcacagctcaaagataacagtgatcacattcattccataggtagctttacgtgtggctacaacaaattttactagctttttcattgtctttccatgaaacgaagttgagaaaatgattttccctttgcaggttgcacacagttttgtttatgcatttccttaaaattaattgtagactccaggatacaaaccatagtaggcaatacaattttagaatgtaatatatagaggtatatttagcctcttttagaagtcagtggattgaatgtctttttattttaaattttacattcattaaggtgcctcgtttttgactttgtccattaacatttatccatatgcctttgcaataactagattgtgaaaagctaacaagtgttgtaacaataatccattgtttgaggtgcttgcagttgtcttaaaaattaaagtgttttggtttttttttttcca

SEQ ID NO: 432539 - DNA, 3959 bp, Homo sapiens
ggttgcagtgagctgagatggtgccactgcactccagcctgggtgacagagtaagactccgtctcaaaaaaaaaaaaaaaaaaaaaatttacagcttaattaaagatgaaaataaaacaaaagtaattaatgtaacaaagattttgttaattgttaaagctttatagagctttgtaggtttggggaagagaacttgccagattgtgataatctcggaagaccttttaggtaattgtagcgtggaccttctgtatgtctaaaatggtaaacggtgtgccttatcttttataggagtgaacaaccaaggcgatgggctgtaggatgttgatacatctgaggggccagatggccaccatatcagggaaagccaatgtgttttgaaaaatatgcaaatgttcaataagaaatcaagcagaagattgagctgctgatgtcagttaactctgagaagtcgtcctcttcagaaaggccggagcctcaacagaaagctcctttagttcctcctcctccaccgccaccaccaccaccaccgccacctttgccagaccccacacccccggagccagaggaggagatcctgggatcagatgatgaggagcaagaggaccctgcggactactgcaaaggtggatatcatccagtgaaaattggagacctcttcaatggccggtatcatgttattagaaagcttggatgggggcacttctctactgtctggctgtgctgggatatgcaggggaaaagatttgttgcaatgaaagttgtaaaaagtgcccagcattatacggagacagccttggatgaaataaaattgctcaaatgtgttcgagaaagtgatcccagtgacccaaacaaagacatggtggtccagctcattgacgacttcaagatttcaggcatgaatgggatacatgtctgcatggtcttcgaagtacttggccaccatctcctcaagtggatcatcaaatccaactatcaaggcctcccagtacgttgtgtgaagagtatcattcgacaggtccttcaagggttagattacttacacagtaagtgcaagatcattcatactgacataaagccggaaaatatcttgatgtgtgtggatgatgcatatgtgagaagaatggcagctgaggccactgagtggcagaaagcaggtgctcctcctccttcagggtctgcagtgagtacggctccacagcagaaacctataggaaaaatatctaaaaacaaaaagaaaaaactgaaaaagaaacagaagaggcaggctgagttattggagaagcgcctgcaggagatagaagaattggagcgagaagctgaaaggaaaataatagaagaaaacatcacctcagctgcaccttccaatgaccaggatggcgaatactgcccagaggtgaaactaaaaacaacaggattagaggaggcggctgaggcagagactgcaaaggacaatggtgaagctgaggaccaggaagagaaagaagatgctgagaaagaaaacattgaaaaagatgaagatgatgtagatcaggaacttgcgaacatagaccctacgtggatagaatcacctaaaaccaatggccatattgagaatggcccattctcactggagcagcaactggacgatgaagatgatgatgaagaagactgcccaaatcctgaggaatataatcttgatgagccaaatgcagaaagtgattacacatatagcagctcctatgaacaattcaatggtgaattgccaaatggacgacataaaattcccgagtcacagttcccagagttttccacctcgttgttctctggatccttagaacctgtggcctgcggctctgtgctttctgagggatcaccacttactgagcaagaggagagcagtccatcccatgacagaagcagaacggtttcagcctccagtactggggatttgccaaaagcaaaaacccgggcagctgacttgttggtgaatcccctggatccgcggaatgcagataaaattagagtaaaaattgctgacctgggaaatgcttgttgggtgcataaacacttcacggaagacatccagacgcgtcagtaccgctccatagaggttttaataggagcggggtacagcacccctgcggacatctggagcacggcgtgtatggcatttgagctggcaacgggagattatttgtttgaaccacattctggggaagactattccagagacgaagaccacatagcccacatcatagagctgctaggcagtattccaaggcactttgctctatctggaaaatattctcgggaattcttcaatcgcagaggagaactgcgacacatcaccaagctgaagccctggagcctctttgatgtacttgtggaaaagtatggctggccccatgaagatgctgcacagtttacagatttcctgatcccgatgttagaaatggttccagaaaaacgagcctcagctggcgaatgccttcggcatccttggttgaattcttagcaaattctaccaatattgcattctgagctagcaaatgttcccagtacattggacctaaacggtgactctcattctttaacaggattacaagtgagctggcttcatcctcagacctttattttgctttgaggtactgttgtttgacattttgctttttgtgcactgtgatcctggggaagggtagtcttttgtcttcagctaagtagtttactgaccattttcttctggaaacaataacatgtctctaagcattgtttcttgtgttgtgtgacattcaaatgtcatttttttgaatgaaaaatactttcccctttgtgttttggcaggttttgtaactatttatgaagaaatattttagctgagtactatataatttacaatcttaagaaattatcaagttggaaccaagaaatagcaaggaaatgtacaattttatcttctggcaaagggacatcattcctgtattatagtgtatgtaaatgcaccctgtaaatgttactttccattaaatatgggagggggactcaaatttcagaaaagctaccaagtcttgagtgctttgtagcctatgttgcatgtagcggactttaactgctccaaggagttgtgcaaacttttcattccataacagtcttttcacattggattttaaacaaagtggctctgggttataagatgtcattctctatatggcactttaaaggaagaaaagatatgtttctcattctaaaatatgcattataatttagcagtcccatttgtgattttgcatatttttaaaagtacttttaaagaagagcaatttccctttaaaaatgtgatggctcagtaccatgtcatgttgcctcctctgggcgctgtaagttaagctctacatagattaaattggagaaacgtgttaattgtgtggaatgaaaaaatacatatatttttggaaaagcatgatcatgcttgtctagaacacaaggtatggtatatacaatttgcagtgcagtgggcagaatacttctcacagctcaaagataacagtgatcacattcattccataggtagctttacgtgtggctacaacaaattttactagctttttcattgtctttccatgaaacgaagttgagaaaatgattttccctttgcaggttgcacacagttttgtttatgcatttccttaaaattaattgtagactccaggatacaaaccatagtaggcaatacaattttagaatgtaatatatagaggtatatttagcctcttttagaagtcagtggattgaatgtctttttattttaaattttacattcattaaggtgcctcgtttttgactttgtccattaacatttatccatatgcctttgcaataactagattgtgaaaagctaacaagtgttgtaacaataatccattgtttgaggtgcttgcagttgtcttaaaaattaaagtgttttggtttttttttttcca

SEQ ID NO: 432540 - DNA, 4600 bp, Homo sapiens
atagcctcccaaagtgctgggattacaggtgtgagccacggcaccaggcctcatcccattacattctaaagattgtgtcaaaatgagttatgcttcttgtgaggtgatgggaccgttatatctctccagtgtctgtggtacaacagactaaaagatgaatatatttaatttcttaatgtttcttttgctaattttccttagctagcaatatatgtgttagctttagtgtctttttaggttcagattatttttggtagaccttaaaaaatgagaagataaaggatatccgaaagaagccttaaggtagatcctttacttggaagtatcaggctcttccacctgactccactcataataaaaaatgaaaacaaaagtggttgacgtagcaaagattttaacttttaaagcttgatagagctttgcaggtttaggaagataacttcccagtcttcagattgggatggtgagactgtgtggccccacctccatgcaggccatgcagaacacaggactgtagagaaacagaggctcattctcagttccaacaggaggaagagtgcccactgggcagccagtcctgttagggcaaggagcagcccttctggagacatggcagatcttaacgtttcagtgcatatggatgggggagggtgttctggggctggtggaacgtagagggcattcatggtggtgaaagtgggatgtaggagagggtttgggtgatgatggataactgggttcactgtgtgctaactgagctgaacagagtatgaggcgttggcctacattgtctccctggaaagactgctgtcacaggttctcttgctggcattgtgatgcagggctgcgtgaagccctccttacagcgggaggtgggctctgttggagtgggccctgtgcctctgctgtctcctactgctaacagtgaacaaccaaggcgatgggctgtaggatgttgatacatctgaggggccagatggccaccatatcagggaaagccaatgtgttttgaaaaatatgcaaatgttcaataagaaatcaagcagaagattgagctgctgatgtcagttaactctgagaagtcgtcctcttcagaaaggccggagcctcaacagaaagctcctttagttcctcctcctccaccgccaccaccaccaccaccgccacctttgccagaccccacacccccggagccagaggaggagatcctgggatcagatgatgaggagcaagaggaccctgcggactactgcaaaggtggatatcatccagtgaaaattggagacctcttcaatggccggtatcatgttattagaaagcttggatgggggcacttctctactgtctggctgtgctgggatatgcagggcaccccgatccgctcgccactgaccacgtcgtacacacagtgcccagcattatacggagaccagccttggcatgaactcacccttgctcacatgtgttcgagaaagtgatcccagtgacccaaacaaagacatggtggtccagctcattgacgacttcaagatttcaggcatgaatgggatacatgtctgcatggtcttcgaagtacttggccaccatctcctcaagtggatcatcaaatccaactatcaaggcctcccagtacgttgtgtgaagagtatcattcgacaggtccttcaagggttagattacttacacagtaagtgcaagatcattcatactgacataaagccggaaaatatcttgatgtgtgtggatgatgcatatgtgagaagaatggcagctgaggccactgagtggcagaaagcaggtgctcctcctccttcagggtctgcagtgagtacggctccacagcagaaacctataggaaaaatatctaaaaacaaaaagaaaaaactgaaaaagaaacagaagaggcaggctgagttattggagaagcgcctgcaggagatagaagaattggagcgagaagctgaaaggaaaataatagaagaaaacatcacctcagctgcaccttccaatgaccaggatggcgaatactgcccagaggtgaaactaaaaacaacaggattagaggaggcggctgaggcagagactgcaaaggacaatggtgaagctgaggaccaggaagagaaagaagatgctgagaaagaaaacattgaaaaagatgaagatgatgtagatcaggaacttgcgaacatagaccctacgtggatagaatcacctaaaaccaatggccatattgagaatggcccattctcactggagcagcaactggacgatgaagatgatgatgaagaagactgcccaaatcctgaggaatataatcttgatgagccaaatgcagaaagtgattacacatatagcagctcctatgaacaattcaatggtgaattgccaaatggacgacataaaattcccgagtcacagttcccagagttttccacctcgttgttctctggatccttagaacctgtggcctgcggctctgtgctttctgagggatcaccacttactgagcaagaggagagcagtccatcccatgacagaagcagaacggtttcagcctccagtactggggatttgccaaaagcaaaaacccgggcagctgacttgttggtgaatcccctggatccgcggaatgcagataaaattagagtaaaaattgctgacctgggaaatgcttgttgggtgcataaacacttcacggaagacatccagacgcgtcagtaccgctccatagaggttttaataggagcggggtacagcacccctgcggacatctggagcacggcgtgtatggcatttgagctggcaacgggagattatttgtttgaaccacattctggggaagactattccagagacgaagaccacatagcccacatcatagagctgctaggcagtattccaaggcactttgctctatctggaaaatattctcgggaattcttcaatcgcagaggagaactgcgacacatcaccaagctgaagccctggagcctctttgatgtacttgtggaaaagtatggctggccccatgaagatgctgcacagtttacagatttcctgatcccgatgttagaaatggttccagaaaaacgagcctcagctggcgaatgccttcggcatccttggttgaattcttagcaaattctaccaatattgcattctgagctagcaaatgttcccagtacattggacctaaacggtgactctcattctttaacaggattacaagtgagctggcttcatcctcagacctttattttgctttgaggtactgttgtttgacattttgctttttgtgcactgtgatcctggggaagggtagtcttttgtcttcagctaagtagtttactgaccattttcttctggaaacaataacatgtctctaagcattgtttcttgtgttgtgtgacattcaaatgtcatttttttgaatgaaaaatactttcccctttgtgttttggcaggttttgtaactatttatgaagaaatattttagctgagtactatataatttacaatcttaagaaattatcaagttggaaccaagaaatagcaaggaaatgtacaattttatcttctggcaaagggacatcattcctgtattatagtgtatgtaaatgcaccctgtaaatgttactttccattaaatatgggagggggactcaaatttcagaaaagctaccaagtcttgagtgctttgtagcctatgttgcatgtagcggactttaactgctccaaggagttgtgcaaacttttcattccataacagtcttttcacattggattttaaacaaagtggctctgggttataagatgtcattctctatatggcactttaaaggaagaaaagatatgtttctcattctaaaatatgcattataatttagcagtcccatttgtgattttgcatatttttaaaagtacttttaaagaagagcaatttccctttaaaaatgtgatggctcagtaccatgtcatgttgcctcctctgggcgctgtaagttaagctctacatagattaaattggagaaacgtgttaattgtgtggaatgaaaaaatacatatatttttggaaaagcatgatcatgcttgtctagaacacaaggtatggtatatacaatttgcagtgcagtgggcagaatacttctcacagctcaaagataacagtgatcacattcattccataggtagctttacgtgtggctacaacaaattttactagctttttcattgtctttccatgaaacgaagttgagaaaatgattttccctttgcaggttgcacacagttttgtttatgcatttccttaaaattaattgtagactccaggatacaaaccatagtaggcaatacaattttagaatgtaatatatagaggtatatttagcctcttttagaagtcagtggattgaatgtctttttattttaaattttacattcattaaggtgcctcgtttttgactttgtccattaacatttatccatatgcctttgcaataactagattgtgaaaagctaacaagtgttgtaacaataatccattgtttgaggtgcttgcagttgtcttaaaaattaaagtgttttggtttttttttttcca

SEQ ID NO: 432541 - DNA, 3430 bp, Homo sapiens
taattcaaattaatttttttcattttttgagaggtataacttgttttgttttgttgttgttgttgttgttttctttgagacagagtctctgttgcccaggttggaggctgtcattgccagtgctttgcaagtcaggtaaccatgacgggaggcagacaaaagctgtagctttttcttttttccctttgcagcataggcttatctcttacagttcatgttgtcttggctgctaagagcttcatatgtgagacccaaacacacagtgacatacacctgctcgggcacctgtttcatttttggcattgaggagctgggatgttgttactttgtatatagacagcagcaaataaaacttgcaagaggagcttctcctttaaggccaagagaatttcgaacttcagttctcttagagtttgaatggtgaagacttactggatttaagctatatccctctgagggcaggacctggtagtagacctagtacgtgatatcagtcagcactgctttccctttgattttatcgtaagccttaccacaaagtggatctgtctgggtttgggattttaatagaatatggcatgagaaagcagagtttattgctatttgccatgctgctagtcgttatactatcgtggtgctttaaaaagaagaatactgacctgtggtctttccttaacatagataggaaaaatatctaaaaacaaaaagaaaaaactgaaaaagaaacagaagaggcaggctgagttattggagaagcgcctgcaggagatagaagaattggagcgagaagctgaaaggaaaataatagaagaaaacatcacctcagctgcaccttccaatgaccaggatggcgaatactgcccagaggtgaaactaaaaacaacaggattagaggaggcggctgaggcagagactgcaaaggacaatggtgaagctgaggaccaggaagagaaagaagatgctgagaaagaaaacattgaaaaagatgaagatgatgtagatcaggaacttgcgaacatagaccctacgtggatagaatcacctaaaaccaatggccatattgagaatggcccattctcactggagcagcaactggacgatgaagatgatgatgaagaagactgcccaaatcctgaggaatataatcttgatgagccaaatgcagaaagtgattacacatatagcagctcctatgaacaattcaatggtgaattgccaaatggacgacataaaattcccgagtcacagttcccagagttttccacctcgttgttctctggatccttagaacctgtggcctgcggctctgtgctttctgagggatcaccacttactgagcaagaggagagcagtccatcccatgacagaagcagaacggtttcagcctccagtactggggatttgccaaaagcaaaaacccgggcagctgacttgttggtgaatcccctggatccgcggaatgcagataaaattagagtaaaaattgctgacctgggaaatgcttgttgggtgcataaacacttcacggaagacatccagacgcgtcagtaccgctccatagaggttttaataggagcggggtacagcacccctgcggacatctggagcacggcgtgtatggcatttgagctggcaacgggagattatttgtttgaaccacattctggggaagactattccagagacgaagaccacatagcccacatcatagagctgctaggcagtattccaaggcactttgctctatctggaaaatattctcgggaattcttcaatcgcagaggagaactgcgacacatcaccaagctgaagccctggagcctctttgatgtacttgtggaaaagtatggctggccccatgaagatgctgcacagtttacagatttcctgatcccgatgttagaaatggttccagaaaaacgagcctcagctggcgaatgccttcggcatccttggttgaattcttagcaaattctaccaatattgcattctgagctagcaaatgttcccagtacattggacctaaacggtgactctcattctttaacaggattacaagtgagctggcttcatcctcagacctttattttgctttgaggtactgttgtttgacattttgctttttgtgcactgtgatcctggggaagggtagtcttttgtcttcagctaagtagtttactgaccattttcttctggaaacaataacatgtctctaagcattgtttcttgtgttgtgtgacattcaaatgtcatttttttgaatgaaaaatactttcccctttgtgttttggcaggttttgtaactatttatgaagaaatattttagctgagtactatataatttacaatcttaagaaattatcaagttggaaccaagaaatagcaaggaaatgtacaattttatcttctggcaaagggacatcattcctgtattatagtgtatgtaaatgcaccctgtaaatgttactttccattaaatatgggagggggactcaaatttcagaaaagctaccaagtcttgagtgctttgtagcctatgttgcatgtagcggactttaactgctccaaggagttgtgcaaacttttcattccataacagtcttttcacattggattttaaacaaagtggctctgggttataagatgtcattctctatatggcactttaaaggaagaaaagatatgtttctcattctaaaatatgcattataatttagcagtcccatttgtgattttgcatatttttaaaagtacttttaaagaagagcaatttccctttaaaaatgtgatggctcagtaccatgtcatgttgcctcctctgggcgctgtaagttaagctctacatagattaaattggagaaacgtgttaattgtgtggaatgaaaaaatacatatatttttggaaaagcatgatcatgcttgtctagaacacaaggtatggtatatacaatttgcagtgcagtgggcagaatacttctcacagctcaaagataacagtgatcacattcattccataggtagctttacgtgtggctacaacaaattttactagctttttcattgtctttccatgaaacgaagttgagaaaatgattttccctttgcaggttgcacacagttttgtttatgcatttccttaaaattaattgtagactccaggatacaaaccatagtaggcaatacaattttagaatgtaatatatagaggtatatttagcctcttttagaagtcagtggattgaatgtctttttattttaaattttacattcattaaggtgcctcgtttttgactttgtccattaacatttatccatatgcctttgcaataactagattgtgaaaagctaacaagtgttgtaacaataatccattgtttgaggtgcttgcagttgtcttaaaaattaaagtgttttggtttttttttttcca

SEQ ID NO: 432542 - DNA, 1698 bp, Homo sapiens
  misc_feature (40)..(40): n is a, c, g, or t
taagccagacgttccttctccgaggcccttagacacggtncttgtgctctggagaactgcgacacatcaccaagctgaagccctggagcctctttgatgtacttgtggaaaagtatggctggccccatgaagatgctgcacagtttacagatttcctgatcccgatgttagaaatggttccagaaaaacgagcctcagctggcgaatgccttcggcatccttggttgaattcttagcaaattctaccaatattgcattctgagctagcaaatgttcccagtacattggacctaaacggtgactctcattctttaacaggattacaagtgagctggcttcatcctcagacctttattttgctttgaggtactgttgtttgacattttgctttttgtgcactgtgatcctggggaagggtagtcttttgtcttcagctaagtagtttactgaccattttcttctggaaacaataacatgtctctaagcattgtttcttgtgttgtgtgacattcaaatgtcatttttttgaatgaaaaatactttcccctttgtgttttggcaggttttgtaactatttatgaagaaatattttagctgagtactatataatttacaatcttaagaaattatcaagttggaaccaagaaatagcaaggaaatgtacaattttatcttctggcaaagggacatcattcctgtattatagtgtatgtaaatgcaccctgtaaatgttactttccattaaatatgggagggggactcaaatttcagaaaagctaccaagtcttgagtgctttgtagcctatgttgcatgtagcggactttaactgctccaaggagttgtgcaaacttttcattccataacagtcttttcacattggattttaaacaaagtggctctgggttataagatgtcattctctatatggcactttaaaggaagaaaagatatgtttctcattctaaaatatgcattataatttagcagtcccatttgtgattttgcatatttttaaaagtacttttaaagaagagcaatttccctttaaaaatgtgatggctcagtaccatgtcatgttgcctcctctgggcgctgtaagttaagctctacatagattaaattggagaaacgtgttaattgtgtggaatgaaaaaatacatatatttttggaaaagcatgatcatgcttgtctagaacacaaggtatggtatatacaatttgcagtgcagtgggcagaatacttctcacagctcaaagataacagtgatcacattcattccataggtagctttacgtgtggctacaacaaattttactagctttttcattgtctttccatgaaacgaagttgagaaaatgattttccctttgcaggttgcacacagttttgtttatgcatttccttaaaattaattgtagactccaggatacaaaccatagtaggcaatacaattttagaatgtaatatatagaggtatatttagcctcttttagaagtcagtggattgaatgtctttttattttaaattttacattcattaaggtgcctcgtttttgactttgtccattaacatttatccatatgcctttgcaataactagattgtgaaaagctaacaagtgttgtaacaataatccattgtttgaggtgcttgcagttgtcttaaaaattaaagtgttttggtttttttttttcca

SEQ ID NO: 432543 - DNA, 2637 bp, Homo sapiens
atagcctcccaaagtgctgggattacaggtgtgagccacggcaccaggcctcatcccattacattctaaagattgtgtcaaaatgagttatgcttcttgtgaggtgatgggaccgttatatctctccagtgtctgtggtacaacagactaaaagatgaatatatttaatttcttaatgtttcttttgctaattttccttagctagcaatatatgtgttagctttagtgtctttttaggttcagattatttttggtagaccttaaaaaatgagaagataaaggatatccgaaagaagccttaaggtagatcctttacttggaagtatcaggctcttccacctgactccactcataataaaaaatgaaaacaaaagtggttgacgtagcaaagattttaacttttaaagcttgatagagctttgcaggtttaggaagataacttcccagtcttcagattgggatggtgagactgtgtggccccacctccatgcaggccatgcagaacacaggactgtagagaaacagaggctcattctcagttccaacaggaggaagagtgcccactgggcagccagtcctgttagggcaaggagcagcccttctggagacatggcagatcttaacgtttcagtgcatatggatgggggagggtgttctggggctggtggaacgtagagggcattcatggtggtgaaagtgggatgtaggagagggtttgggtgatgatggataactgggttcactgtgtgctaactgagctgaacagagtatgaggcgttggcctacattgtctccctggaaagactgctgtcacaggttctcttgctggcattgtgatgcagggctgcgtgaagccctccttacagcgggaggtgggctctgttggagtgggccctgtgcctctgctgtctcctactgctaacagtgaacaaccaaggcgatgggctgtaggatgttgatacatctgaggggccagatggccaccatatcagggaaagccaatgtgttttgaaaaatatgcaaatgttcaataagaaatcaagcagaagattgagctgctgatgtcagttaactctgagaagtcgtcctcttcagaaaggccggagcctcaacagaaagctcctttagttcctcctcctccaccgccaccaccaccaccaccgccacctttgccagaccccacacccccggagccagaggaggagatcctgggatcagatgatgaggagcaagaggaccctgcggactactgcaaaggattacaagtgagctggcttcatcctcagacctttattttgctttgaggtactgttgtttgacattttgctttttgtgcactgtgatcctggggaagggtagtcttttgtcttcagctaagtagtttactgaccattttcttctggaaacaataacatgtctctaagcattgtttcttgtgttgtgtgacattcaaatgtcatttttttgaatgaaaaatactttcccctttgtgttttggcaggttttgtaactatttatgaagaaatattttagctgagtactatataatttacaatcttaagaaattatcaagttggaaccaagaaatagcaaggaaatgtacaattttatcttctggcaaagggacatcattcctgtattatagtgtatgtaaatgcaccctgtaaatgttactttccattaaatatgggagggggactcaaatttcagaaaagctaccaagtcttgagtgctttgtagcctatgttgcatgtagcggactttaactgctccaaggagttgtgcaaacttttcattccataacagtcttttcacattggattttaaacaaagtggctctgggttataagatgtcattctctatatggcactttaaaggaagaaaagatatgtttctcattctaaaatatgcattataatttagcagtcccatttgtgattttgcatatttttaaaagtacttttaaagaagagcaatttccctttaaaaatgtgatggctcagtaccatgtcatgttgcctcctctgggcgctgtaagttaagctctacatagattaaattggagaaacgtgttaattgtgtggaatgaaaaaatacatatatttttggaaaagcatgatcatgcttgtctagaacacaaggtatggtatatacaatttgcagtgcagtgggcagaatacttctcacagctcaaagataacagtgatcacattcattccataggtagctttacgtgtggctacaacaaattttactagctttttcattgtctttccatgaaacgaagttgagaaaatgattttccctttgcaggttgcacacagttttgtttatgcatttccttaaaattaattgtagactccaggatacaaaccatagtaggcaatacaattttagaatgtaatatatagaggtatatttagcctcttttagaagtcagtggattgaatgtctttttattttaaattttacattcattaaggtgcctcgtttttgactttgtccattaacatttatccatatgcctttgcaataactagattgtgaaaagctaacaagtgttgtaacaataatccattgtttgaggtgcttgcagttgtcttaaaaattaaagtgttttggtttttttttttcca

SEQ ID NO: 432544 - DNA, 1116 bp, Homo sapiens
ggcggcggcgcaggcgcggttctcgtctcctcccggccggcggagcgagtggaggctgcagcccagctcgtctcggcgcccgcgtcgccgtcgcgaagccccccgccccgcttccgccgcgtcggaatgagctcccggaaagtgctggccattcaggcccgaaagcggaggccgaaaagagagaaacatccgaaaaagccggagcctcaacagaaagctcctttagttcctcctcctccaccgccaccaccaccaccaccgccacctttgccagaccccacacccccggagccagaggaggagatcctgggatcagatgatgaggagcaagaggaccctgcggactactgcaaaggtggatatcatccagtgaaaattggagacctcttcaatggccggtatcatgttattagaaagcttggatgggggcacttctctactgtctggctgtgctgggatatgcaggggaaaagatttgttgcaatgaaagttgtaaaaagtgcccagcattatacggagacagccttggatgaaataaaattgctcaaatgtgttcgagaaagtgatcccagtgacccaaacaaagacatggtggtccagctcattgacgacttcaagatttcaggcatgaatgggatacatgtctgcatggtcttcgaagtacttggccaccatctcctcaagtggatcatcaaatccaactatcaaggcctcccagtacgttgtgtgaagagtatcattcgacaggtgagacttttgacggcagcccctaggccctagtacctaattggttaggctttcaacatgaatgctgtttacaaatatgtatatgtattacatatgtatcagtgcataatgtatatatgttatgtatgttacatatgtatcagtgcataacattttgaactcttattaagtcagtatttaatgatattttgtgttgtgaagggaacaacatgtaattgtcaggcatacgttttttgcctgtcgttttttttttttaaggtatgtgacatggtacaattacattgtttttgttcagtatctactataaaacatccacttagttcattaggaagtaatttagaagaaataacttactgggtttatttacta

SEQ ID NO: 432545 - DNA, 794 bp, Homo sapiens
ggcggcggcgcaggcgcggttctcgtctcctcccggccggcggagcgagtggaggctgcagcccagctcgtctcggcgcccgcgtcgccgtcgcgaagccccccgccccgcttccgccgcgtcggaatgagctcccggaaagtgctggccattcaggcccgaaagcggaggccgaaaagagagaaacatccgaaaaaaaatcaagcagaagattgagctgctgatgtcagttaactctgagaagtcgtcctcttcagaaaggccggagcctcaacagaaagctcctttagttcctcctcctccaccgccaccaccaccaccaccgccacctttgccagaccccacacccccggagccagaggaggagatcctgggatcagatgatgaggagcaagaggaccctgcggactactgcaaaggtggatatcatccagtgaaaattggagacctcttcaatggccggtatcatgttattagaaagcttggatgggggcacttctctactgtctggctgtgctgggatatgcagggaaaagctcgataaaactaagcagatacaatggctattatgaatttacagtttgagatttcagattggtgataaagaggcaagagctgtagctggttttttatattttgaactgtgctgagtagttcttaggaattagattagtcctgaaatgttatgtcagctgagaatttcggtttctaggtgacagtactgcagtaggaacaggactggctctccctttagaacaaaaggctttcagtgggaattcgtagtggcttctttg

SEQ ID NO: 432546 - DNA, 441 bp, Homo sapiens
agatccaccaggcttacttgaaatatgccttggtcatatgtacatgtaatgattattgcttagtggggaaaagctggtgttctttgttgttgctgtacaagtgttgagcaggtggttgtccgcttcactgaaaagaacctgactggaccaacaatggggaatgcagatttggagctttcttgacattggcctgttttttcccctgtaggagaactgcgacacatcaccaagctgaagccctggagcctctttgatgtacttgtggaaaagtatggctggccccatgaagatgctgcacagtttacagatttcctgatcccgatgttagaaatggttccagaaaaacgagcctcagctggcgaatgccttcggcatccttggttgaattcttagcaaattctaccaatattgcattctgagctagcaaatgttcccagtaca

SEQ ID NO: 432547 - DNA, 3522 bp, Homo sapiens
ggcggcggcgcaggcgcggttctcgtctcctcccggccggcggagcgagtggaggctgcagcccagctcgtctcggcgcccgcgtcgccgtcgcgaagccccccgccccgcttccgccgcgtcggaatgagctcccggaaagtgctggccattcaggcccgaaagcggaggccgaaaagagagaaacatccgaaaaagccggagcctcaacagaaagctcctttagttcctcctcctccaccgccaccaccaccaccaccgccacctttgccagaccccacacccccggagccagaggaggagatcctgggatcagatgatgaggagcaagaggaccctgcggactactgcaaaggtggatatcatccagtgaaaattggagacctcttcaatggccggtatcatgttattagaaagcttggatgggggcacttctctactgtctggctgtgctgggatatgcaggggaaaagatttgttgcaatgaaagttgtaaaaagtgcccagcattatacggagacagccttggatgaaataaaattgctcaaatgtgttcgagaaagtgatcccagtgacccaaacaaagacatggtggtccagctcattgacgacttcaagatttcaggcatgaatgggatacatgtctgcatggtcttcgaagtacttggccaccatctcctcaagtggatcatcaaatccaactatcaaggcctcccagtacgttgtgtgaagagtatcattcgacagtgagtacggctccacagcagaaacctataggaaaaatatctaaaaacaaaaagaaaaaactgaaaaagaaacagaagaggcaggctgagttattggagaagcgcctgcaggagatagaagaattggagcgagaagctgaaaggaaaataatagaagaaaacatcacctcagctgcaccttccaatgaccaggatggcgaatactgcccagaggtgaaactaaaaacaacaggattagaggaggcggctgaggcagagactgcaaaggacaatggtgaagctgaggaccaggaagagaaagaagatgctgagaaagaaaacattgaaaaagatgaagatgatgtagatcaggaacttgcgaacatagaccctacgtggatagaatcacctaaaaccaatggccatattgagaatggcccattctcactggagcagcaactggacgatgaagatgatgatgaagaagactgcccaaatcctgaggaatataatcttgatgagccaaatgcagaaagtgattacacatatagcagctcctatgaacaattcaatggtgaattgccaaatggacgacataaaattcccgagtcacagttcccagagttttccacctcgttgttctctggatccttagaacctgtggcctgcggctctgtgctttctgagggatcaccacttactgagcaagaggagagcagtccatcccatgacagaagcagaacggtttcagcctccagtactggggatttgccaaaagcaaaaacccgggcagctgacttgttggtgaatcccctggatccgcggaatgcagataaaattagagtaaaaattgctgacctgggaaatgcttgttgggtgcataaacacttcacggaagacatccagacgcgtcagtaccgctccatagaggttttaataggagcggggtacagcacccctgcggacatctggagcacggcgtgtatggcatttgagctggcaacgggagattatttgtttgaaccacattctggggaagactattccagagacgaagaccacatagcccacatcatagagctgctaggcagtattccaaggcactttgctctatctggaaaatattctcgggaattcttcaatcgcagaggagaactgcgacacatcaccaagctgaagccctggagcctctttgatgtacttgtggaaaagtatggctggccccatgaagatgctgcacagtttacagatttcctgatcccgatgttagaaatggttccagaaaaacgagcctcagctggcgaatgccttcggcatccttggttgaattcttagcaaattctaccaatattgcattctgagctagcaaatgttcccagtacattggacctaaacggtgactctcattctttaacaggattacaagtgagctggcttcatcctcagacctttattttgctttgaggtactgttgtttgacattttgctttttgtgcactgtgatcctggggaagggtagtcttttgtcttcagctaagtagtttactgaccattttcttctggaaacaataacatgtctctaagcattgtttcttgtgttgtgtgacattcaaatgtcatttttttgaatgaaaaatactttcccctttgtgttttggcaggttttgtaactatttatgaagaaatattttagctgagtactatataatttacaatcttaagaaattatcaagttggaaccaagaaatagcaaggaaatgtacaattttatcttctggcaaagggacatcattcctgtattatagtgtatgtaaatgcaccctgtaaatgttactttccattaaatatgggagggggactcaaatttcagaaaagctaccaagtcttgagtgctttgtagcctatgttgcatgtagcggactttaactgctccaaggagttgtgcaaacttttcattccataacagtcttttcacattggattttaaacaaagtggctctgggttataagatgtcattctctatatggcactttaaaggaagaaaagatatgtttctcattctaaaatatgcattataatttagcagtcccatttgtgattttgcatatttttaaaagtacttttaaagaagagcaatttccctttaaaaatgtgatggctcagtaccatgtcatgttgcctcctctgggcgctgtaagttaagctctacatagattaaattggagaaacgtgttaattgtgtggaatgaaaaaatacatatatttttggaaaagcatgatcatgcttgtctagaacacaaggtatggtatatacaatttgcagtgcagtgggcagaatacttctcacagctcaaagataacagtgatcacattcattccataggtagctttacgtgtggctacaacaaattttactagctttttcattgtctttccatgaaacgaagttgagaaaatgattttccctttgcaggttgcacacagttttgtttatgcatttccttaaaattaattgtagactccaggatacaaaccatagtaggcaatacaattttagaatgtaatatatagaggtatatttagcctcttttagaagtcagtggattgaatgtctttttattttaaattttacattcattaaggtgcctcgtttttgactttgtccattaacatttatccatatgcctttgcaataactagattgtgaaaagctaacaagtgttgtaacaataatccattgtttgaggtgcttgcagttgtcttaaaaattaaagtgttttggtttttttttttcca

SEQ ID NO: 432548 - DNA, 1941 bp, Homo sapiens
ggcggcggcgcaggcgcggttctcgtctcctcccggccggcggagcgagtggaggctgcagcccagctcgtctcggcgcccgcgtcgccgtcgcgaagccccccgccccgcttccgccgcgtcggaatgagctcccggaaagtgctggccattcaggcccgaaagcggaggccgaaaagagagaaacatccgaaaaagccggagcctcaacagaaagctcctttagttcctcctcctccaccgccaccaccaccaccaccgccacctttgccagaccccacacccccggagccagaggaggagatcctgggatcagatgatgaggagcaagaggaccctgcggactactgcaaaggtggatatcatccagtgaaaattggagacctcttcaatggccggtatcatgttattagaaagcttggatgggggcacttctctactgtctggctgtgctgggatatgcaggggaaaagatttgttgcaatgaaagttgtaaaaagtgcccagcattatacggagacagccttggatgaaataaaattgctcaaatgtgttcgagaaagtgatcccagtgacccaaacaaagacatggtggtccagctcattgacgacttcaagatttcaggcatgaatgggatacatgtctgcatggtcttcgaagtacttggccaccatctcctcaagtggatcatcaaatccaactatcaaggcctcccagtacgttgtgtgaagagtatcattcgacaggtccttcaagggttagattacttacacagtaagtgcaagatcattcatactgacataaagccggaaaatatcttgatgtgtgtggatgatgcatatgtgagaagaatggcagctgaggccactgagtggcagaaagcaggtgctcctcctccttcagggtctgcagtgagtacggctccacagcagaaacctataggaaaaatatctaaaaacaaaaagaaaaaactgaaaaagaaacagaagaggcaggctgagttattggagaagcgcctgcaggagatagaagaattggagcgagaagctgaaaggaaaataatagaagaaaacatcacctcagctgcaccttccaatgaccaggatggcgaatactgcccagaggtgaaactaaaaacaacaggattagaggaggcggctgaggcagagactgcaaaggacaatggtgaagctgaggaccaggaagagaaagaagatgctgagaaagaaaacattgaaaaagatgaagatgatgtagatcaggaacttgcgaacatagaccctacgtggatagaatcacctaaaaccaatggccatattgagaatggcccattctcactggagcagcaactggacgatgaagatgatgatgaagaagactgcccaaatcctgaggaatataatcttgatgagccaaatgcagaaagtgattacacatatagcagctcctatgaacaattcaatggtgaattgccaaatggacgacataaaattcccgagtcacagttcccagagttttccacctcgttgttctctggatccttagaacctgtggcctgcggctctgtgctttctgagggatcaccacttactgagcaagaggagagcagtccatcccatgacagaagcagaacggtttcagcctccagtactggggatttgccaaaaggtaagtgtttcttcccatcaactgtctgccatcgctgactccagggacgtgcctttaacaaatgctgtgaaggaattggctggaagtggccaagccctgtgtgtgtgtactgatcagttttattacttttatactcctgaagaagtaatgtgatttaaataaattttctatgccattaggctatttcttgctctctgcataccaaatcttatttctgaccagttttcatttttaatatatttagtcagcgacatgatgggccgagcctgata

SEQ ID NO: 432549 - DNA, 820 bp, Homo sapiens
ggcggcggcgcaggcgcggttctcgtctcctcccggccggcggagcgagtggaggctgcagcccagctcgtctcggcgcccgcgtcgccgtcgcgaagccccccgccccgcttccgccgcgtcggaatgagctcccggaaagtgctggccattcaggcccgaaagcggaggccgaaaagagagaaacatccgaaaaagccggagcctcaacagaaagctcctttagttcctcctcctccaccgccaccaccaccaccaccgccacctttgccagaccccacacccccggagccagaggaggagatcctgggatcagatgatgaggagcaagaggaccctgcggactactgcaaaggtggatatcatccagtgaaaattggagacctcttcaatggccggtatcatgttattagaaagcttggatgggggcacttctctactgtctggctgtgctgggatatgcaggggaaaagatttgttgcaatgaaagttgtaaaaagtgcccagcattatacggagacagccttggatgaaataaaattgctcaaatgtgttcgagaaagtgatcccagtgacccaaacaaagacatggtggtccagctcattgacgacttcaagatttcaggcatgaatgggatacatgtctgcatggtcttcgaagtacttggccaccatctcctcaagtggatcatcaaatccaactatcaaggcctcccagtacgttgtgtgaagagtatcattcgacagccttcaagggttagattacttacacatgagtacggctccacagcagaaacctataggaaaaatatctaaaaaa

SEQ ID NO: 432550 - DNA, 3491 bp, Homo sapiens
agcgctagtgtgtccgcctagttcaagtgtgcgtggagattaggtccaagcgcccgcccagaggcaggcagtccgcgagcccagccgccgctgtcgccgccagtagcagccttcgccagcagcgccgcggcggaaccgggcgcaggggagcgagcccggccccgccagcccagcccagcccagccctactccctccccacgccagggcagcagccgttgctcagagagaaggtggaggaagaaatccagaccctagcacgcgcgcaccatcatggaccattatgattctcagcaaaccaacgattacatgcagccagaagaggactgggaccgggacctgctcctggacccggcctgggagaagcagcagagaaagacattcacggcatggtgtaactcccacctccggaaggcggggacacagatcgagaacatcgaagaggacttccgggatggcctgaagctcatgctgctgctggaggtcatctcaggtgaacgcttggccaagccagagcgaggcaagatgagagtgcacaagatctccaacgtcaacaaggccctggatttcatagccagcaaaggcgtcaaactggtgtccatcggagccgaagaaatcgtggatgggaatgtgaagatgaccctgggcatgatctggaccatcatcctgcgctttgccatccaggacatctccgtggaagagacttcagccaaggaagggctgctcctgtggtgtcagagaaagacagccccttacaaaaatgtcaacatccagaacttccacataagctggaaggatggcctcggcttctgtgctttgatccaccgacaccggcccgagctgattgactacgggaagctgcggaaggatgatccactcacaaatctgaatacggcttttgacgtggcagagaagtacctggacatccccaagatgctggatgccgaagacatcgttggaactgcccgaccggatgagaaagccatcatgacttacgtgtctagcttctaccacgccttctctggagcccagaaggcggagacagcagccaatcgcatctgcaaggtgttggccgtcaaccaggagaacgagcagcttatggaagactacgagaagctggccagtgatctgttggagtggatccgccgcacaatcccgtggctggagaaccgggtgcccgagaacaccatgcatgccatgcaacagaagctggaggacttccgggactaccggcgcctgcacaagccgcccaaggtgcaggagaagtgccagctggagatcaacttcaacacgctgcagaccaagctgcggctcagcaaccggcctgccttcatgccctctgagggcaggatggtctcggacatcaacaatgcctggggctgcctggagcaggtggagaagggctatgaggagtggttgctgaatgagatccggaggctggagcgactggaccacctggcagagaagttccggcagaaggcctccatccacgaggcctggactgacggcaaagaggccatgctgcgacagaaggactatgagaccgccaccctctcggagatcaaggccctgctcaagaagcatgaggccttcgagagtgacctggctgcccaccaggaccgtgtggagcagattgccgccatcgcacaggagctcaatgagctggactattatgactcacccagtgtcaacgcccgttgccaaaagatctgtgaccagtgggacaatctgggggccctaactcagaagcgaagggaagctctggagcggaccgagaaactgctggagaccattgaccagctgtacttggagtatgccaagcgggctgcacccttcaacaactggatggagggggccatggaggacctgcaggacaccttcattgtgcacaccattgaggagatccagggactgaccacagcccatgagcagttcaaggccaccctccctgatgccgacaaggagcgcctggccatcctgggcatccacaatgaggtgtccaagattgtccagacctaccacgtcaatatggcgggcaccaacccctacacaaccatcacgcctcaggagatcaatggcaaatgggaccacgtgcggcagctggtgcctcggagggaccaagctctgacggaggagcatgcccgacagcagcacaatgagaggctacgcaagcagtttggagcccaggccaatgtcatcgggccctggatccagaccaagatggaggagatcgggaggatctccattgagatgcatgggaccctggaggaccagctcagccacctgcggcagtatgagaagagcatcgtcaactacaagccaaagattgatcagctggagggcgaccaccagctcatccaggaggcgctcatcttcgacaacaagcacaccaactacaccatggagcacatccgtgtgggctgggagcagctgctcaccaccatcgccaggaccatcaatgaggtagagaaccagatcctgacccgggatgccaagggcatcagccaggagcagatgaatgagttccgggcctccttcaaccactttgaccgggatcactccggcacactgggtcccgaggagttcaaagcctgcctcatcagcttgggttatgatattggcaacgacccccagggagaagcagaatttgcccgcatcatgagcattgtggaccccaaccgcctgggggtagtgacattccaggccttcattgacttcatgtcccgcgagacagccgacacagatacagcagaccaagtcatggcttccttcaagatcctggctggggacaagaactacattaccatggacgagctgcgccgcgagctgccacccgaccaggctgagtactgcatcgcgcggatggccccctacaccggccccgactccgtgccaggtgctctggactacatgtccttctccacggcgctgtacggcgagagtgacctctaatccaccccgcccggccgccctcgtcttgtgcgccgtgccctgccttgcacctccgccgtcgcccatctcctgcctgggttcggtttcagctcccagcctccacccgggtgagctggggcccacgtggcatcgatcctccctgcccgcgaagtgacagtttacaaaattattttctgcaaaaaagaaaaaaaagttacgttaaaaaccaaaaaactacatattttattatagaaaaagtattttttctccaccagacaaatggaaaaaaagaggaaagattaactatttgcaccgaaatgtcttgttttgttgcgacataggaaaataaccaagcacaaagttatattccatcctttttactgatttttttttcttctatctgttccatctgctgtattcatttctccaatctcatgtccattttggtgtgggagtcggggtagggggtactcttgtcaaaaggcacattggtgcatgtgtgtttgctagctcacttgtccatgaaaatattttatgatattaaagaaaatcttttgaaatg

SEQ ID NO: 432551 - DNA, 698 bp, Homo sapiens
agactgcctgagttcaaatcccagttctgctgcttcctggctgtgtgaccctgggcaaatcacttagcctgtctgggcttcagatttctcatctgtacaatgaagataataaaatacctatctttatggttgtagtaaggattaaatgaattgaaataaagcttttagattaatacttgatatgctacataggtgtcagccattgttaatcattgttgtcattatagttattatcaacatgattatttgctctaagaggaactcaggcatctgcagggtgtggggaaccctgagctgggtctcccctgttgggtgttgtgtccccatcatacccttaggacaacccaggttaggtcagggggatgtgcccttctcttccagccataggctgctctgagcccccagggtcttcagtccatatgagatattcccagcaggccatgggctgacaggcctgggtttggctgttccctccaggggagaagcagaatttgcccgcatcatgagcattgtggaccccaaccgcctgggggtagtgacattccaggccttcattgacttcatgtcccgcgagacagccgacacagatacagcagaccaagtcatggcttccttcaagatcctggctggggacaagaactacattaccatggacgagcagcaccacgaattcgccgagcagcaccacgaattcgccg

SEQ ID NO: 432552 - DNA, 831 bp, Homo sapiens
ggccggagcgcggggaggtggcgccgctggcgggcaggtctccttgggggtccgtggtccaggccaccctgcggctgttgcaaccatccccgcgtgggctgtgctcgggggcggtggtcttcaggctggggctgagaccccggctcggggctgcttgctccggatcgattttcccttttcttccgcccctggccacctctccatatggcgtgcggtggcagcgccgcttcctgggccgccctgggttcaacctgagcggcgggcctcccgggaccctgctgccccttaggcggaggggagagcgccggagagatcggcggccgcctccggatctgcctggagaaggaccagctggagtgcggctggggacgagaaaactggggggcgtacgcgggctcccccgcgggccctgtgggggcggggtcaggacagcagaccgttttattgcttaactcagtgggttggaagctgtaaccccgacatgggcttgcgctacgtcctgcccctccgacccccgggaaaggtgggcagctcggttcgagttgaggggctgcagaacgagggtcagtcttaggggatatttggggccagtcactggggatccctacttagccacggagctgcatcccaggcaggcgcggtgtgccgggtgcgcgccccgccacgggagctgggctcggagctggcgatgggacccgggcacagtggccagtggcaggaagaggtcagaaaccactcgtggtggtggggggagggcgcctcaaccctaccgctgcttcctgcctgcgcggtgagcctgtgcccccaggcggccacgtaccctgaataccc

SEQ ID NO: 432553 - DNA, 318 bp, Homo sapiens
ggtggggcaactgtgttgagaggctctgctgagtaggtgtccacctcccaccccctggcaccattaaatggcttgtccaatgagggtgacaacaccagccccctgaccacttgcccttcttgtctctgcccagacattcacggcatggtgtaactcccacctccggaaggcggggacacagatcgagaacaaaggatgttaagaccagtaaaccagagactagggccccgtcctcagccctcactctcagttgtataactcaagcttggtatcttcagatcgtatttatgagtagagcccagactgctcagcattcct
